United States Patent Application Publication US 2014/0057251 A1 - sequence listing, part 85

SEQ ID NO: 142345 - DNA, 1227 bp, Cannabis sativa
  modified_base (804)..(820): a, c, t, g, unknown or other
ccactgtaatgtttctcatactttatatgtgtttatttaatgtcgttttagaagttcatatttaggatgtttaaacagcatacttgttagtaaatctaagaatctggcaaaataattccaacaaaaggatctcacaatcgtaatccttaaccaactctaactaacgcctctacctcatattcaaatctttatgtgtaaagaagtatgtgagactcttatggttagtataaatttcacatctctctccgtagagataatgccgccaaattttcaaagcgaacactacaacgtcagtggtaccgctgttcataatctttcagttgtcgagaggaataagaaataacccgatcggcctgcatcggaacacaccccggaccctgtccagatgcttcacaataaaccacaaacttctctctatcagaaggcaaggctaacactggagctgtaattaatagctgtttcacctcctggaagcttgcttcacacttgtccgtccacacaaaacgctgattctttttagttagctcgattaagggtgttgaaattttagagaacccttctatgaaccggcgataatatctagccagacccaagaagtttctaacttctgtcactattttcggtctcggccaatccctgacggattctatctttcttggatccaccttgatcccattcttcctaacaatgtgcccaaggaaggacacctgagatagccaaaattcgcacttcttgaatttggcgtataacttatgttcccgaagtcgttccagaacaatccggagatgttgctcatgctcctcnnnnnnnnnnnnnnnnncaaggatgtcgtcgataaatacaacaacacaaatatcgaggaaatccttgaatattctattcatcagatccatgaaagctgcgggagcattggtcagtccaaaagacataacttgaaattcataatgtccatacgtagtgcggaaggctgtctttgggatgtcctcctcttaaattctcaactgatgatagcacgaacagagatcaatctttgaaaagacagtattcccctgaagtttatttaaaagatcatcgatcctaaataaaggataattattcttgattgttagcttgttcaattcccagtactatgcacatccttaaaaacccatctttcttcttgacaaacagtatcggagctccccaaggtgacacactaggccgcgaaaaccctatgtcaagcaaccc

SEQ ID NO: 142346 - DNA, 594 bp, Cannabis sativa
aaaaatagttttgaagagattttagaccgccacgtcatcgtctcatacttctccttttatacataatagcagtattaatttaattaaaaaaagatagaaaaaaactttatataatcgggagaagtataaagcggtgatgtgacaatctaaaatcactcctaatagcattatctcttttttccttaattcattcatttttttttaattttttgttaagtttataaatattaattgattaattaattgaataaaatattcctataaaattcgaaagaagccaaatatgtttatcaagtctaaaaatcaaataataaatctactgatatttatttcaattttagtaattgacttattctattaattggtatatatattttttaaaatatgataacatattttttgatacgttatttatgaaattcaaatgttatataatttaaaaatgttaactataagatcatttttttgaactacaccattttttattagtttttttttttttttttccaaatatcatataattttaaaaatgataattcacacatttttttatggctaattatgtaatccctcatttattagtgagggattgca

SEQ ID NO: 142347 - DNA, 903 bp, Cannabis sativa
ccgaaaaagtcgttggagtttgttgtccgtgctagaaaaatcaccgaagtagctgtcgatgccgaaaaagtcgtcggagttgctgtcgacgccagaaaatttgtcaaaattggtattgtcgctggaaaaatcactgagaaaatcaccaagaaactggtttcttgaagaagaaagaaaccggttcttcaaaaaaacaagtttcctgatgaagaaacgatttcttgatgaagaaaccactttcttagtgattttttcggtgacaatgacaattctgacgacttttctgacactggcaggtactctggtaacttttctggcactgacagcaaacttcaaaaaagtcatcggatttcacatagttgttggaaaaattactaagaaactggtttcttgatgaagaaaccagttacttgatgattttctcagtgatttttctgacgataatggcagcaactccgacgacttttccgacaccggtagctactccggtgactttttcgataccgaaagcaaactccgagaaatttttcgaaattggcattgtcactagaaaaatcaccaagaattttttctgccaataatgccaattctaatgactttttcagcgccggcagcaacttcgctgactttctcggtgccgacaacaactccggtgactatgccgatttcgatgacttatttcagttactttattgtttagcatttatatttcgttatgatttttcatagtgtcgaatctggtttcacaggattcataagttcgaaactggttttacaggttttaaggattctgtaatgaggttgttgtattttataatgttattgtatattttttattttaagtttttttttattattttgtttctaggtttgaaactagttttcacacttatattttatttt

SEQ ID NO: 142348 - DNA, 693 bp, Cannabis sativa
cattcgatgaccgcacaaggcaaggctaccgtactgatacggagagcctatcaagttgctaaccagcaaccgattgctgcgtccagtatcccactaggcagtacagaagaaattgctactgggcatataccccagactcataatggtcagccgtccaatccccgatcatagatctcatttgtgggccaagcggtagacgaccagatcctacttgaccattcttcaggtggagctatacctaataacttcatttaaactgatagttctagccaacccaccagccaaaccagtcagacactgagacctcctggtacttcagtagttaataggttgggcgcggcccatagtctcaaggctgacctgaacataagaagaggtctggacgaacaatatgttcaaccaactgctccacaaggtattcgcatctaggaccgagctccaagagatcctgacgtaacacaggtcagtcaagaggctgaaccggttcatccatctgtgcaagcacagttggatcaactgaaaaatatggttcaaggcctgaccgacccaaaactcactgatctcgagctggaccgagctcgtggatcacccttcaccctggagatcgacatccttgaattacccttaaaattcaagatgctgacctggaagatgtatacagggaaagaagatcccttatcacatcttaagtat

SEQ ID NO: 142349 - DNA, 612 bp, Cannabis sativa
catttttagtctttccgctacttacatggacataaatgaagaaggactttctggaagtctcttctgagtctagaaggaacacctttccttccgcgcccaggaggaagaggtggcatgcgtaacaaagcttccacgtagccttgctttgtgaaggatgtaacttttggggaggccctttacagaagcctgggcataaggctctaatcagttgaggatcaattggactttctttattggattccacgtgtcatgtcctgtagaaattcataatatttaccccctaaacttctggcacgctctactgtctaggggcttgtagtgttcccttattttttttcatgatttattcttgacacatgatggcagttgagatcactttgtttgacgtgaattatcatcagccaatctgtcactgattgtatcattagcatggtaaattggttgcgctctaaatgtagtttctaacaatacgtgcgtgcagggcccattccatgaaggaagctaatgtgatggtagagtgattgagcttacccttcatttaataagcactcttcatgagacatgccctaatggatgttacacgttttgcctaatacagtcttctcgactccc

SEQ ID NO: 142350 - DNA, 630 bp, Cannabis sativa
aaggatagtagagtagccacgtaccagttgaacaaaactacgtagtacgaaaattgaatatgaagatcgaagaaggaaataatggagagaaaatatggacccaaagatgtgtatggaaatttctaggttattctggtattgttattgttatttgttaatattattattaaataacttttaaccaggtcctctcagcgcctaagcaatgcaaattatgaataatataggggcatatttgaaattaaggcaatttcgctgtactagtgatttatcaacctcaacaataaacttcacggccttgataattttctatgcgggcccatccacacacatctactctcttttatgggcctaaagaatataggcacaacgcttccttaaaaacaaaacaaaatattacataaaatattattttttaatttttttttacattttaatatgtttaatttttttatatatttttatggtatttataaaaatacaaaaaaatcggataaaagtaataaaaaataacatttaaatataaaataatatacaaatacaaaaaattaataataaaataataaaagtataatataaaaatagattaaaagactgtattttatgtaattaaaattttaaaaactataa

SEQ ID NO: 142351 - DNA, 798 bp, Cannabis sativa
tcctggtaaaataaattcaaacattgcatgcatacggaaatcgacgggggtgctatatgagatagttgactcgagagtcacattctgcgggatgcacttttagaggcttggtgtgcatgagagttggggcagtcaggcatttgcgtgtgggcatattgtcgaggacgccaacagatgaagtgggggagagacctcacggttcactcaacagactagggattcattacaagcatcgagataagtatcatggagattgattgttgttcaggctgtaaagtcaagaagactcgggacacaggcagtgccagttatctagggtgaaagtctgcaggactcaggtactaagataacaccatgacaatatttgcctaaggagaaagtcagcaagaataaggtactaaggtaacattgaaatgtcaaggagcgaagagttagagtgaccgaggcattagttcaacatcttcatcaaagtgatatgtggaatgcagggactgtatacgagtactcgggtagcttgcgagctatatcttgaggggtattcctctaagagagaagtttttcccaagttaaagcgggggagcccactaattcatgtgtttgaagaatcagggtacttgttcagttttggtgtgtgaatccaaagagaaacactagaacagatgggttgttcagtgtgaagacttgcatgattgttgtaaactgcagatagacaatatgcaggggcgtaggctgagatcaagactgagctagtttgcggcatgtatgggcatgttttgtgtttatggggacactgtaagc

SEQ ID NO: 142352 - DNA, 504 bp, Cannabis sativa
gtaaaattacattgatattacattaatgatcatagagttaatttacttgtttgaaaagtcaatatattaaaatcttctaccacatttttgtttatttgttttttttaatacaaataaagagattgtgatctaactattatatataattacatgaaaattatatgtcagtgttgttgataagtggaagaatattatacctttaatataattataattttattattatttttttatatataaaatgacctaaaacattattttaaggagcaacattaaaacatttgaactactacttttgtatttcttttttaatttgtataataatataagtagcaacttatgttttcttcattcaacttatttttcttggataaaactttctttgtctttatcacatgtcaaatttttagtatgtttaatactagatttaactttttttttaataaataaatgctacaattaacttgaacacaatatcattttgctattccatatttttgtttt

SEQ ID NO: 142353 - DNA, 924 bp, Cannabis sativa
atattgttaattttttatattgctctaaaacaataaatgtgggagatgaaacacctaaatatattattgtcaatagcctaattctctcatttatattataaatgttttattatataattgttattaaaattactattaatatgatttgaattttagttataatacataataaaactaaattaatcctaacataacaaatgaagagtctcaattattatatattaaattatttgttctcttcaactaataaatattaatattattatttatttattttgaaggaaaattaaaatattaattattagtttatattaaattgaaaaaattataaaaacccacaaaattaaaatattacagtactataaaaataaaatcgtctctttttatttgaagattatatagataaagatagatagatacataaatatagatataaattatataggaacacttttataaaatttatttttcaattagtaattgaaaaaatatactatatataattaataataattttaagttgaaatatttgttttaatgatgagaatcaaatggtcatgattatatatcatgtacaaaaactatataatttctcatgcataaaatacataattttataaatacatcatcattatttttaataattaatatatagaaatatattactaattattaataaaaaatagaataaatatttgtgtaacaaactattatttacatctgtagtctaattttaacataatttataatatataatagataataacatttgcattgtcatctaaaaaagataaaaaagaaatatactattaacttatataaattaacatttttaacatataaaatctcatgattaatatctaattataaaattaaaaaaaaattaccgaataaataatgtgttctctaacataggcacataaa

SEQ ID NO: 142354 - DNA, 670 bp, Cannabis sativa
tctggaaaagttaaagaaaaacgacaacaaaggacgttaaaatagtaaaaaagaatttagaaaactaactgccacagagctctttaagggcacacatgctcaccacttatataccattgaattttttaattaagtttagattttagttgtttttgaacctgaaaaatagataaaatctattattttgcttaattggttatcttaattttttgaaatgtttattattttatcttatttttaaattttatgtcagatattttatattttgtactatttaattaattttataaaatgaccttatttgaaatgaaaataagattattttaatctagaaattttaaaaatgtaaccaggtattttgttaactttcaaaattttgttattttatttaaattaaattataaaatcagataaatgatatttatttattattttattttattgcatatattttattcaattttaattaaataacctaaaatttaaaaagttgttagcattttttttgaatagttatttaggtttgttgaaaacctaattttcaaatttatagatttaattttgaaaataactatttaatttaattttataatttttgaaaataataatttattatttagatttttcgaaaataatttaattattcaattaatttaaattaaataaatcc

SEQ ID NO: 142355 - DNA, 652 bp, Cannabis sativa
taaccagggggttcatgttgccacacaaagattccgtgtttgagcggttcgtgaagctgcaacctccaacttttttgggaggtactgatataattaaaattaagcagtgaatgagtacaatcacccatatccttgataatatgggggtaacgggaacagagagaataaattgtgcagcttttacgttacaagatcatgcccgtgtctagtatgatattgtggggcagactcatgatgtcagtgtgatgacttgggaagagttcaagagtctgtttgaggaaaaaatttataacatcgccgtgaggacctcacatatggaagactttatgaaactgacttagggaaaaatgtctgtggccgaatacactctggagtttgatcggctatccaaatttgttggtgatctggtgcctacagatttcaacaggaaacaaaaatatgtgagaggactaaatgccacaatcactcgagacttgaagattaccactactcatgacactttgtacaagaaagtggtagagttagccttaattactaaggaagctgagcaacatgtaacaaaggagtagattgcaaaggatgctgccacaacatcgaatcctcctgtaagtggtaatatcagtaaggggactgacggtggtaaccctgatca

SEQ ID NO: 142356 - DNA, 645 bp, Cannabis sativa
gataacaaatcagattagattgagatgggttttatttagggcataaaatcccaacattgtcagggtgcatttggaacaaggcttttttgacttcactctcctcaacaggagccaatattaacgagttctgaagcagggtaatagttgttggaatacaatctatcacctagttccaattagtactagagggggtaaaaagttgctaaaaatagccaaccattacatcttgaagaccattgtcccatccaaccacggtgcctgaatcatcacgaagagagttaatctggttgttgcgctttcttgttttggcagcagcatgaaaatatttagagttgtgatccccttcctttagccataactgctttgatctctgtctccaaaatatctccttctgagtaagcatctcagcaagcttttatttttctcctgatatctctttaccgattatgcatcacgccgacccaatactcttgagtgagaaattctttttttaaactaagaaattcttgacttaaagttgccaatactctctcttccccaatcagctaacacttcagaacacttggtgtaacgccctaacatttaggcacgctacccaagatgattaagaaaccctaatcccctaaatgggattacaaataaaat

SEQ ID NO: 142357 - DNA, 763 bp, Cannabis sativa
attatttctgtgttgaatcataattgtgaggctcaaattttagttaacgaaaatctgtgttaatagtttggtattttcattgagagcctcattgaaaaaactcaaaaaaaaccttcccttctttaaagaaaaaccttctcctttatggctaaaaatcccgagaatatcaacaccacacatgaggaaactaaccgtcgttctagaaaagagcctatgggctctagaagatcaactaatctgccgtccagaaggagcacctgttccaggagggtccaacctaaggatggtcccagtgctcagaccatacgtccccggagaactaaacccgacgttggtcgtagtacttggacaaaacgctcgaggaggactcagcgtgggaatggctagaatcccgaggtgagggatgaagagctcaacaatggaggtacccaatttgtgggagaaaagacttatgaaagggagagccgccgcttcaaacgccgtctggaaaaggcgcagcgtcaaaatgctgagctagaatgagaggtagccttggccagggaggcgcaggggacaaatgctcagaaccaacctgaacttggagtgagaaggccacgaggcagaccttgtggctcacaaaccaggagactagaaaaggcccgggaagaacgacccagggaaaatgagacaccccctgagaatcaagatgaatagccagaaaggaggcaaccagaaactgatgaatgagaaatccctcattaaaatgaggaagatcttggaactc

SEQ ID NO: 142358 - DNA, 637 bp, Cannabis sativa
ttttaaatagtaatataaataaaaaattaaaatatttatatatatcacaggatcatcttaaatctaattatttttctgctttaaaaaaaatctaattatttttatcattcactctttcatcttttcttctcacccctctatcaattatatgtattatgagaatttggattatgaatgaacaaaaaagttcagtgttgcttctttttcttattcgagtataggacttgaatttgtatatgttatgagatttacaagatttttagcctctgaatcaaatttattatatgtattatgagaatttggattatgaatgaacaaaaaagtccagtgttgcttctttttcttattcgaatataggatttgaatttgtatatgttatgagatttgcaagatttttagcctctgtatcaaattttatgtccaattaatttgtctcgagaatggaacatatgtatatagagtgtttaatgtattgttatatcaaatttgtggcaatgctttcctttgatttttttttctcaaaattgcacggggcattggcattgccgtttgcagggatttcttagttaaatatcttgtgtatatatatactagaaaaaaaaattaaaacgcaaaaaaatatgaatgtaacaataat

SEQ ID NO: 142359 - DNA, 696 bp, Cannabis sativa
  modified_base (40)..(41): a, c, t, g, unknown or other
  modified_base (643)..(647): a, c, t, g, unknown or other
tatatatatattacttaattgcaatatctaaaattttacnncaaattcaaaactaatgaacaaaactcttcccttatacaccaaaattcataccaatataaatttatcttgattcaacattgaccattatcatctccatagttgttagctcgtcttcccaattagttagaagataattcactggtagcatatgctaattaacaaaagagggattttttctaattttttatgcaagtaattagatgatgagaacctatatataggaaaaaattcgtgataatgagaagttaaatagctcaaaagatggttcctattttattatcaccaattcaatttttatctacatactattattgtaatttatttatttattttcaagtacaccaaaagtcacttaaaagagatgaacaaaatgaaatattaaattctttttttttcttaacgaaacattaaaattcttacttattaattaattatatataagtgttatattatttattaaataatataattcttaagattaaaattatgatatattatatatattattatatataatataattaggaattaaatacatgtaataattacaaaaaatatgattgggagttacatatagttattgttgcccctgattttgccnnnnntacgtggaccaaccagacagggactcgtggaccaaaagatcttaacact

SEQ ID NO: 142360 - DNA, 819 bp, Cannabis sativa
tcctttagtgagcttgttaattggaaattatgtgatttatttaatgtttgttggctgaaataagaaaggaattagcaattacttcattttattcaaaagttagaaaattggaaaaaaattaagaaattcgaagctctctctctccctctttcggccctctttgagcagcaaggaattggggatttttctttgtgtttcaagtggattctcaaggttttagtaagctcaaatccttggtaagattttggtaacttgttcttgatgttttcttgaatttttgaagaaaaatgataggttgcatgcttagttttggattgttgttgctgctgtaattatgtgttgttttgagaagtttaaacatgcttgattgagtgaattagaataggttttgaggcatgtttagttgcttttgttcaagtttggaattttgactcaaaatcttggttttcatggtaaaaagaggaattttgatgctgtgtttgtggtggttgttttctgttgtttgcagaggtttagatatgcatatttgagtagatttaatcaggttgtgttgcatgttagtgagatttagttaagcttgagttttgaacgcaaagcttggagctcacatggtgatttttgattctgtgctttctgggttgttttattgctttggaaatgtttattggggtatttagaacaggtctggagagttttgtaagttttgaggttgaattacatgagatatgaaattttgaaagttttctgcactgaaccggaattccagttcagtatggcttgtaggaaccggaatttcagttggtgttctgggttcctccc

SEQ ID NO: 142361 - DNA, 787 bp, Cannabis sativa
agcgttctatgtaatcaagagtataattttgaatcaatagtggaatcaggaagaattaataagatagagaatttacttggtgaattctaaaactacttattgaaagcttgattatacagacccgtggtccccacactatctgaggtcatattgccttgtagactcaattaattggttttagataatcaattacaattctaaatgagactagatcttatttgtgaattttactaagcataggcgaatttgagaagaaaacagaaataaaggatgtatttattaattaagagactttgctaagtgtaatttttaaataagttaaatggtaattttatttaattattattataattattaaataaataaaatcaacttttaaaggcttggaatagaaaaatggttttattaagaaaaagataagtacgactaaaatggtaaaattaaaacacattgggctttcctataagggttcgtctgatgcttcaattgaaggccattttattttatctttttcaagtatatttaattctaaccctaaccctaagacattactatgaatagacccttatagctctcagtcataccacacctcaatacacacctctgtacttgagatacaagtttcacttgactataaggaatttaaattcctcattatctcttcctcaagtcacacatgcctatgttggggattattttactaggatctagatttactaccatgtatgttatttaacatcctcaatatgaatttctaaaacaacagaatttaaacacatataaagtt

SEQ ID NO: 142362 - DNA, 1406 bp, Cannabis sativa
tttgaggcatcataatcagattcgaagtaagttcattttttagcactcggtgcttgagcacccagcacctaggttgacaattgatcaatctggacgcattccgagtaacagattgacgatctgacttttgtaccttcttcatctttattaaaaatagggaaataggtgctttcgaggaaggaacaatacttcctgggtgtcaaaagcaaggcccagtgcccaggttgacacctggggctggcccagtgcctaagttgacattttgtcaacctgcgctgattccgataatgttttctaagaactctttcaggcatcttctctgtttttaaaaaagattaagttttaactattttcgaggaccatccaaaactttctaagggtcataactgcgacccagcggccaagttgacacctgaaactgggcctagtgcctaggttgacatactatcaacttgggctattttctatcaagttctcaaaaaagtgttctatgcattttttctgtcatcagaaataatgaagatttaagtaaattcgggtagaaaaccataaactcgagtcgagcccttggaaatagggctcaatgcccaggttgacaatcaacctagggtgctgcttttgattgctcaaatgtcaaatctatttcgaccaatgaattcggaatggtcaaaaataggataggagaccttgtcctcgagttcaagaaccttggtatcaaaacgagatcccgtgagttcgggaatgagtacccagtgcccaggttgacaaataacctggtgtgctgggttttgcttatccgattctgattctatttcgactgcctgtctaatttttcacaataactaagatccatgaagttagagaagtcaaattcacaacttcgcatttctcatttccaagataagaaagtcactcgaaaataaagagtttcgagtctctcctttctacaaaacagcaacatctttgagaattggtgactagctttgccagaacataaaaatagactaagtgatgtcaaaatattacttaggcatcttaaagagcatcccttgaacattttcacacttatccagtgttcaggttgacgtcatatgtcaacctatgtgttggccgtcatgaactcgttttagtaaaacagctataactcactcaatattaattcaattgacgcaattcaacttgcgttttgaagttaattcatgctctatcaagtcatgtctcacactttaatcgtacttctgaagctatcggcaccaaatttcacccctaagggagttacaaaaataagcttcgagttacccacagcgggtcccatggagcttcgaaaaatgactatcaccatcagaagttgatttttattatcatcattgttcggctaattttagtctaagtttcgggtcgtattt

SEQ ID NO: 142363 - DNA, 599 bp, Cannabis sativa
  modified_base (540)..(540): a, c, t, g, unknown or other
tttcttttccagttaatatggtcattatctaatgttgttttgtttttaaccggttatttttttagtgatcttatattttctttttttgtttattaagttgtttgtgttgtataaattatatagaacctttttttttctttatagaacatgtatgttggttcatgtttaaatataaccggtttcattttttttatttcttttgttttggtgcatgttgaatataactggtttttttgttgttttaattttttttttataggcaattctatgttatgaaaattttcatttttattcaaaaccaattatgtttgaagatatggttcatgatcaacaaatattgaaatgatttttggaacatacaaaatctaatatagtgttttttttattgtaaatgtatctttgtattcaataaaaccgattattgttgttgtgtctttactttcttttgccttggttgttttggttgttgttgctttggtggtattgcttgattagtggatgtttatctgttgtgccctgtctttttgcaacgtccacacnttagttgtacctttggctctccttttgaacttattcttcttctcctaggtctccctgct

SEQ ID NO: 142364 - DNA, 525 bp, Cannabis sativa
aaattttagtacacaaaatgtatatactacaaactaaaaattaatattccatcaattttttttatcttaatacaaataattgatatataataactttaattctctctctctattaaaatatataatttatattcatatatacacgataactagttttatagttaatgtatataaacacttgttaataaaaagtgaacagcaaaaaaaaaaaaacattcattcaataaaatatacacatccattacagtatatatcatactccaactataattggaaagcaaactgatgtaccacaacatgataatatcttatatatagtcaagggtactttaggtagcaaaaagtaaaaaatgatatttactttattattttaaaaatgagacattaacttttaccggagaaaaaaataaggtcatttactagcatttctcaatttttaatggcctgaaaagttcatggggcatgatttgatacatgttaaagtttagggtgtaaaaatcctaattatatttatttttaaaaaaa

SEQ ID NO: 142365 - DNA, 880 bp, Cannabis sativa
  modified_base (362)..(365): a, c, t, g, unknown or other
aggaattgttagaggacaattaataaatgaaggctttagtgattgggtgcatattggtaaaagacttagagagcatgagataagcatggaacatgataaaaatatgaccacttgatacgaattgcgtctaagactctaaaagaatcaaaccattgataaatcgactcaaagactaattgaaaaagaaaaaagatccctggaaaacagttttacaaagaattattaatagttaaatttcttgctaaacataatgtggcctttcagagatctaatgagaaattatatcaaaatagtaatggcaattttcttggcttaattgaaatgttagcagagtttgatcctgttatccaagaacatgttannnnattacaaatgatgatattcacattcattatcttggacataacatctaaaacaagttaataattttgcttgcttctgcaattaaaactgaaatcattaacaaagttaaacaagcaaaataatttttctgtgatacttgattgtactcctgatgttagccatcaagagcaaatgtccttgatattgagatatgtggatgtttttccacattctgctagcattgaagactcttttttaggatttttaaatgtgaatgatacaactggtcaaagacattttgatgtgctacaaaatgagctaaaaaaacttgatcttgactcatttgatgtgtgagacaaggttatgataatgggtcaaatatgaaaggaaaacatcaaggtcttcaaacgaaatttttagacataaatccaagagccttttatactccttgtggttgtcatagtcttaatttgattttgtgtgacatggctgaatcgtgtagtaaagctagagattttttttggagttattcaacgca

SEQ ID NO: 142366 - DNA, 523 bp, Cannabis sativa
  modified_base (297)..(307): a, c, t, g, unknown or other
  modified_base (471)..(478): a, c, t, g, unknown or other
agtgagttcagagcgaaaagagaggttttttggcttcaagtttgctgaagtgccttcatcgaaactgctcattggtttgacgttcctggaatccagacatctgacacttgagtaagttctcgatttcctttacgcttatttttgcatgtttatttttttgaatgcaccttcgactttgccgtagaacattcataggaaaccctaggtttagaaactctgcgattcttctttgtcatgatttcatgcgattttacagtccataatgcttgctttctgaactgcataatgcctgtcttnnnnnnnnnnnattctaagcttcatgaaatttttgccctaattcgagaaaatttcaaacttcctgagttttggcttttctttgaacattcttattctttgatttgttgagtactcctggtcggtgtatttgcttatttatcgctcgatattttggccaaacactcatcttgtgtnnnnnnnnttgtagatgaacccaggtgagttttgggagagcgaacatcgaatc

SEQ ID NO: 142367 - DNA, 663 bp, Cannabis sativa
agaacgaaataaaaataagctcatagactctatagaacctaccctataagatgctggcacaacataagtttatatttttcaaattttaaaaagtgtatatatatatatggactccacgtgtgaaaataagttataggagataaaatttgcaatagtaatacatggcactagggttgttaatataaattggaaaatcacggtttaaattcggaccacgataattcgaactattgtaaaccgtaactggagaaatcgtttttggtggtttggtcaatccggactgtttacggcgtaatgatttggttgcagttcgtaataaataattaacggttaaatcggaccggaccgtttatttaattatgacttatatatacccaaatttatttgaataaccaattataatagcacaaatattactttaataaaacaaatcatttgtaggatcatacgttcacgtacaatctaaataagaaaaaaaaaaacttaaactttacctaaaactaatatttacgtgcctcggcacgtaactcctacctagtatatattatatatcattatatgtttaattttgaacttttttgtgtgtcaagttttttattgcatgaattttgaatttttatgttatgtttgacttttgagaatgtttttatatcgttatttata

SEQ ID NO: 142368 - DNA, 877 bp, Cannabis sativa
ttccaagttatctgatccacgtgtcccctcttgactggtccacgtattttgggcgaattttggagcaacaatattaataaaattatatacaactataagtaattatataatgcttacaaacaatgaactataagttttaattattcacgattttcaataactcgttgatagggaaacctttagattcaagtttaagtccccaaaaagtaatttagcatgtcactcaccagttttacgaataatgtgatttaggggcctgtaaattgtcgagcagctgttccactcaggttggccgatataactaaaattggaaatgaggtaagatcagtataatgatatgcatgcatatgtgattacatgtttagcgtgcatgtttatgaatgcctattagataatatattttttatagcggtattagtgtacatagagatgcactgaatatcgacagtatatgtttggctaagtactaattgatgctatcacatcggtacgactagagtattgagtatagtctgatattatggtcgatagtactgtcgtatgaacgttctagactcagtaccgtgttggacacgaggatagggttatggttgggtgtatgggcgcctaattataatccaggttatagttatgttattgattatgcttttcttactaagtctattgactcacagatattgtttgcacatgtaggtaagggcaaggctaaggttgagtagccgtgagagtgagcggatgaagattatacatgccggggcagttaggcctggagcgtacggtacagtctttgggacggctggttgtattttgtctagtcgctagtaggggtgttcacaaagtatctgatccaatctaatccgcacgatccaatccaatc

SEQ ID NO: 142369 - DNA, 603 bp, Cannabis sativa
attgtctcctccttctataacagccagctggcgtacttttagtgactaatacataattgttgatgtggataagtgaaattcgtttttttaacttcttccacgtcactgctcaaactgcccaacattctgccagcatttcctcccagattttagcttttgttccaactttgtccttgcctcctttccttttccctagcaatttaattcttctttctcaacaaccaacaaacaatttaattaaataaacacaactaaaaataactatatttataagacttcaaagctagcttggtaattagaaaatgaagctaaaaactaattaaagctaaataacaaacacactttcattactcttttcatgataatttcaagttaaaggcacaaaaaaaaaaaaaaaaactctataccatagagttatcaagtctcttatgagttactttatggcatttaagaaaacatatgaagagcttaatgtattattgccctttaatcctaatgtgaaagttcaacagcgccaacgagagtagatggctattatgagttttcttgcagtactcttatctgaatttgactctgaaacgtcacaagttctctctggttctg

SEQ ID NO: 142370 - DNA, 930 bp, Cannabis sativa
tggttcgaggaggttccagcgccggtggcggacgtaggcgtcgtaaattcatgagtgattctaatcactttgtcaaaaaaaaaatatatatattgataaggctaaaagaataaaaaatataatcaatgaaataaaaaaaaatacaacagtatttatggtaataattaatttatgtgatttgaatatctatatacataatatttcataatactccatgttggatgtctataataactgtctcattaaaaattagttagaaaatttaataggacaaaaatcggtcaaaggaaaacgagtgcgttgtgaattaactacttctcatttaggcattcgtggagatcttataatcgatgaatttcaatctcatgtgtcatcttctcaaatgttgatgttagtaatgattttgtaaatacatttgcaagattgtcacttactgaatttattgaacgtcagtcgagatcatcactctcttgaagatcgtgtgtaaagaagaattttgataaaatgagtttaattatatctccttcaatttacattccttttagttgagcaatgcaaacaaaactatcttcatagagattgtatgtacttctttattagatgcaattcatatgtactcaaccaataatcttagtcgcatacattctctacttgctcatgaattacaagtatttcaatataatttaaagttgtttcgttaaaaatcttgtcaggaaaacccagtgagacaaaacctaagctaaaggaaaaagattacaatacatatctttcatattcataattatttgtaagttgcattgttaaaagccttgccagggaaattcagtggggcgaaacctgaactaaggaaaaaagagtgcaacataaatatgtcttccctttatgtagatatgatccataattattttggtgataatatatctcataaga

SEQ ID NO: 142371 - DNA, 612 bp, Cannabis sativa
  modified_base (48)..(62): a, c, t, g, unknown or other
  modified_base (193)..(194): a, c, t, g, unknown or other
agattttttttttttatcattttttaattttgattttattaatatatnnnnnnnnnnnnnnnaatttaaatgaaagaattattacacatttatctatacattttttaatcaaaaactttttaattaaaattagtaaaaaatatataattttaaatgattatacataagttttcaaaatttaaaatattattanntaaacaatagttacttaaattattctaagagaaataatatgacaataaaattatatattatttttaaattactagaaaatttatataatatttttaaaaattaatatttatattaaattggtgattaaattattgtttaagataaacaattttattattcaagtatttttatcttactattttaattatttattaaaataaaaaatatgataaattattttattatatattcatgatatacacttggttatataggatatattattttattttattttatttatttattattatatattttaatttaaattttatattatatattttttattttaatttaagctttttttctaaaaggaaatagataaaatagtccagtctattcttaaaccaaacacaggattactttaagcataat

SEQ ID NO: 142372 - DNA, 783 bp, Cannabis sativa
gctttgtggagggtattcttagcctcctcttccacccacttcttaaactctctgactatctcctccatggctccattgtccgaaccagtctcaagatcgtcagataccctccgtttagtgatgacctccgccatatggattgtcagaagagccaacctgactcttttttttagtgcgagccatagcgttcaacatggtaagtagttttgcagtggttatagcagtcttggccaaggggagctcccctaacgggccgatgggcacccctacgggaatgttgacctcaccaaaaggaagagtatatgtccactctcagggcaaataagattgtatccccctttcaagctcccaaatgtgcctgttgtacgcttcaccacctattctctctgggtagaggtggtctggcgtctctgacacactactaagcccctcatcacgaattatgcgggggcgacgccggacaatcttcaaacaaaagctgaagaaggtcctcgtctacttggtgttcacctccccaataatcgctataacgcatctgcaaaaaggaaaaagcgaggaggtgagtacaccgagtaatactagtaagctatccatgatggactcacctactagtacaaaaataaaaggagaagagaaaatatgcacaacaaaaatttacaacgagataataccctaagtagctaaatgaagggagcaacaatgaccattacaacacttaatatttttactaagtgtaaaaagcaaaaacaacacatgaaggcatacatttaagaccccaagaat

SEQ ID NO: 142373 - DNA, 653 bp, Cannabis sativa
tgaagtttgcgccaacaagtgaccccatatgcctgggcaaattcagagccagcttctccagctgcgactgatagggtctcgatggcctgactcggaggggcagtagcgagggtcgcctcgagatgaggggcaatggtgttgggaacaactgtaggaggaacttgctcttggatgtcgttatccgaaacctcgagatcaataggctcagccagtaatttcttcttatgagcagtggttttcctttgcttcttgggaggaaccacttcgacagcagtagggactccagggttggatgtccttttcttccccttacggtcctggacgtcttcataacccatgtctgcaaaacaaatcgaggtgttaaaatcattataaaagctaattaaaaaggggaggagtataattttccacctaagggatttaccaaaatcactagaatgcgacctatcactagatgaaggggtagaaggaccataatattcgctaaaatccctacgacatgtaattttgaatatatcagaaggctcgattggttctaaatcccagctcgcatctatgtgaccagccttatcttccatagtaccatattgctcggctataccataaaatgactcgtgacagttcatctggacgtggaatctaggataccaact

SEQ ID NO: 142374 - DNA, 1004 bp, Cannabis sativa
agaagccttcacggaaataggcctcacggaccgggatctttcaccaagcggttcccagctcacagggtttaatggaacaacacttatcccaatgaaaaaagtgaggctcccagcaccctgtgcccagacacacccaaaagcactttcaaatactgcacgtttgtggtggtggactgcccaacggcttataatgcaatcctcggccgaccctagtggatttcggcacagtcacatcgattacgcacttgtgtctgaaattccctactcaggaggctaggataggaaccataagagggaaccagagggaagtcaggcagtgttacaacgttactgcccgcttacccgttttattggtccgtgaagtaattgagcaaagaatggcggaagaagacgagttggatccccgtgtgggatccgaaaaaattgtagtttccttagaggatgtcgaggaagggtcggtatgtgacctcgaccccaccaaggtcctccggctaggaaaaagtctgaagccaaaggaaaaagaaaaaataataaagacgctaaaggctgccacggatgtttttgcgtggtgtcaagaggacatgaccggcataagccctaacatcataacccacgtccttaacgtcgacctggacataccaccggttcaacagaaaagatgccccctcgactcggtgaaggtagaagccctagagaaagaggtagacaaattactaaccagtggcatgacccgagacgtatattacccagagtggctggctaatccggtgctggtaccgaaaccaaacgggacatggcgggtttgtatagatttcaccgattcaaacaaagcctgcccaaaggactgttttcctttgccaagaatcgaccagatgctggatgccacctccggattcaagttattgtccttcatggacgcatacgccgggtacaacgagatcaagatacacatcgcggatcaagagtgcactagcttcaggaccgataagggggtatactgctac

SEQ ID NO: 142375 - DNA, 808 bp, Cannabis sativa
ttttttttttcattttcttatgtgaatattaaaattacgtgagtaattggatatccaattaaaaagtcgatccaatccaattagtaatttgattggattggattggattggattttaaggtttaattggatcagatcggatgatgatttttcaaatccaattactaattgaattggatcgaatgagggaaaaaaaatgttggattagatcggatacccacccttaatttttatttcattagttatacgatagtacctagttattaccgcaacgaatcagtaactagttattgtaacgaaaacataaaataaaatatggtaaacaacaaccataaaaatgtacaatatatcaatttgtaacaatatttattttgtccgtatttataaaactaaatttaaatttttatattttcaggaattttcctatttgaaatagttattattattcatatacatatgaaaaagaatctcaaggtggtgggattcaattttaagttggtttgggatcaaatctcccaaaagacatgttggtatatatttttacttatctacttaaaatatatagggtaattctattgtaggagttgtagttatacatttcagataaaaagacaaaggtttaacttaaaaaatcactacagctttcttctaaaaaaacaatttggagatatacatatcacattatacaattcaaaaaatctttcaagctttcaagacaaagcaatgccctatatatatttgtagggatacgattttgtcctgtgatgtactttcacggaatgtattccgtggtatattagatgggtctc

SEQ ID NO: 142376 - DNA, 728 bp, Cannabis sativa
  modified_base (353)..(355): a, c, t, g, unknown or other
agagcagaagccagaggcaaaacctgtacctgctcgggtgtttgcgatcactcaagctgatgctgcagctagtccttcggtggtgacgggtcagcttcttgtcaacaacttgtatactgtgttatttaattcgggagctacacgatcatatgtggctacacgggtaattgatctgtttgaaagagggtttggaaccgtaatgcctagcaggtagttagttatctctagtaggcgcattaagtctatgctagttagtatcgaggatagggagttaagtgctgaccttatagaaatggaattaatggaatttgatatcatacttgggatagattttctatccaagtattcggccnnnatagattgtaagcggaaaatggtgacttttcagccagaagttgaagatccatttgtttatgttggatcagttcagggatctcggatcccggttatttatgtgctaagggctaaagatttactacacagtggatgtgtaggatttttagtagtgatggttgactctagcatacctgaaacatttgggcataaggtagtcaaagtggctaaagactttctcgacgtgtttgccaaggagttgccgggattgccagcacaacgagaaataaactttgtgatcgatttggcacctggagcttaacctgtttctaaggctccatatagaatggctccagtagaactcaaggagcttaagctacagcttcaggggatgc

SEQ ID NO: 142377 - DNA, 1435 bp, Cannabis sativa
  modified_base (1041)..(1043): a, c, t, g, unknown or other
tgcatggaatttcgaggagaaagctttccatgagttgaactttccaggtgtgagcttgaaataacattgttgggcggctttcgagagggtagcaggaaaaattctgcaacatacgactcctcgtaccccctgcagatccatttgaatctcgaaatatttgaggtgggaaagaggatcttctcgtcgagtgtacatcttccaggtcggcattttaaaattgtggggcaacgctaggagattgatctccgaggagaaaggggttccaagtccaactcgagattattatttctctatctggccatgccttggaacatattctttagttcgtccggctgtgcctgcacaattgtactaacctgttcgacatttaggccgatctgagtcacgtaagtatctttctaaacgggaatttgagcacgggttccaggctacacgattggcgtgtcaagctcatcgtctactcctctcctcctatttagatcatttctgagatcatgagtcgtccccaacctatcgaatacggaagcgcctagttgtctcagtgattgattggtttggttaatgtgctgactgacaccattaacctggttggaattactgcttggcccaccggcagaacctgtgactagagatttcgtggctggccatttatagtctgagaagtattcatcgttggatcttcgtccgtttcacccagggggatgacattcgggggttgctgcccgacagatttataggctcctcgtatcagcacagtggcttgtcgactatgattgtcaatctctgcatgatgagcccttaatgcttccatctctttgtccctccattcggcaaacatgagcctctgctcttcgaacgcgagatttaccgcatctcagagttcctcctgatcttgatgtagggtgttagtatgaccctgcatgagtccaagagcagcacggaggttttggatatcagtgtcatctccaattatcgtttgaacattggtagcaggcaaaacggttgtgttatgaatgccctggttggctgctgaactggtannnccagtctcttgcacaccaggcgtgatttcatccacaggagtcatcacactgtgacccgcgtttgacggttgtccaggattaacagctggcagaacccttgtgtttcctgggttctgcaatgcaggatccaccgcctgtggatttgccggatcaactacgcccctacgagtctgtaccaccatcgtacttgtgattaaatttagaatgaagagcgcttctttctgctctcaatgagagcaccaaaatgttgacctcgctattagccaacgacagtgagtctaatttagtaagcaacaagtactttatattgattgaaatatagtaaagcaatataaagacacatgaattttatagaggttcagccccgagaagttcggtaatagcctaatcct

SEQ ID NO: 142378 - DNA, 528 bp, Cannabis sativa
caaagtattggtgggggtcctctaataatagaacaaaaggtgtcagttggtttagttggcgacgactttgtagaagcaagaattcaggaggccttggtttccgtaatttgcaggattacgatctttccttgttaggaaagcagggatggcatctttttctgtatgaagactctcttgtggggcgtatttacaaggcccgctactttccaaacggtaatttccttacggctgagataggtcctaacccaagttttatttggcggagtgtgtttgaatcacaacaactggtccgtgatggtgctagaaggagaatcgagcctgatgtgtctacccctgtgcttaatgtcccttggctgatttctgatgtgaacccttgtgtcatttctagacatcctgtgctggctcatagcacggtctcgtagttgatgcatatcgatcataagcaatgggatcttgaggtcttacatgatttgtttgaggcaagggatgttgatttgataacgtaggttcctctaagtgataatgtta

SEQ ID NO: 142379 - DNA, 583 bp, Cannabis sativa
gtaaaatagattgtttgaacactactttctatatgccaaaatagataaaagtacatcaatgcacccctttaaagaggtgtattgtagaatcacacataaataattattaatttttttcactaaaaattttcttttcttacaatattactattcttttagaataactgtaaatactaataatatttcctctattttgaaaataaggtaaattttttttctaaaattttaggttatgtattacttgaataggattttatttaatttaaatgtaaaacactaataatataatctttctaatcgtttaatttctaaagttcgtgtataaagttttaaaattaagtatttatctaaaaagggatacgttgaaaaatatttcttttatcaatcaattaactaaatttatgtctaatttttatttaattgaagcataccatatattgtactcaaaatatcctgacataaaagagttacatagagagtatcttaaaatgataagagcaaaagtagcaaaagtagtacaatgtttaaagaaataggtaaaaataatagactttaaaaaagtgagtaaaaaaaaaaaaaaaaa

SEQ ID NO: 142380 - DNA, 537 bp, Cannabis sativa
aaggatggcatgcaagtcttcggacggatttaatggtgatcctttatgaagaagtttaagggtttttctcaaactttctgaaatggtgcaaaagtggttacttttttcttattttatactcatggtagtggtttcgttagatcaaaggaagatttgatcttatggacatgattcaaagcggaagtggaaaagatggttattgaattctgatgtacctcgaaactgcacaaccgccaaaatcagagaatatgcatcttttcaagaaagaggaacatgacggaaataccctttgtaatcattaaaaagcactttttaattaaaaagaacttctaaggagcaattgttatacccaaaatttggtaagcacatcagaggaagacacgtgtcgagctaggaagaacgaagaacttaaacacacaaacgaaaagtacacttagcatggaatgactcgttggaaatataatttgcaatgtatgtttataactcgactggctaaatagccttttgtgagacagaaacgtacgaactgttaactta

SEQ ID NO: 142381 - DNA, 882 bp, Cannabis sativa
  modified_base (842)..(843): a, c, t, g, unknown or other
agagagagagagagagatgaagagttttctctgtgatgagcttcttgtagaaatcttttagaaactctcactaatttcatgttcttcagtctctttggtctcaaagcgttaactcaatctctacgacccttccaagtccacccttctccaacttacccttttctattactagttcattttgttattgttttattattgctttaaggttgttttcttttatttctttatcacatttttctaaatattctccaatatatattaagttttttctccgttgctccactgttgttttttagttgttctgcttctttttctttttgatgtcttctcttgtatgttctcttattgtgccccaactcctccattttgttacatttgttatgttgtttcttttcttagccaacttccatcctctttttttttttgtcttccaaatttcatcatgtcaatgggagataagactattactatccatgattctttcattctggtaattaccttaaataaatatttagtggttggtttaacttgtgtaatttgaaaccaacatttgttaaatatatgacataacagtgaaacaacccaaaaacaacattagaaaaaccataacaaccccagtattaatagttttaatgtttctgaccttattttttttttcagtatttacagtataaaagaaaaaaaaaagcaaagacagtataaatataatttttttcatgtagtaatataaatataaacatttgtgtgattctacaatgcacccccttaaaagcgatgtattgatgcatccctacttgtttcgacatctagaaaaaaaatttagtctaattttttttttcatnntcatgtacgttatagctatttaaaatatcttataaaatt

SEQ ID NO: 142382 - DNA, 977 bp, Cannabis sativa
ccaatattgtcatgtagtgaaataataataaatttaactaaattagtatagctagagcacaagtaatagaaatatatcataatgctagctatttactttctcaaatatggttttataattaaaacataatattagtaactagttactactactaatgttaccttaataaggtattgtaccaaatatgccaacactaagtataaaaatgtattgatgaaattttttttggcctctcacttagatgggctctaggtataaatttaatctgcttatgtttagaatcggacctcaccatagtagctacaagaaatggctagtactcgaatgtatattattactaaatatgtgagtgtagataaagttaagatatatatatagagagagagaagttaattacagtgatgaaagggtcaaatttgatgagagcataagtggtccaagtaataccattcaacaatgaagcaaatgataagaaaaatggcataaactccacactcttagtagtaattaccaatttctgcaccaaaaacaataaacaattaaaatcaaacaagaaataataatattaaaaagtaactaattaataactagtaactagtaacaagtaatttaccataacagtcaatggagcagcatacatcatgatattaaagagtatacaaatggtaccaacaatgcttgtgagaatgagtcaaagtcaaagtcaaaatggtgagaatagaaatgaaaacaagctcagcaagaacaacaagaacaactttaatccttttcttcttatctcagaagattaagataatgattatgtacactcaattaccaagactagacccatttatagtcaaaccaaaatacttcctggatgaataaaagggagcccataaagtgtccaaacaagacaatttatatgtgtagccaagtatggcacaactgagtattgctccattgattttcttttccatatttgaataaatattggc

SEQ ID NO: 142383 - DNA, 505 bp, Cannabis sativa
tatatatatatatgatcatcaaatgggaatgagaattggaatttgactcaacatactcatttgcttaattaattaaagcggaagaatatatttatccgaaaaagttcaattctaagacccatagcatagctcttgcgtttgtttatatagacctctcattatgactatcatcattggtatagtctttgcaaaataacaattgcttttagcataaaataagaaaaggcatcatggatagagagaatagtatatataagtgataaagtatatattataaaaataaatctataaatatacatgttttcaagtcgtgtggcttgattcaatgtcatatatatgtatatatacatactaagcactattcgtattatatatattatagagccggataatcaaaccaatttttttttttttctgcgatttcagagagagaggaagagagagtgggtttcggggtgcgatttttgggcggtccgagagggtggggctaggtcggggtgttggt

SEQ ID NO: 142384 - DNA, 712 bp, Cannabis sativa
ctctagcatatgttagtttttatgacatttaaaagtactaggttactatttgttatgcatgtaattatttaggttattttaataatgttaaaataagtagtttccttctatcattatctttattaattgttataaattacttttatagttacttttatagtgttcagagaaagtatctggataatttttttgttttactatgttattttttgttattgtattttttaaggttctaaattatttctatggtgataaaaagtatcacttatatgactattagattactttttaattttatttatctttatatattgaaaattaacattctattttttttttccatattaattagggtaaataattaaatatatatgttatttgattatatgtggcactagcaaacttaaaatctaaatttaaaaataaaaataaatatttgtgtagaatattaaaagttacaaaaaaactttagaaatttgttattatctggtgtcaaacaatcagactattactaattttttcaagaggaaagattcacatatacgtcatgttaacaaagcaaagaatcagactattactaatcttttcaagaggaagggattcacacaaaacaaaggaatggattcacacaaaacaaagaccttgactttccccccacaccacttggggctagctcaagtggccataggtgggtgtgtgagtgttggaggtc

SEQ ID NO: 142385 - DNA, 915 bp, Cannabis sativa
  modified_base (851)..(861): a, c, t, g, unknown or other
gcagtgagtaagaagggtctctcaaatagagttgatgtagaattgggatcaccctcatcttccatctcaattatgtaggaatcacctggaatgacaagtctattagtctgcacaaaaatatcttcaactatccctaaaggataagcattagtctgattagtcaattgaattagaacctgagtttctcttaatggaccaagatttaaataagcaaaattagaataagacttatttttaataatttctcctaaatctatcatgcaatgattaaacctggttttactaattgtgcatagaattgtacttgtctcaggcaacaactttctttggagaactacattaaccttcttccccacacttactttctcaccaccattcaaaattttctcatttggacacaactccttaagaatgttagcacaaggaggctcttcattgatttcctcaagacatggattttttacctcaatttttggaatagtttcagggatctccttgatgggctcctctttctttgattttttcaatatactttgaaaaggtggaggaaagacataagttggtacaattggtttgtacaactttttcagtgatggtggaccaactaaagtaggagattcacattttggtggagatgactcttttcgagggatgaattgttgactcatttagttgaaatcaaatcattaacttcttggtgtagtggtgattcaagttgtgtaccactttggagtggtatgtcactgacattctctattggattactctctacttgtgaaggcatagtgtttgaacattgaattccatattcacttgtagatgtttccaatcaaactattaatcccgcagannnnnnnnnnncagtcaattatcccaatctccctattgtatttaatcaaggcgaagcgctcaata

SEQ ID NO: 142386 - DNA, 849 bp, Cannabis sativa
tgaaggaaattttaatattttttatggttatataaatgacatatcctatatatgttaagtttgttattttgaatatcatattttttttctattaaccatatttatgtaaactaagtttcttattaccatatttatgtaaatatcctttttatttattcattattttgtatagaactatttaaattttttacaaaaatactggattttgagtaaaagtttataattttactgtcacatagaattttttataaaaatactttttttttttataaaacaatcgtaaaacaacaaaatagaacaattaaaacaacagtagaacaactaaaaaataaccgtggaacaacagtaaaaacttaacactgtacacagtataaaacttacacaatattttttcaaaaatacaatatttttgaaaaaatttaccccacagtaaaaaaattaaaaattgaagtatatgatgtgaaaatccttaatttttttagttacaaacaaagaaccccttccatctattatagtcaaaagaaaaaaaatattataaagacaacaaataccattacttaaattcactaatatattattctttttcacataattatctataaaatgttttagcttaaaataaatattaaaaataaacaaattaaaaaacaaactattttttttatacttttagatttttttatttaaatttatgattttgacaattaatattatattttattaactagatttaaattttatggtttatacccaaaatttggctaccatcttagtggaggacacatgtcaagataaagggaatacggatcgataaaatcacttttaatggaataacttattaattacata

SEQ ID NO: 142387 - DNA, 797 bp, Cannabis sativa
  modified_base (420)..(421): a, c, t, g, unknown or other
caatcactcacataaaaactaaattaatatagttttaattatttaaataaataattataagaaaataacttttatatgaaaaaaaaataagtaaatgattttctttataattatttaaacttgacaaatattgaaaaatacaaaaatataattttgtatttactttaaaaaaaattataattaattgggcaagattaaatttctcaatcacccacataaaaacaaaataatattaactttgaaacaaatcaaatcaaaataagagtgattgaaaaatacaaaaatattttgtatttactttaaaaattataactaattaggcaagattaaatttatcaattaccaagataaatcaaaacaaaagaatagtgatatatatatatatatatataatgtaaaagtataccacccacaatgatnnttaaaccatgtgggacttttttaacatgactatcatattaccaaaagtataaaaaaatattaaaaaatatgaaaaaatgagaagaaaaaaaaatcaaagaaaactcacatagaatgccacatcatctctctttaaaccttcatttatatatatatatatatattgattatttaacaaatttttgtatttttcaatatttttcaagtttaaaataattattaataaaattatttaattaaattttcatataaaaataattttcttataattacttatttaaataattaaaacaatattaatttattattacatgaaattataactaattgagcaagattaaatttatcaatcacccacataaaaactaaattaatat

SEQ ID NO: 142388 - DNA, 737 bp, Cannabis sativa
catggagaagctgacctacagcttacttttggcttctagaaagttgaggccctacttccaggcacctctaataaatgtgtacaccaatcaactactgcggtagattttgaagaaacctgaagcatcaggttaactactcaaatgggccactgagcttggcaagtttgaaatcacataccaaccaagaacaaccataaagggtcaattccttacagacttcgtggcttagtgcaccaactcaactcttgagacccttaaagactcaagaggacaaaagcagagaagaaggcgaggagcaagaacagcaacaaaaccccagagaaataacatggaaactgtatgttgacggaagctgcactgataaattgtctggtgtaggcatttcccttacaacacttgggcgcaacaactgcacagagtaatcaaattaggttcaaagcctcgaataatgagaatcaatacgaagcctaatagatggcctcaagcttgcacatgaagtacggactaaccaccctgacatatttagcgattcctaattagttgtgaatcaagtcctgggtaaatacacaactcgaggtgatagaatggtagcctacttgagcaaaatgaaatacttgttaagtcagctcaaaggctacacgatcaagcagatccactaagagtagaatgtcatagtagatgcacttgctcgtctagcaagcagcaccattgctgacaaagcaaacttggtgcccata

SEQ ID NO: 142389 - DNA, 650 bp, Cannabis sativa
ataataaaataattaaataaaattctcttaggcctttatatgtcacccttaacgcgtgggctaagccctacacgtgtgatccatattttaaggtctaaaattgatttctcaattttacaacaaataaaatttattatttatttttctaataaataataattgattaattctcattaatatcttatttcaatagaattaaaataaatattattttcactaaaacaatatatttctcattttaatattattcaagaatcatattatatttaactaattaattaattttaatagataaaactaaataattaaatactaattacataattcataattgatgtaattaatcaaaataataatttccataaaatactattttgctcttaaaaattattttttatctaaattaattcttactgatatttctccatcaaattaaatcttcccctgtacagtgttgtatagaggtgacttggggccatggatctatatttcgaagctccaataaatacttaattattattaaacttattaatagaataatccagttgaataattttattattattccactataaatatggaagggaaatttgactaaatatgcttacataacattaaattttttcccctaaacttataattaccaatat

SEQ ID NO: 142390 - DNA, 653 bp, Cannabis sativa
aagttgattatgtttcctatttcttttttttttttttttctgcatattttttttttgttagtcctattttatagttttctgtttgtttgactatatgtcttgttgttatttttgttttattttgttcgttttaggaaaaggataaataccaagtgaagattgttcaatcaattgatttgtttgaagacataattgggaaaagggttgttgaagtgtgttattttattattttagttttaatgtttttttatgcttgtttttttatgttctttattattatttttttttttgttgttttagttttgttttactagtgttttcttttgtttttttataggattaagaatccaagtacacccgatcggaatactaccattccagagttttttcatgcttttttttttatgttcttaattttttttttgtgttgttttagtagtgttttcttatgtttttcataggattgaaaatccaagtacacccaattggaatactaccattccagagttataaactctggttattactctgttattgaagatattaaaaaaattcttactgaagcccaattaaatatgttttcaaaaactgtattcgaagctgtttttgattgcgtagtagctgtaaattttcttcagtgtttccttgtcttt

SEQ ID NO: 142391 - DNA, 599 bp, Cannabis sativa
aagagactggaaataccagttcagcacccaattagggcattcccaacactgaagttctgcccgcaataaatgctcgaacaaccattggagatgacaccgagatccaaaacctccgtgctgctcttggaatcatgcaaggtcataacaacaccctgcatcatgatcaggaggaactccatgctgcggtgaatctcgcatttgaagagcaaaggcgtctgttcactgaatggagggataaagagatggaaacgttgaggactcaacaagaagccattgacgattgaacaagacaggccaccgtgttgatacggagagcctgtcaggctaccaatcaacaacctgcaaccgtgatccatctagctgtgaatgcttctcaaaccctgaatggtcagccgtccaatccccgatcacaggttccgcctgtgagccaagcagtaggtgggcagaccatgtctagtaatttgtcaggagaagtcatacccaataattccgcccaagttaatggttccggtcaactgatcggccaaaccaaccagtcactaagacagcctggtgtatctatatttaatagattgagaactgttggtattatatttatc

SEQ ID NO: 142392 - DNA, 598 bp, Cannabis sativa
ctatgaggttataaattggtagtggtccccaagaaacaagagccaatttctattctcatcttcccccatcaagagagaaaattagaaaaccctaagtcttgcacaactactaaagaaatataattttgtcttccaatacaaaatatttggcaaacctaacatgaagggtatttgagagatgtaattaacatttatctaaggacatggctagaagtgtggttatttattcttcttcatgaaactcattttgggaagaaacacttaaggcaacaacataaatcctaaactatgcatcaagtaaagtataagttaaaaatctttataaactaaggttgtggttagattgatagtctaacataaagatatattctatttgtggatgttcgattaagatgagatcttataagcctcataaaagaaatatagactccaaattagtaagaaactatactagactgtatactctagtaattaaaaagctataaattttgtgatcccacactatggttcaattttaagacgagaaaccttaataattttgaggatgttgagtttggggagaaataagattattatagatattgttcttgagaaggaa

SEQ ID NO: 142393 - DNA, 545 bp, Cannabis sativa
ttcccaggtgtcaaaacgtttcaaaaaaaaaaaaaagaaaaggaaaaagataataataataatgaataataggtaaatataataccacccccctcacccacgtgtaaacgcccataatgaggaacataagattaaaatgggaaaaatccttacaaacctttaaacaataaacgaaacacataaataaaaagattgttccataaattcgtccttgaacaaaaatgataataaaaaaaataaaataaaacaacacaataatgataaaaaattgtccatagaacttgtcatacacgcataagaagggaacagtaaggaaattattgaaatttaagaggggaaaacccccgccatctctttgggcgccgtcgtcatcctcgcccccgctgccttcgtcggactccgaagaagaatccaccagatcttcatccttctaaaactcgaagtatttcgcaaagaattcgtccagattccaggcatcggatttgccctccttaaactcagagtacagtttaaaggacgattgataactcccgctaaggaacgcc

SEQ ID NO: 142394 - DNA, 722 bp, Cannabis sativa
  modified_base (33)..(34): a, c, t, g, unknown or other
ttatttacggcataaagcccaacaaactcccanntgcactaacataaaacaatcagtacatttcaattaatcttaaattcaatctgtactttttaaatgtagttgcagtcaatacattggtgaatggataagctaagttgtcttcagtgtccactatctccactagtaaatcctctcttgccacatattctctgatgatgtggtatttcctctctatgtgcttgcttctcttgtggcttcaaggctctttactattgagtatagcaccagtgttgtcagaaagtaaaactagtggtttttccattccaggaacaacaccaaaacctgagaaaaactttcttatccaaacaagttccttagcaacctcggtgacagctatgtactcgacctccatggtagagtctgatattgcgatttgcttagcacttctccaaacaactgctccactcccaatagtaaaaatcatcctagatgtagactttctatcatcaagacaagcttggaaatctgagtcggtatagcctacgggatttaaagcaccacccttgtagaccaacacataagtcctggtatttttcaaatattttagaataagcttaatttcagtccaatattcctgtcgtgggtttgcctgatacctgctcacaattcctactgcatagcatatgtcaagtctagtgcataacattgcatacattagactcccaactgctgaagcataa

SEQ ID NO: 142395 - DNA, 508 bp, Cannabis sativa
aatcttggcgacgcaattagatacgcagcattcatatgtgagctgacacttgacttccacaacttcgttttcgaaaagacttatattgtggaaacaaacggcatggaagaagaatgcgtcaagaacatacgatataagttaagtgacgacagtgtggaggacataactgaatctgtgaacgtaacaaatgaacgagatttggaagaatcagaaatgccagactattttgaagtgacagcagaaatgttggaacttcaactaaaaagcccacctaaaatagaagcagagaaaatagtagaagtaatagagattccttcagatgaaaaatccaaagatgaggaactgcgagaagggcccaatgagccaaattaccccccaataccaaagagcaaggacttagatctacccacagcaatcaacatcgatgaaccagaagatgacatacctgattataactttgaagtagaaattgatgagtcagactctgaatccgaggacatgccagcac

SEQ ID NO: 142396 - DNA, 960 bp, Cannabis sativa
gaccggttgcaagaggcttctcagaaccggtcgaccggttctgagctgggaacaaaaatttgatccccttcaattcaaaccaagcccaaactttccgaaactttccagaacatctgcctataccttaataaactcaaatcaagcaataaaacaccataatcaactccaaatttgaaaacaccattggagactaaagatgagtatccaaacctctaatcttgaacaaaccagacaatacttaccattatagcttagaacaatctttagaaacctagactaactttaaaattcacaattaaacaaaccttatcaccacagcaccaaaaacccaactcttgcatcaaaactaatataaaaccaaagaaaacaaaggaagataaagctagggcaatataccttggattgaagcttcacaattcaactaaaatcacactgaattgttctgaaaaatttaggttctcagctggttccctaggtgttcaaaagagagggaaggagacttagaaatttctaggttttcctctaatttcctttttcttgttttcactttactcttatatcattttaaattaaaaacatattatcttactaaaagatataaccagccccccatgtccactaaagtccaaataaataaccaaggaaaatacctatttgcccctaactaaattaaaatagctactaacttccaagggtgaactagtcattttccaaaccccaaaaattccaacaccgctaatacctaacaatgatactccgataatattctatatcatataaaatacgactctctaaaggcccgacgtcgctttccacaacttccgaacacaaacacagaagttgaataattcacataaaataggataataacatatatgatattaaatatatttccaaaatatgcatttcataaatattaatttaatctcatacataaatcctaatcatttaataatccaa

SEQ ID NO: 142397 - DNA, 1680 bp, Cannabis sativa
atggttatatttttttaagttattggattactattaaatggttgtgattaatttaaaaattaaataataaataacttgtaacctgaaagtaaccttataatttatatccttataaaattttaattaagagtaattatattttaaaattaaattaattataattattaattcattttttgcaatttattactatataaggatcttttagcaatttatttttttgcatttaaattatttaaaattttatagtaaaactttttataatttaaaattatacacatgtaatttcataatttaaattttattatacatgtaatcttaattttaaattattacacgtaattatttaattttttattaaaatatttaaaaagttaaaagtgaaataagttaaatgattttttggaaaaaagttggttacactcgttgaagaatttcatatttaaagtagctcgcaacttcttcccttttctcaaaatctacaaaagcgcctgtagtgtgcatcacacgatgtgtcgtcattaagcacataacaactctattttggagtttttttgtaacttattgcttgttctaattggtcgtatgatctttttatttgtgttcataaacatctaataaaatattttgtgatagccatggagttggtggataattttcaaatattcaaatgagtatttgaactctattaaaagtggtcactttttttagagtgttctcatagtgttgtagagagcatagtttgttgttgggcaaagtcctttgagacttgtatgtgccttgagttgtccggcaaaatcctttgagaattgaagcctttacgcatatattatacttgaaaaaaatcaaccacagcttcacaaaagttttaccctagaatatgtcagtaagtagtatttaaaaaaataactaacaaacttttctcgcaaggtgcaaattatgaatcaaatcaagtacactatattgagaaaatttatttataataagattatgtatttcaatatatatttgagttaatcttaaagttagcataaagcatgaagaaaataatatgagagtaatagttcaatctacattgtgcttagaagagattttgtctagacatatgatgtgagaaagaaaaatgcttaataatctttaaataaattcaaagtaatatcatttcaaacttttgtaaattatggtcaagtaaaaacttgacaaatctttcaaattgtaaaagatttagtaaggataacatctagctagggagattagactaaataatagattaactattaatgataaattagacaataaatgtatgtattaagtttaaaggagaaaaaaatgagatgttagaaaattaaaattatatcgatatatagatatatcaatagatagatacacaaattttgttatcgattgactagcttgaggcctcatatttaattcatttaattgtaacaaaataattaaataccatttaaaaataattaattatttaaaattaattataagatgagaattaatttgtgtaaaaagaagtttaatttttgtaaaaaaataaaattttattgtaaatattataattaagtggattaattgttaaaataatttgagtagtgatttaaatataaataacaaaaaattatttatacatattaattgctaaaagaggtcttgttaaatatttaatta

SEQ ID NO: 142398 - DNA, 699 bp, Cannabis sativa
ccctaatcaattgtaccaagataataactttataaaaccagaagttattcaatagtaattttgactatgtatgtaaccttatttatagacaacaaaaaggttcataggcacaattgagtgaccctattctttgttattacaataatagagatgttatagtgattaactctaattagaaagtaatcatcgaggccatgaaccttacttgctagacaaggaagttgtagtttgcacttttatcttatttggcagacaagtaagttttagtttgcacttattatataccactacatgtgagtgctatgacatgtaatggctacaactatacaataagttggcacacataaacgtgttaaagtagtgagtatacagattctattgtacgagaaatcttttgttgatcttgagtcgccatctaagaacgaatatcctcgcttaagagaatatttttttgtgtagaaagtctcaaattcaagatcttttcgcagcacaaattttctaaaaaatgaagtcatacgcatgtagattaattcaaagccagaccgactactccaagagcactcctccataaacgagtttctattacaaataacacaaaaaatggaggaaattagactatataccctttttatattgtcctcttttatttttacccttttttttttaaagtattacttttacctcttttttaaatattgt

SEQ ID NO: 142399 - DNA, 577 bp, Cannabis sativa
tatcattaatcaatactaatttaatatttattatagggtgcttcacaattaatacactccattaacataggtgtattaatacaatccttaacttttttagtatctatcagaattttttagtctaaatttttttatggttgtgtacgttatagttatttaatatatattgcaaaattatgagaaatttaaaataatttacaatatagaaatcaatgtttaaaccgtctatttcacacgtatatagaataaaaaagtcacgtgtagaacagagtctttaaacactgttttcgatgtgttaaatttttttgaatttctcaaaattttatcagatgtcttaaataattataatgtatacgatcataaaaaaaaaattagactaagtagttttttagataccaaaataaataaggatgtatcgatacacttatttgaaggggtgcattgtagaattttactttattatatttgtgttttttttcgtttaaagagaaaaggtcatttttcctattcagggaagttttgtgtatatttaatttttttttttttgtatatatattattaaatttatttatttatt

SEQ ID NO: 142400 - DNA, 1388 bp, Cannabis sativa
  modified_base (45)..(59): a, c, t, g, unknown or other
aacttgtgatccctaagtcactgcaataccattcgaagatgatgnnnnnnnnnnnnnnntgactgagagtacacaaggatgtaatcgataaacactatgatgcagttttcaaagaaatccttgaatactctattcatgagatccataaaggctgcaagagcattagtcaatccgaatgacattaccaaaaactcgcagtgcccatatctggtttggaacgcagtctttggtgtatcttcttccgaattctgagttgatggtaacctgatcgcaggtcaatcttttaagataccatctttccctgaagttgattgaacaaatcgtcaattctgggtaatggatacttgttcttaatcgtcaacttgtttagttcccgatagtcaataaacattcttagggaaccatctttctttttcacaaacagagtcagagatcccaaggcgatacactgggtcgggtaaacccaatatcaagcatcccctgaacctgtaacttaagctccttgagttctcctggagccatcctatacggagctttagaaacaggttcggctctaggtgccaaataaatcacaaagtcaatttctcgttgtggtggtaatcccagcaactcctcgagaaaaatgtcgagaaaatctttaaatactcagactacctcaagcccaaatgtttcgggtctgctggagtcaatcacaacagctaaaaatcctacacatccactgtgaagtagatcgctagcccttaatactgaaataattgggatccgagacccctgaaccgatccaacataaataaatagatcttcaccttctggctgaaaagtcactattttttgcttacaatctatactggccaaatacttggacagaaaatccatcccaagtatgatgtcaaactctgataattccaattctataaggtcagcattcaactccctatcctcgatcctaactggcatagacctaatgcacctattggagataacaaactcctcgataggcattagggttccaaaccctctttcaagaaaatcacaaggcctacccaaaatatcaattacccgtgtagccacatatgagcgtgtagctctcgaatcaaataacgcagtatacaaggagttgttgataagaagatgacctgtcacaacagaaggactggctgcagcattagcttgggtgatgtcaaagaccccagcaggtacgggttttgcctctgacttctgctcttctttctttacatgagggcaatctttcttgaaacgccccaccatgccgcactaaaatcatgtcttccggttgcactctcctggatgatgtttcttacaacgtgggcactcaaggtaagagtaaccctagcgtccacctcaccttggttcccacggaaccgctt

SEQ ID NO: 142401 - DNA, 583 bp, Cannabis sativa
tatattaattacaatacaataattaatttcatgacatgaaaatatcaattaaaactcaatttattttatcatttaaaataaataaaagtgtatttttaaccactaatcacatgctaaggactttcataattgatacgtgtcactttctccggtgcctcgctaatcatatttagtgacatatggtttctcgctaatatactaagcgccagtttgtacattaattcctagcctaagactttacagtcagcgggttacaaatacactctgatacttacgtaattaatgagttattctataaaaagctattgcatcgattcacattccctttatcttgacacgtctcctccagccgaatttcaggcataccaattgccccttaaaaagttcttttttagtgaaaagagcttttttgattcatgcgattgtacagtttcgagagtcattatgaatcgtctcttcatattctgcacttctcccaatcgttggatttttccatacatagctttcttgtcactggactttgtgtataaaagaaaggctcaagcttgtcatttttcataaacctctggctctttagtgagat

SEQ ID NO: 142402 - DNA, 966 bp, Cannabis sativa
tgacttggggactatggacctatattttgaagctctaataaatacttaattattatcgatctcatcaataaaataattcaatttattaattctattattactccactatacatatgaaattacaatctttgataatatagaattatatttacagaattcttacttatagtccattgatataatcaatataaataattttccctccaattattacttcgtaattagagttggtcaaaattactattttacccttctcaccatctctttactcgttaagtaccattaattcaatgtgaatagttaatctatgacttattatagattttgatctaactattaacactcctaaaattaacactataagggaattaatattcaatccgttaggaaagcttggattccactattgtataacatgttcccaaccactgatgttattaagctctcaaaacagaagttgtaagaattatcttctctgagaaattttaacaagtgaattaaagaactcaatgaacacaaaaagaagttcatgtatactcagattcaatctgatctactaatgatcactgttgtgatatgaataactctttcatggtaaacgacacgttaatgaaagatgtttattatatatcggcccagtcatgaaaaattaaattatacacagtactgttactacacgtctatccacatatatgatccgcacatatatgatccgaattaaaatgatccgaattaaaattacacgaattaaaattacacacactaaaattacacacactagaagtatagtgtatagtaaaccatagtttgcagttctatattaaagattcccaatactttaatacactaccgacttgttttattcatattgtataatcttaaatttcttgtacgtccttacaagattatacattctccatatgaataaaaatttttagatatctaataattatactattataatta

SEQ ID NO: 142403 - DNA, 829 bp, Cannabis sativa
gaagatgcagaagcctgtagtagaccgcctagtgatggggcaagaagcccaatcagagtctgaaaaacctctaagatgaagagaggaatgtggagagtataatagaccttggcccgcatggcctttgatgtatctaagtagatggtgcagggcttgcaaatgtgtgctgcgaggatttctcatgaactgactaaggcaattgatagcgtaagttatgtctggccttgatagagtgaggtagagcagtttgccaactacttgtctgtagtaagatggatttgttagaggttctccctgttgatcgtctaatttggtccgtgggtccatgggagcttttgcaggcttgctgcctgcgtattcggtttcttcaagaagctcaatggcatacttgcattgagacagaaacaagccgtcttttcctttggcaatttcgaagccaaggaagtaacgtaagggtccaagagctttgagtttgaatctagagtgtagagattgttgaagttgatgcagggcagcaagattgggtccagtgataatgatatcatccacgtagacaagcaatgatatgaaatcatcctcgttgcctctagtgaataaggtgtaatctgcctgagattgattgaatccttcttgaatgagagcttcgaataatttcttgtaccactgcctcaacgattgctttaaaccatagatcgacttgtgaagtttgcagactagattagattctgcagatagagaatcagggagagttagaccaggaggtaattgcatgtatacctcttcattaagatcaccatttaaaaatgcgttattaatatcaatttgtagt

SEQ ID NO: 142404 - DNA, 864 bp, Cannabis sativa
aaatattttagagaaaataaaatgtcgggattaagcggggttatggaatttgacaattttacccctagctttagaaataccctaattttaagtataagacgcattttagtaaattactacgggaaatgcttggtggctgcattaggaggtgacacatgacctattaattttcagcaaagattaattgaatatttcttaagtctcatttttagaaaataaagaaattgaaagaaaaaccaaatagaactcacactctctctttctctctttcggctggggcaaaaaccagagggatttaccctcaaagttttatgtttttctagattgaagctaaggaattgagcattcttgaagcaaaggtaaaccctagaccattggtttcatgttttcaagctttttctttaggttgagtttgtgaaattatgaagtaggggctgtttgtttaagggtgattctaatgtgtattctgatgtttgattgtgatgtttattgctggcttgggctaggttaggtgattatttcatagtttgagttaaattgaagtttatgagctcaagttggagctctaatggtgattttgttttatgagctgtttgttgaagtcttttggttggtttgggtttatttgagtatatacaggtatactggagagttttgtaaagtttggtttgattttgaggtcatgggggaatttttcgggttcccagcacagaaccggaattccggttctaggggacctgtagcaaccggtcgaccagatggtgtcctgaaaccggacttctggttgggaaccggtttgccggttggggcagtttttggaaccctagtttttcctatttttgagatatttagggtattgccatg

SEQ ID NO: 142405 - DNA, 719 bp, Cannabis sativa
aaggtaccattacggtagtacctagctttaaaaatcttgctgacaagtgagtccggacaactaaacaatctccatccttgtttacaaagcaaactcaagttaaattcatgtaagttgcgaaatcccataccacctttagacttatgtaccgtcaatctatcccactttttccaatgaattcctttgttgttcttcaacgaactccaccaaaacttacacatcaattgctccatctcattgcaagtttccacaggtagcaagaatacattcattgcataactaggaagagattgagccacagtttttatttacaactccttccctgctctagaaagcaatcttccttcccaaccttgaatccctttacgcattttatccttcaagaacccaagtaaggtcgttttattacgacccacaatatttggcaaacccaaatatgtgctatcatcacctgcctcattcactcccaacatagaacacagatgttgtctcacctcattgataatattagcgctgaaaaatatagaggacttctgcatattgacttgttgtcctgaggccttctgaaagatatttaacatttctatcatgttaatatcaatatcctctgaggctttacaaaacacataacagtcatcagcaaaaaacatgtgagataacacaggagcccctcgagcaaccttgcacccccgaatcttccccaaccgttcatagtctct

SEQ ID NO: 142406 - DNA, 542 bp, Cannabis sativa
ccattccttggaccattcctatttctatttctgttcctattcctattcccactcccatttccattcccattcctcgacccattccaatttctattctcactccaattctccgacccattcccattccccagcccattcccatttccaatccccattcccattcctcagaccattcccattccccaaaccccaaaatcccaaacgacaatggcacgtttatggcatgtttactaataagtaatgggaatcaatagtaaggtaagtattcccttaaatttgttaacttacatcattaaaattagaaaatggataacttgattaaataagggtgaaaagaaagggagaactttccccactaattttgtaaggaatgccattaagggtaatgaattttaattatttttatattatattttaatatgtaatatatattaacaattttagcttttaaaatatatcttacaaaataactatcatataatatagtttaactcaaaagggcaatttagcaatttaagcattctgattacgtttcctaataa

SEQ ID NO: 142407 - DNA, 508 bp, Cannabis sativa
tggagaaggagaatatgatattgatcattttgtgaattctgtcacttatagtgaagcacttaattgtccacattcttcaaaatggataaaacttattgatgatgagattaagttcatggagaaaaataatgtatggaagttagttttattacctgatgattttaaacaaataggttgcaaatggatcttaaagaactaaaaggataaaatgggacaaattgaaaggtataaatcacgtttactgacaaaaggctttactcaaaaaaagtgtgttgattacactgaaactttctcacttgttttcactaaagattcattcagaattatcatggatttagttacgcactttgattcagagttgcatcaaatggttgttaaaactgttcatctgaatggagaattaagtaagcaagtctatatgtctccacctgaaggcttcgaggaaaatagaaatggcaatttggtttgcaaattgaaatgatcgatttatggtctcaaacaggcatct

SEQ ID NO: 142408 - DNA, 665 bp, Cannabis sativa
tattgtgtatattttttttaatattataatttaaatttaaaggaaatttctttttataggactgaccattggttggtttagtcgaatttagtttttggtctgaattggtgtaatttgaaaatttactgaccaattcaaaacttattttaaaattgatcgttttgaattttggtttggtcggtttgaaccgatctaatttattctataagcacatcattttacaactatataaattaattgttcaaaaattataatcttattcttttaactttaatattaatataataataatatattattatatattatgagaaactacaatacataaaggaaaaaaaaattaataaattaatatacatgtttaacagttggtttattgtccaaaaaaaaccgaccgttcaatggcggttttaactgttagcaccttttcttgttttcagttctgccagtttcgataccaacggtgttcggtaggtcggtttgaacgatttttttagttttcaaaatttcatgctcaatcctatctttactcaatttacatacttttttacatattttgaaaagtaataataacaatcatatagcgtaacaataaaaaaattagggtgattctaaaatgcaccccttaaaagagatgtaccgatgcaccctctacttatttcggc

SEQ ID NO: 142409 - DNA, 743 bp, Cannabis sativa
agatcgaacctaaccatatcagggcaccaaatgcaacatgaccttgcccgaggaattgaagccaatacaaagaagattcaagccctcctggatatgaagtcgccaactaaaaccaaggaagtgcaaagtttgactggtcggattgccccactcagcagatttgtttcaaaattaacagataagtgtgccccattcttcaatatcctatgaggaaacaagcaattcgagtggacggaggcatgtgaaaaagctttccaagagctaaaagcacattttgcaaatcctcccgtactctcaaaacctctggacggagaagaacttggagtatacttagctgtcacagtgcatgctgtgagtgccgttctaatcagagaaaagaacagcatacatcacccagtctagtaatcagtaaaagactcattgaggccgaaggctggtacccattgatagagaaactcgcttactgcctgattctagcaacaagagagttaaggccttattttcaagctcatcctgttcgggtgtacactgactaaccattacgccaaatattggaaaagctaaatgcctctagaaggctactcaagttggcggtggagttgggccaatacgaaattaatttccaacctcgaaaagcaatcaaagatcaagccttagcagactttgtggtagaatgcacaaaaaaagaagaaagcgtaccaaaaagcaaccccgagctggtacaaaacacctcaaccaagtaa

SEQ ID NO: 142410 - DNA, 685 bp, Cannabis sativa
tttgctaatttttttgtacaaccctaatatttatggtcggtcttatgaatattaatataacccataaattaaattaccaaaatatcacttttttactactttagccgtacggaacgaaacaaacaacctcatcatgcatgcaattttcgatcgaccaacccagcaacctaacacaaccgaaacgaaatccaatcgaaaagaaaaccaccattaattacagcaacttcagttgagaagatgattgaaatcaatcaaaacagaggctatttcgaattcatgaaaaaaaaattacagaaaaattactataaaacttaaactcaaatatcatttaattcgcataaaactaatgtcctcacttcaatttttagatccatgaaatgaagatctcaaaaagttgaactggagctcccaaataatccaactcaagtataatccaaaaaaatttacatcaacactatagttcaatgtttatctcgatgtatttttgttatttttcatatttttagtagtgaatttaatattaaatcacaaataaaatagtaaatttacatgtaaatagagttacgcacgtagaaatactgttatggttttttatgtttcataacagttgcataaatattttgttaactctctgaaacttgatatatcaattattacaaagtgataacgatacaatagattttat

SEQ ID NO: 142411 - DNA, 867 bp, Cannabis sativa
tgtaactacagaaaaactgttttcagtaccagtttcatcatttcgcatttaatttatcacttaattaaataattaagctgaaaatattaaaatacagaatttcaaatttaattataaataaaataaaattattatttgtaaaaaaatatatttattaattaataaacttattatcattatatttgtgattaattaaaatgaataatgatttacatatattattttactaaataatgttacgtgcaaggcacaaatatttagttttatattaagttatatatttttattttcaagtgttacaataaataatattatatataatttaattaagtaagtaatatttattttatgaagaaatatgtttaatataaaaggttatgaaatataaaaaagatataataataatttgataaagaaaattaaattaaaatattttttacgaaaaataaaattaaacataaaatgttagtaaaatatattaaaagtaatgaattgattaattctttattttgtgtagtcattaactataaagatgaaaaatacataagttaaaatcaaatgtcacaacacaatttacatggccaagtatattaaggctactatatatatgataaaataataacactattttgtacttattattatttgtgtaacaaagcaaatccactttttaatggtagaaaatctcaaacttttgactaaaattattttactaatatcagcttgaagaatttttctttttattaaatttgaaaaaaaaatattattgaattaatcaaaaattaaataatgaatctaatcataaatatttaaattaattaaaaaatatttaaaacaaagaaaaatattttcaattgtaatcacaat

SEQ ID NO: 142412 - DNA, 970 bp, Cannabis sativa
  modified_base (912)..(922): a, c, t, g, unknown or other
cagacccagacttggacccacaccggggattcgaactcaaacctggacccgaacgcagacccagaccaggatccgaacctaaacccaaacctggacctagactcggaccaggacttcgaccaaaacccagacccggaccataacccgaacccagacactgaatcgaaatcaaaattgggactgggacccaaacccgaacatggaccaaaatcgggtcctaggacccggacctggattggggacttagacatgggcctcagaacccagacccagatcggaactcaaaactcgagacggacccaaacctggacctagactcaaacccaaatctatacccagaccaagattggatcccgaacccgaactcggaccaagactcgaaccccgactaggtcctggactcagatcgagacctaggactcggacttgggtgggggacttggacccgagacacgggcatgagaactaggattgagacccacaacccaccccagacctagaccctgacctaggacccgaaacgagacctgggacctgaagtggaactagatagggacccgagaacgtgacccaaatctggacccggggcttggacctaacccgtagtcagtgtttggatctgggacccatacccaaactcaaacccagatccggactcggaccaagaccctgacctagacctagacccgtaccccagacctgggtccgagtccaagtctcggtttgagtccaggaaccggatctgactaggacccagacccagatctggaccgggacgcagacccgaatcaaaactcagataacaacttgggacacagacccaaactcagacacggacttggacccagtcccgaacccaagacccggaaagcccatggccggccacacttaatggcttttatcatttatttnnnnnnnnnnntaatgccaaataattctaacctagacctagatggttacctataaatag

SEQ ID NO: 142413 - DNA, 606 bp, Cannabis sativa
  modified_base (38)..(65): a, c, t, g, unknown or other
attaaatgttatttgtgatctatattaataagtaaatnnnnnnnnnnnnnnnnnnnnnnnnnnnngggcataaaacccaacaattcaacactcaccactacttgcatggaagaaataaggggaggtgagcaacctgacaaaggtacaaattattcaagtcaacaacacccaagggtatcttccacgtaaaacaaagggtacaaggtcgaccaacgaccaagtaccatcttggatacactcactaagacatacagtaagtcctaagttgcacaattaactataatggactcattacctagccttatacagagtttgtaagggaaaccatgcataaggccacaattgtatatgcctccaaggtcgtcgcgagaccctagccgaggtcaaaagagggagaaaaactggctgcctgcttagaaccttgaccttggccgaccaaggttctaggtcctagtggccggccataccccaagacctagcctaaaggctggaaaagaatcctagtcccaggtagggatgtacatcggtcggtttgggcggtttatcctatatattttctaacccaatctaaagttcaggttgctaaaatttaagtgcaacccgccc

SEQ ID NO: 142414 - DNA, 1345 bp, Cannabis sativa
tatctatggcatttatgtttaggccatattggccaagacagaataatccggttaacaatggatggtcctttgagagaactcaaagttaaaactcttcttgtatgtgaatcttgtctagaaggcaagatagctaaaagacctttttctgcaaaaggcaatagagccaaacaacaacttgagattatttaaactgatgtgtgggaatctattaatattcaagctcgaagtggttatgaatactttgtcacttttattgatgattattctagatacggttatacttacctaaaggtcaagaagtctgaaacttttggaaagttcaaagactttaaggctatgcctgaaaagcaatcaagtaaatcattaaagacactttgatcagattgtggtcgtgagtatttgtattccaaattcaaagactatttgctagaagaagggatcttgacccaacttacaacacttggaacacctcagcagaacggtgttgcagagagaagaaaccagaccttgttaggcatggtcagattgatgatgtgttactcaacactgccactaaacttctggggatacacacttctagcggctacctacattttgaatgcagtacactcaaagagcataagcaatactccaatggaattatggaacgggacaaagcccagtttgaaatattttggtatttggagtggtcttgctcatgttcttaaacccaagtctaggaaacttgctcctaagactaaagcgtgtatgtttgtaggatattcatatgagacttaaggtgcctatttctacaatcgtcaagacaataaagtatttgtatctacaaatgctaattttcttgaacatgactatatgaaaagtcacaagccacagggtcaaatggttatcgagaaaataaaaaattatcatatttttgaaccaacaatttcaacaccattagttgaaggaccgacagtggttatcacaattcttgaaaggaaaccgcattacatcgtcgtagtgggaggattgtgagacaacctatctgctatatgaacatgaagcacatgttcttgtctctttttcagacaaggacgatccattgacttataaagaagcaatggaagacgctgactcaaacaagtggaacaatgtcatggattccatgcgcaccaacaaagtctgggtatatgaaactccacctgaggatattacacacatagggtgtaagtggattttcaagcagaagaaaaatgtagaagggaaggtagagacctttaaagctaggcttgtagtgaaaggctacacaaagcgagaaggcatcgactatgacaatgttggaatttttattttaccaggatcttag

SEQ ID NO: 142415 - DNA, 1940 bp, Cannabis sativa
tttgatcaactaaatgggaagacggtcttttctaagatcgatcttcgctcaggttaccatcaactgagaattcaagaggaagatatcccgaaatctacattctgtacttggtatggacattatgaatttctagtgaaatcttttggactcaccaatgccccagcgacattcatggaccttatgaatcgggtattcaaagattacctggatagatgtgtgatcgtgttcatcgatgacatttttgtcaattctaaatcagaagaggaacatgagttacatctcaaatctgtactgcacagatcacaagttgtatgctaagttcaaaaagtgtgaattctggttatctcacatctctttcttaggtaacatagtggataaagatgggatcatggttgatttggccaagatcgaagctgttcaggattggccaacaccaaaatcgtctacagaagttagaagcttttttggtttagttctttattatcgtcgatttgttgagggtttttcaaagattgttgtaaccttaacagagctgacctgaaagaatttgaagtttgtctgggctgatcggtgtgagaaaagttttttagtgttaaagcatcgctttattattgctccagtgttaactcttccttcaaataaggaaaagtttgttatttattttgacgcctcgagacatggtctgggctatgttcttatgcaagttggaaaggtaatagcctatgcttctcggcagttaaaggagtacgagcagaggtaccctactcacaacctagaacttgcagtagtagtttttacactaaagatttggaggcattactaatatggcgagaaatgtgagatatacactgatcataagagtctgaaatacttcttaacccagaaagacctaaacaagaggcagagatgttggcttgaatttgtgaaggattacgactatgagatcctttatcatcttgggaaggccaacattgtagctgatgccctgagtagaaaaggacaaagtcaaataaatatagtgaagcagatctccaagcagttagaagatgaaatgacacgagctaatattacctagcaatctactcttttggagcaaatcaaggaaacacaattgcaagatccacagttagggaaatctcaagataagattttagctgggaagactacagattttacaatggattacatggaaatgctacaatttatgaatcgtgtttgtttgcctatggatgacgatattaaaagagagatcttggatgagtctcatacgactccttacttagttcatccaggatcaacgaagatgtatcaagatcttaaggccatgttctagtggccaggtttgaaaaatgatattgttgaatatgttgcaaggtgtctaacttgtcaacaagtgaaagatgaaatttccatggactttgtagttggatttcctaggaccacgggacaatatgactctgtatgggtcatagttgataggtttacaatgttagcgcactttttacctgttcagacgaacttctccattgatcagtatgctgaactgtacgttagagaaatagtccgtctccatggtgtcccaaagtccattgtttttgatagggatccgaagttcacatcaagattttgggagagtctatatcgagccatgggaactcaatttaaatttagcacaacttttcatccttagacggatggacggtctgagaggaccattcagattttagaggacatgctatgggcatgtgtattagatttgagggatcatcggtaaagtaccttcccttcatcgagttctcgtacaaccacatctactaggcaataattgggaaggctccttatgaacttttatatggaagaaaatgcagatcaccaattcattgggatgaagtgggtgaaagaaagttcttaggtcccgaagctgttcagagaacaagtga

SEQ ID NO: 142416 - DNA, 652 bp, Cannabis sativa
aaaatattaaaattctctttatattttttttttaaaaaaaaataaaacaaatgaaactacagtgatcgtcggagttatcactagtgccgaaaaagttactgtaatttattgtcgatacctaaaaagtcgctggagtagatgtcggtgtcgaaaaagtcgtcggagttgctaccgacactggaaaagttgttgaaattggcattgtcgccggaaaaattaccaaaaaattgatttcttcatcaagaaaaattagtgatttttccagcgacaatgtcaattctgacgactttttcagtgccggcagaaattccaataattttttccgacaccgactgtaaaaccctaaggtttaataaccagattagcaaccttaacaaggttaaattatgtattaattgtaagaccactttggtggtgtgtcaggggcattttcgtaattttgacccgagaggggtaaaattataattttatggtatgttgtgcttatagattatattattatatagtatgtttattctgtctttctgtaggtgttttttgacaagtcggcgtggtatagtcacaaccaggtattttgagccgaaccgagttcggggcctaaaatatattttcgagatttatttatggcatttatgtgataaatgagaaaatg

SEQ ID NO: 142417 - DNA, 618 bp, Cannabis sativa
  modified_base (503)..(516): a, c, t, g, unknown or other
  modified_base (575)..(583): a, c, t, g, unknown or other
ttttcggtgttcggacggtcggtgtactcggtttggtcggtttcttagattttttgctcacccctactgttttatttaaaatctaaattttgataataagtaaatttttaaaatttttgttttaatttttaagatattgaattattgtggattacttatgtaactttattaacatgattcttgcacaattacatcaaagatgttactcggaatagaggaagctaaataactacgatcaacatataaccttgagacttgagctaagccatgagcgacacgattagcagattgtttaacaaagcgtaaactataattgttcaaaccaaaagaaaaaaagattcttgtattccttgatgcagttgccaaacagagagtacgtggtcatcgagctttgaaaagcttgaacagtgataaggctatctatttccatagtgacatttgagacatttgtcatctttatccaactaagtgttggaagttattttatcaggatcttagatctnnnnnnnnnnnnnntgatttaacaacctaaatatgtagctaaaaaaaaaaacaacctaaatatgaacttctannnnnnnnnaaaattaaacacataaaagtaagagaaatcttaca

SEQ ID NO: 142418 - DNA, 676 bp, Cannabis sativa
tgaattctacgagaggaataaaattatcaaaagcttctcgtcagtaaccaggcctcaggcaaatggacaagtggaagtagttaacaaaaccctaaagatactattaagaagaagttagatgctaccaaaggcagatgggttgatgagctacctcaggtactctgggcccacagaactaccgagaaaatagcaacaggacacactcctttctcgctagcatttggctcggaagtaatgctacctgttgaagtgaacatatcgacttacagaagagagttttataatcaagaagaaaaccatgaacttttgaaattgtccttggattctacttgaggaaaaataaaccgaatcgcaaatcaccaacgcagcataccaacaccgagttacaagatacttcaacaaaaatattaagaaaagactattcaatgttggagacttggtgctaagacgagtatttgcaaatacgagagatgcatctgtaggagtgttcaacccgaattgggagggcccatatgtcatcaaagcagtagttggagttggagtttataaattgactcgactcaacaactcgcttataaagaactactggaacgtagaacttttgcgaccctactaccaataaataaatgatgtaactcgcattactgatgtaaaatttaaacttcagttatgaata

SEQ ID NO: 142419 - DNA, 960 bp, Cannabis sativa
aaataatttccaacagtttctactttttaaccctaactacccctagatcaatctcagtcgtcagatcaaataactctctcatcttgacagctgctgtacatcacggattacaatccgtgaaagtacaataacgtgacaaaatcgtatccctatatttatattagattttttgttaatataataaataagataattaataattaaaatttataactttttgatctgtagtatcccgataagcctaatggtaagtaattaaaatttataattatattatgggttaattagataataagtggaattatgatcctactaatctagttcaacataaatttaaattttgctataagtggataaataagtgtaatttataaattacgaagatttatatggtatatgtgaatgtaataagagttactggtgtaataaaatattttcagatttggcgaccttggagactcgatcgggggccaaaaatatcataacaggtttaattgatagaattgatgggaatattataataaggtgataatataggtatttggataattaggagtatgtgggatttaacttagcgcgctaaaaatataaatttcttagtgtctaagaaatgataagataattatgaataataaagtttttattaatattattatattattaatattaatattatattttttttatataaacttatcagataagtttattatatatacatatattatgaaagaggtttcaatggttataaccatcatggttacatttttttaagctattgaattattattaaatggttgtaattaatttgaaaattaaataaaaataaataataaataacttgtaccttgaaaataacgtaataatttatttccttataaaactttaattaagattaataatattttaaaattaaattaattttaattattaattaatttttacaatttattactatat

SEQ ID NO: 142420 - DNA, 590 bp, Cannabis sativa
  modified_base (381)..(393): a, c, t, g, unknown or other
aaaaaactgtgataaaaatgtgtttggtaaacagtcaaaaaataactttttgaagaatttttggataagctacaactaaaagctaaagttgttccaacccaacttttaaaaaatgttgttttgattaaaagactataataatttttttttttgtactaaaatcatatttacttatttattacatattaaaaaattaaaataaagtaattataataaaataaaaaattattaaatatcttttttaaaaaataaaataacataatttatattttattttaatattgacaaacaacatcaacttagaatttttcttatatacttgagtttctaatttttttacatttgataaaacgtaataaaaaatactataaattatttttnnnnnnnnnnnnnaaatttatatttgaaaaaaattaaaaatatataaaaattaaaatattatataaaataagttcttacacatatttgtgattataataaacattattactatcattataatagatcttaacaactcgcagtattttaaaatttaggctaattagcaatttttttccccgaattttgatatgtactaaatcatgccccct

SEQ ID NO: 142421 - DNA, 539 bp, Cannabis sativa
catacttgattgtccctttcaagtatctaatcagccacttcacagcattccaatgctctaacccagggtttgccataaacctactcaaaacacttagagaatgtgttatatctggtctagtactgaccatgatatacattagacatccaactgccatagcatatggtacacctctcatattttccctttcagtttcagttttagggtagtactcattagataacttgaaatgccctgcaattggaactccagtggccttagatgagtctaagttaaacttcttgatcaccttctcaatgttgcttctctgagttagtaccatctttccttcttgcttgttccttatgacttctatccccaaaattttcttgactgctcccaagtctttcatttcaaattcagagttgagtttgttcttaatggtgtgtatttcagcttttgtctttgctgatgatcatcatatcatcaacatatagtaataggtacacaaccttaggtgtccctagttccttgtagtagagacaagagtcaaattttga

SEQ ID NO: 142422 - DNA, 559 bp, Cannabis sativa
ataaaatggattacattgaaatggagttttatttacggcataaaacccaacaataaacacctgcaatccaaggtctgttcaagatccgatccttcgaagatactcttgaaaaaatcagtaaattccacgccaatagcgtttctatcagtgatccagacattattcttgttcaatatactttcaatggcgtttctccttcctctaattgctgccgagagaaaaaagaatctagaacaccttctttgacccaagtgattcttgcacgctacttccaataaagcgctttcctggtcaaagtttcgttcagggatcgacgaatttcacattcttttctccaatcccgggctccggtaggaagcctttgtaaattttccagtttttattccagatctttaatcttccaatcaatcttttcatattgcattctattccaatgaataagtgctactctccactaatatatatataccatactaattaaattatataccacaattaaaatatatataccataataacaaaattatatactaccattatatgtaataaaataaaaatt

SEQ ID NO: 142423 - DNA, 799 bp, Cannabis sativa
ctcgaggagcctattttaatccatttatagccttgtgtaatagacacacatgatttagatattttatatcttcaaaacttggtggttgttgcatgtacacaacctcatttaagctcccatttggaaaaacattgcttatatcaagttgtgtaactctccaattattaaaaactgcttggagagcatagtcctaactgttacatttggcacatgccatgcgcatcacaaacacgtttatttcttaccttggaaagcaacaatgggaagctctaaaatggataatgaggtatgttaaaggaactctcaacactggtttagcttactatgctagctgcaattcaaaagaggaagttacagggtatgtggacagtgactatggtggatgcatagacactataagagatcacttacaagttatgtttttacaactcaaggtgaatgcattggttgaaaattaactctagaaaaggtagtagctcagtactgaagtagattaattatatggctaaaaggtagtacctctcaaaatgtaatatcgttattgatttaatataataatttttatagaatatcattaataccaattgcaatgtgcaacctgtaagtagtattgggcaccactaatacttaataacaattcatataaaagaaatgttaaaagacactaatggtacttaataccctcttcattgtcataacggtgtcattaagtatatcaagtctcatatataatttaatatagggtaaataccattttggaccatctgttttacaaaagttaccaattggaccctgtgtt

SEQ ID NO: 142424 - DNA, 588 bp, Cannabis sativa
  modified_base (27)..(28): a, c, t, g, unknown or other
actaatcagattgtaaagagttttatnnagggcataaaacccaacagatgtcccctttaatactttcctatcttgtgcgaaccgttaatattcagctttgtactttagtttatgagttatatctcatttataacttttgattttcctttctcgttagacatgtttaaatcaaaaagttatgatggtttgatccccttctcgtcagaaagttttgaccaaaaactttaaaaaaaaaattaaagtcgtgggtttgcattatatcatgtaaatctagatgaattctgattaatcatacataaataccccttaagtaattttaaagagtaagactttatatttacttaaatattgtgattctctttattcatgactgaagtttaaaatattacatcagccatgtgagttacatcattcatttactggtagtagggtcgcatatgttccatgttccagtagttctttattagcgagccatttagccgagccaatttctaaactttaattcctactactactttgattacatatggacccacccatttcgggttgaacactcctgcagacgcatctctcgtgtttgtaaatact

SEQ ID NO: 142425 - DNA, 1240 bp, Cannabis sativa
gtacattggctgcaaggacttgatcgactcatgtttcagtaagcttttagttaaaagatagttttttaattttctgattgcctgattattttaattgtgttgatatcggaatcgagtgggcagtactataatatatgaaaatacttattagtattcttattacatggaatgtgaccgcaggtgtatagttatgcacccgaggcggactggtaggggtaaccgcaagctagctgggctcagggctcctggtgagggcgagaaccctccaccacattgggaagagttatatgctgaaacgcaagagactattcggcaggagggggagcaaatcagaaaattgagagagcagcgagctcagcctgctctaaaccttaaccctgatcctccggcacctctggtagtgccaccggatgcagggaaacattcagaacctttgtatgagcgattccggaagcagaacccgccagtgtttgtgggtggtgctaatccactcaaggcaaagcaatggacgattatgataacatccatttttgattttatgcggtagaaaataatgaccgggtcaggtgtgctacttatatgctgcgagatgattcctgtatttggtgggagattgtatcccagggtcatgatctgaataacatgacatgggaagccttctggaccttgttttatgagaagtattataatgaatctattcgggtggcaaaggcagaagagtttatacgttactcagggcaacatgactgtgacagagtatgccactaagtttgatcgactcgcaaagtttgcttcagatgaggtggctgctgatgctgctaggaaagcaaagttcattcgagggttggatgaacatatagcacgagatgtgattgttgcttctaaacaaccggggttgctcgaacttatgctcaaatagttgaactggctctagtttctaagggtgcagaagctctgatacaaaagaaaaatattgccagaagagattcatggaagcaaacatcaggtgctggtcttggtaggggtactgatcccggtgaccgcaagaaaagacctagtgaattattagctgcaggcccaaataaatggttccagggtaaccaaggtttccgtcatggtgggaacgaaaactggcggacttctcctgaatgtctgagatgtagaaggcgccaccagggcgagtgtcaagccaggggctgtttccactgtggggtggtgggtcacatgaagagaaattgtc

SEQ ID NO: 142426 - DNA, 774 bp, Cannabis sativa
  modified_base (26)..(31): a, c, t, g, unknown or other
  modified_base (174)..(177): a, c, t, g, unknown or other
accattgatattgacttagaaagatnnnnnngtaagtttatgatatcttattcaacatcaatatcgttcctttccaatatatactccatatgatattaaaaaatcagaatttttttttcttttttactttttttaatttaaaaaaattattatttttttcttcttcttcttctnnnntcttctttcttcttcttttttctgcagaagaagtggcacttcctagttgtatttgtaacactcaaaatacttatcaaaacattatgccaagtagtattcgacgaccgctgcccaccaggcaaccccacgttcaaagcctccaaatctcttcatcgtcaaaacctcctccggtgccgccccatcgagaatcgaaaccaagcagtaacagaaccctcccgtgatcttcgaatcactgtcagccgcgaatctcattctcccttccttatccaaactcgccgccagccatacctgagcggtgcagcccatgactcggttcgagtcaacccgagacgagtcatcaaacttcggaagaagagacgcatattgcaacaaccgcttgaccctgtcgatgggttccagaaacgactggaactcggcgaccagtctctgaagcttagacaggacgaggttagtggtctgtaatggtgaaaaggtaacgacagagcaggagcattgcgatccatttctctgggtaggcgagtgtttggaaggaggtgagtggatgcatttgagagttttgatgattcggggtttgtgtgtgtggaggttaaagagagt

SEQ ID NO: 142427 - DNA, 592 bp, Cannabis sativa
acgcgtacaacacactgtttgaacgtagttttcggcgtgttaaacttttgtcgaatttcttaaaattttgcaggatgtcttaaacaactatacgtacatgatcatgatgagaaaaaatttgactaaaaaattctttcggatactaaaactgatagaggtacatcaatatattcattttaagggtgcattgtagaattttcaaaaaatataatatgttattttatttctcttctacattatatttttagcacttttacttttaaaaatacttcaatatatagcactctttaaaaatactataattatgatatcacacattactatttattatatatcctaatttttaactacaataattttttagcttcaattttttataaaaaaaaaatgaataacatcgataccacaacatagcatccatacaaattcctagaatgatatcatccttttctctctaatagaataatatctcaatattttgacacataacatatcggcattatttcacaaaaacataaaaacaacaaaaaaattacaaaaatatggtttcacggaattttaaacatttttacgatttttttgattttattca

SEQ ID NO: 142428 - DNA, 623 bp, Cannabis sativa
ctatagtgatctaattagtattatctctcgggatcaataaaactaaaaggggagtaggtcattacccgctaactaagggggacgaatatcgataaaagtctttgcgttctttaattttatgttccaattgtgtaacacatagcagacatcagattcatacatccgcagtgttgcttggccactttttgaggtcaacagtttggtactttcattaagagagagtcgatatcatatctgatcaaacgccatggtcaacacgataagaaccctaattgcaccatctgcatcttcagttcttcctcaagacccacagactgtagatcctaatgtctatgttccagtcacaactcaaattcccatgaacactgcagatttatagggattgctcttatgcttcacgatgcaaatgcttgaattgctaagtgttgatatgctgctcggattgtccactgctcggctgggaggacctcgtctgtgcaggtatatgctcagaacatctccttcgggcaggtatggagaatcaagtctatgtgtcaccagcatgtgatgccacgttagagtgcaacaattgggataacaactatctatttataggaatctttctaggtttaggtttgaattat

SEQ ID NO: 142429 - DNA, 744 bp, Cannabis sativa
  modified_base (34)..(43): a, c, t, g, unknown or other
agggtgttaatcaacatacttttgagtagatctnnnnnnnnnntaaaataatttccaacattattagtcttctgtcatggagatttcatatctgttctgctgctactcaaagggctgaaattattttcagcttcatctggtttgcaaccaaatgagcagaatcagtaatatactgtgcaggaatgtaagaatcagaagtgaacagaatcatccaggcatctaaaattacaaggagtacacttccatttagataccttggtattcttatatgctcaaagaagatttctagagcagaatgtcaaagccttctggaaaaaatgacaagcagaataaggatgtggagcactaggaacttatcttatatggggagagtaactctgattaactcagttttacttgccatacatacttactgggctcaaatctttatattaccaaagaaactgttggaggacattgaagctatttgcagatcttttctctggaaaggcatacaagaaggggctggtcctggattagtggcatgggattcagtttgcagacccaaggcagcaggggggttaggatttcgaaatgtgcatcattggaacattgcagccttggggaggtatgtgtgggatatagctagtaaaaaagattatcttttagttaaatggacacataatgtctacatcaaggagcaagattggtggagctatgttgctccattagattgtagatgggcatggaaaaagatagtggctg

SEQ ID NO: 142430 - DNA, 594 bp, Cannabis sativa
ataaaatgtccaataaatcaaagtcgtcaaatttacacattaaagagagaagagagacttattagtcaagtggtcttgcacgttgaaataattatataaatatatctagttggttagttatgataaagagttataaatgagtgatatgaattagtccacgcatatataataatggataataattttgtagggtctactataaagactttagctactttcttctgttttttaatgttgtgtctccttgtaaatttttctttacaatagtggcactatagtactatcaaaaatcttaatagtaaataaaaaaaaatagattttatgaattttttatttttaatcacaataaaaattataattaaaaataaaaaaattgtgagtaattataaatcatcattcttaattaatgatttaaaaatctgaaactaaagacattagttacaaaaattacaatttagtatgactagatatatttatagtcacaataactaaataagaattgtgatatttggtatagtatgaaatgaaatgaaatttttattattttgatcaaaatatcctttactcttttaacactactaaaaaatcccaaat

SEQ ID NO: 142431 - DNA, 1689 bp, Cannabis sativa
agtctagaacgttcatacgacaatactatcgaccataatattagcttatactcaatatgatagtcacactctagccatactgatgtgatagcatcgatcaatatttgagccaaacatacatctatcagtatccagtacaactatacgtatactgatactgctatcaatgtactctaacaggcacaattaacatgtatggtaaacatgtaaatacatatgcataacactatactaatcttacatcgtttccgaattcaggtgtgccggccaacttgagtggaacaactgctcggcgaattacaggcccctaaatcacatcattcgtaacaggggtgagtgacacgctaaatcacattctggagacttaggttttaagccaaaagttttcctattgaaagttaacatggcaataccctaaataaacaaggaatcaaccaaccaaagctctgaaactaacacaaatcgacaatacgaaaaaatttaagaacccagctgctaatcctgttaaccgattttacagggcctgtaaaaccgggtaaccggtttgcaccaggtaacccaaaaaattcgaaacctaaaccaattcgaatccaaatcataccgaaccttctagacctgcttaatataccccaaagaacataatccaagcaatagaacaacctaatacactcaaaatcaaaattcaccattaaagagccaagcttgagttcttaaattcaaagcttgctcaattatcacaatagcccttaaatctacctcaaaacaacatgaataaccttaatttaactttagaaaacaaactcaaacaccatcaacaagaacaacaattaaaacaaagaaaaaccactaaaaacttgctggaattccttgaattaagcagcaaaaacttcaaaccctagctaggttctatggggttcgaaagagagagagcactttttctaatttcttattttgtaaaaattaaaatgaaaactacatgtttcattaataataatcaacataaaaaatcagattgttatcttaaattaatccactaaaaacaaaaattcaaattgggcaaaaagaccatttttcccttcacatagccaaaaagtcataaaaccacttaggagtaatttggtcatttctaaaatctcgactattcccgacattcccaatgtctaattatattgtctcgctatactaaaaatactaaaatgtgattctaatagccaaacgacgcgttccaatattgtcgggcacaaaacatgcaaaaatataaaatttcatatatgatatatataatgcattctgaattcaaataaatctccgtaaaataataattcataactaatatgcaagtttcataattaaaccatgtttatctgctaatttttaaattaaagttaaacgttctttacagaaacgatactttagaagagactacctagagaagttagacataacatatttaatcataattgaacccttgaagtagttttatatcggtacctataaataatatacatatttgaaaaatatgtaatttaaagagttctctataagttatgtcaaaatggaagaaaattatcacataataaaatttttgtggacaatagatgttgaatgtttccatatgcaataaactaacatgagatagcaagaatcatggtattagatttgtccagaattatcgacatacattttgtt

SEQ ID NO: 142432 - DNA, 653 bp, Cannabis sativa
  modified_base (100)..(103): a, c, t, g, unknown or other
  modified_base (563)..(594): a, c, t, g, unknown or other
tgatgtttgccacgtgctacacaattaaaattaaaaattaaagcacacatcgaatttttatagaggttcggccccctttgatagcgggtaatgacctacnnnncttttagttgtattaataccgagggttaatactatccaaatcactataggtgggatctgatatagcacccttaacgatacaaagtagaaatcaaggttggcaaatctcaagtgatgagaaagatatgggcgtgtgagagagaatgaggaagagagttatcagacttaggcttaaaccttagaggctagcatcagacttaatgacttaggcttcctaggttagagttaaggtctttatataggaagtctaaaccctcgtttacaacttgaaaccctagaatttatatattaaattagttcattacaaaagaccaaaatgcccttgaacatagatattattcaattgttttattggcttttagggcccaattcacagcaaatgtacatattcgaccagtcttcagtacctttaaaactatggtcgctttgataccaggttgtaactgttggaaatattttannnnnnnnnnnnnnnnnnnnnnnnnnnnnnnnattaacatcctaatatgaattcttaaacaatgaaaataaacacatataaagttagaaaa

SEQ ID NO: 142433 - DNA, 684 bp, Cannabis sativa
ataaactaagtaaaactgtttgaaccttgaagatttccaaatagtctttgctctgggacaaccgataagggcatgggtaacagacccggtgttgttgccacaaatagagcagtttggatggggaagaatccttttgagaaataaatttaaggcacaaggtaaaatatggtgaaaggctttccaaatgaaatgtttaattttgggagggacagagagagaccaaagctttttccaccaatgttgataagggttggggctggaagaggagggaacatccgttgatgcaagggaagaggcaagatggtaagcagatttgacagtgataatgccagaggggtgagatccccaaatgagagagtcagacaaagttggatccaggggaattttgagaatactttcgacttgataaaaaggaaagtaatgcttaagtttaggtacattccaagtggaatcctggtcgataaagaaagaaacaaaagcctgggaccggtcagtaggatgtaagagagtgggactgtgaatactagggatccaatttggtgctgataaagggacattaataccagcaccaatcttccaaaccagacccttcttaagtaattgacgtccctaaagaagactcttccaggtaaaagaagaattatgaccaactggagcattcaaaaaatcagaatgtttaaagta

SEQ ID NO: 142434 - DNA, 651 bp, Cannabis sativa
aaccggtcgaccggttggtgtcccagatctggacttccggttgggaccagtctgccagttgggggaattttggggaccctagtttttcccaattttgaggtatttagggtatttccatgttgtttatcgatgggggaacttttagtttcaagtttaagtctccggaaagtgatttggtgagtcactcatctatgttacagttaatgtgattagggcatccatctagcacgagcatttccgttcaggtcgcccagcacacttgaattcggaaagaaggtaagaactgtatgtaatatgtgatatgaatatctgagtgtatgtatatgttatgtgtatattgatgcttaaaatgttatttgcactaccaacacttatacgattatagtatagagtgcgttcgtacagtgaatgttatcttagagtaccctgataccagcataagtacggtgaggtactgggagtgcgtggcatatcactcaaaggtactcagggtatgagcaaaccctaccaacacttgtacatcgaggtacatagtgcaagttgtatagtggttataccctagtatggaacgttcgtactcatctgtcaagccttgtaaataggtgtatgggcgcctaagtacaagtcaaaaaattatatgatatgttgtat

SEQ ID NO: 142435 - DNA, 692 bp, Cannabis sativa
  modified_base (76)..(77): a, c, t, g, unknown or other
aattgagatgaagctaagacttgaatatttgacattattaatatatttaggttttttttcttttttctttctttcnnttttttttttttttgaacaaaatatttaggtttggttttgggtgatcaagaaatagtttgtttgtggaagcaaaatgatatttatatatatagtaccaatataagaagtagttgaggtggtaagtttatgcaattattagcaaagagacagattttcatcaataacaatcagttaaaataataacttgcaatttaaatgggtaattttccttggagacacgaccggaattggaattaaaagaacaaaaataattaatcgcttaattcccagatcgtttgacgaaaaaattaaaaaaatagaagaaaattttgatttttcatacttacaattggccaataattaaaaaataaattaaagtttcacaccctctaaaattagtgtctatctttgcacagattccaaaatcacccattcaaataattatctactactttacttattttatgataaattcaatacaatatgattgaaaaattatgttgcttatattttttaaaaatattatatattatatttacaagtcctatataataaggggtacattaatagtgtaaaaagtttaggctaattagcaattttttcccccgaactttgacatatatactaaatcatac

SEQ ID NO: 142436 - DNA, 591 bp, Cannabis sativa
tctcttattgataacaaatcagattagattgtaatgggttttatttagggcataaaatcccaacaatacgaatatacgctctatgtactaaagagattattataagttttacattactgaataaaagtgactcgtggactaagacttgttaacgccccaactacgtaaaaacctgtgtgtcccttattatactttctctgtcgattatcgtttcttcagatcttattatcttatttcgttttcgaaaatctcgggaaacaaaaatttgtaaaaatactctcacaagtgagagcaaaagtgatgctatcacctaagaagttacatattattatatatttataattttgcaaacaaaataaaaaattgtaagaaattttgatccttattattaaaagagggcttatttcagtttcaaccaagaaaaagtaacaatattacaaaattacttccaactggccaaatagacaaatatacactccaaataaaaaaaaacaactacacaaataccacttacacatactttcaacccaggatccatgcttcccgggcaaccacgtagcaacccaacaaaaccgaaacaaaaattcaacc

SEQ ID NO: 142437 - DNA, 808 bp, Cannabis sativa
cacttgaccttcccaagcgatgtgaaattgcacaacttactcggtgtttctccttacggatcacgggactactgactgtgacaattattatttatatttactacttaatatttttttttctatttttacactatatcgaaaatatgtttatatttaacattattttttatccttttttctctaactcaaactcaattttttttatctctctttattttatagaacaactttaattatataatgcataaatgaaaagtttattttaattagatagtaaaattaagtataaaaattcaattttttctaataatacttcttcaccgtaatattaattaacagtacatatatgttaagagaagaatcataacaacacattttgtaggcatttgagtcgcctctattagggctaatcaacggtggtgagagatttgtcaaaaacattatgcatgcatccttcacagtagtacgtactatatttatatatttactggatagatgttacgtgcaaagtcccgtatattaattttattttaattttttagttttttttaatatcataattttaaaattaataatattcaatgtaattattgaaatttgaaagcataataatgatttaaataaaaataaaaattactattatactttgtaattgtaattaaaaaaagttattattcgtcaaatttatcttcacaattaatgaaaatactttaaacaatcaaaaattcaaatttaatttaaaatttaactaattctaaatatcaaaatttaaaaataatttttaataaaaaaataaacaatatgaaca

SEQ ID NO: 142438 - DNA, 796 bp, Cannabis sativa
tatatattaagattttattaaaacctaataattcaacaaatggatttagaattggttacaaaaggtatagacatacgtaattacttgagtatagtataaacatgattaattaatatttatccaaaaatgtgttcattcttatatttcacgccattgattcctttgtttttattaccatttttgaattaatggagaactcaacacaacccattaaaaccatttagaattgattacaaaattatacattaatttatctaaaattactcaatctcatgatagctatatatatatagctttataaaagagaaattatataaacttattttatagacataaaaagaaagaatatcattcccacaagcttaggcctagctatattcattaattatgtatatatagtctaacaaattttatttagtgggtgataaatatatattatttgtattagcaaacgtataaatttttattgtttgttcttatattaagagaaaatttatattttgtgggggtttttgttaatatttagtaattaaaaatgtaacttaaaaattattgtattgttgccaatatttctcaaatttaccaacaaaaaacaaagtataaaagcaaaataatttgtggatgacaataggaagaggaagatcagtagttttttaatatttttttaaattattattattagttaaaattataaactataaagtagaatatcctttttcatatagataaataaacaattaaatattaaatagataataagcagctgaaaattatattaatttatatcaagtaataa

SEQ ID NO: 142439 - DNA, 1313 bp, Cannabis sativa
  modified_base (1208)..(1215): a, c, t, g, unknown or other
tatgtgtttattgatgattgattgatgtttacgaaatttttacataaaataattgaattctctttcttggatagtttggaaaaaattaagcaattcacttttttacaaacttaattttaattttatttgaattagttataaatttttgaaaattaaaaaaaaaaaataggaggggcatcacccccttacgcgcgcggataccccatgatactcggggtgcatgcgttttggacaagggtcctatccgaggatgctcggtcaaccttggcaaattttgtctaaaaaccccccatgcacgccggtaaaactcggttgtgcacccttggacgcgcgtgcagatgttatgcattgcataccatccgtgccaaatgcaaatttttgccatttttcatttttcataatttattcaaggagttaatttcgaattttttgtgtaattttgtatgtagattttaatttttcaaatgtcaaatctaataatcagtttgaaattaattaattttttaattaattttagatattaattttacatattagtagattttgaacttgaaaattaataaaatctattattttttttacttaattggttatcttatttttaaacataacgttagatattttatattttacattatttaaataattttataaaatgaccctacttgaaatttaaaataagatatattttaataaaataatctagaaaattttaaaaaactaaccagatattttgtcaactttcaaaattttgttattttatttaaattaaattataaaattagataaataatatttatttatcattttattttattaatgttattttattttcttttaaaataacatcaattttgaaaagttagttgatatttttgaatagatatttaggtttgttaaaaatctaattttttaaatttgtaggtttaattttaaattagttatttaatttaatttaattatttttcaaaaataatattttattatttagatttttcaaaattaatttaaattaaataaatcatataaccaactatcaaatttgttgcatgtatgttttatataatgtttattattcaaacttattttataaaacctattattgtttgatctaaattgctatggttaacttgttgacaaatccaatgatttgattttaaccatagtctaatcgtcaataggtaaaataaataatttgtaacaggtannnnnnnnaatcttctttcatctatatataaaccttgtaactgttgggattttatgccctaaataaaactcattacaatctaatctgatttgttatcaataaaaga

SEQ ID NO: 142440 - DNA, 560 bp, Cannabis sativa
  modified_base (142)..(145): a, c, t, g, unknown or other
gttgcacaacacacaatgtaaggccacatgaacatgttgactatgaagttgagtacgtgtaattaaaaaattattaattgcaattgtaaataaaatatatatatattaaagtataattaataattagagtaatttgcggcannnntacctaagtttaactcccagttgcaaataaatatctaagtttaatttttagcagtaataatacctaagttatatttctggaacttctataagtacctaactattaattattaagtaaattgccacgtggcaatctttaattggtccacgtccttaattttctttttcttgaaattaaatataccaataagaaaatgacacttggataattatttgacattgattaggtactttcgaagttccaaaaatataacttagatattattactgctaaaaattaaacttaagtattcttttgcaactgggagttaaacttaggtatttatgccacaaattattctaataattaataataaaatttgaaaaaccgtgtttttgcaaatgtcagttgtatataagaaaatataaaaactgta

SEQ ID NO: 142441 - DNA, 630 bp, Cannabis sativa
atattaaaccattagcatataaaattcatgcaaacataaatcacttcaaatttcttatattgataactaatgagattgtaaagagttttatttagggcataaaacccaaaatttttaccagtaaaaacaacttataccataagattagtatgtagagttatatgtaaaagagatagtacgtcttcatggagttccaaaatccatcatttcaaatagagatccaaaatttacattgaaattttgggtgagtcttcagagagttatgtgtacaaagctgaaatttagcacaacttttcaccctcagactaatggatagttcgagaggacaatacagatactagaagatttattacgaacctgtattatggactttgagggttcatgaagtaagtacttgtctttggtagaattttcctacaacaacaactatcagagtacaataaggatggttccttatgagatgttgtacggtagaaaatgttgttccctaattccctgggatgagaccggggaaaggaagtatttaggcccttacttagtttagaggaccaatgaggaaataggcataggggtgttcataaaatagccgatccaatccaatctgcacgatccaatccacacatatttata

SEQ ID NO: 142442 - DNA, 874 bp, Cannabis sativa
atccccgatgatctcagccctatgccacaacaatgataaactaataagtgtttatccaaaaacactgcttatattcacataagacaatctagggttttttactgaatcccgtggtataaatacactaaaataaaacttatattttggctataaaacatacaccatattgtagagcttgtgtcaagcttcaaaacggcatatagaatgtccaaaatggacacccgagtcaaaagttatgaccaaaatatgatttctgatatccgaggaatttctaaaaactatgaaactcgaaaatcccaattttcacactcaccgaaacactatcaaaacttatccaaatcactccaaacttcccagggcacatatataccataaatattaccattcttacgtaacaaaaataaaaatcaggcctttcaatgaaaaacgccattaacgttcggactaagctttaaaaagtttcaaactcgatttctaacccaaaatcacctcaaattcaataagtaaatatcggtactagtcccataggtgccaaagaacaattctacaaagtcagaatctccataactattctaattcacgaaacctctatacgaaacagattatttttaaacttaaaacaaaattaaaccataccttaagctttctctcttcaagaatttgctatcctgctactaccagagcttagaccactaagtttcggattgaaaatcgagaaaaatagatataaaggaagaaggttttgtcgaagggagagaacgagggttttgttcgtttgttcgttggttctgtttccctgataagttaatatatatatataaacttaagttaacttacgttaacttattgttgctccagaattcgcccaaaatac

SEQ ID NO: 142443 - DNA, 572 bp, Cannabis sativa
attaataattatgaatctcaaccatgaatggtcgagctctactaattatagtcgagtcatataattacaatttttacttctcaaccacatatagttgagctcaaccactctaagttgagctattttttttttttgaaaatttgattaataattataaatttgattggctctaattttcttatacaatttatccaagtagtgctcgaatcatcgataattatatttataactttcttttggcgaccacttatatgacccctattcatccttccatttcccatcatactgaatatagattactatttgagtcattcctgtatgaaaaatagatggttgatattaaaaaaatacttaaaatatattgatgaaattataattaacgagttcaattttcaactaaatctaattaagtgttatcaatgtgtccatcaaagagttttagcaataattgaatattaacactatcttgagcatgtttggtcgagctagttgaactctattagaattatcatatctattgaatatcactcttttagcaaacatcgatgaaaaaagtttaacaattaaaaata

SEQ ID NO: 142444 - DNA, 544 bp, Cannabis sativa
gaaattactagtacaaacacattttcgatctgtaaaaatcaaagggactgaatttgtaatcccagacctccaatttaacacacatggcaaatataaacaaatagcatataaagtatccacactataataaaattataaaaaaaaactgaaaacgaactgaaaaacaaaaacaactctacaaacataaactacaataatttaaaatcaaaatgttacccattgattacctaaaaatggacaggaaacaactagaccaaataatatttccaataaacaacatacgtaaacggattacactattaaaaaactatgaaaaaactaaaacaaaatgagaagagacattaaaacgaaactgaaattaaaaaatatttacaaaactggaaaacacaaatagaacaaaaaagacaacaaaatgaaaaaaaaattaagactaaactaactaaaatgcaaaacccatcaaaagattaaataaaattgatcaagacaaattgaagccctaaaaatccaaacaaaactaaatgtaatgctaaaatggaaaacctag

SEQ ID NO: 142445 - DNA, 516 bp, Cannabis sativa
tgttaccaaacgctacctaaaattttatatttttacgtttaaagtttttcttttatatttttacagtattatataaaaaacacacaaaaaaaaactatatgaaaataacaagaaatcaacgtcaaaacatcaacaaaacaatatcaaaataacataaaaaataatatacaaatagaaaaaaatatgaaaaaataacaagaatataacataaaaataccatattttatgtaaataaaatctaaaaaactgtaaaaatattaaaacttccgtacagaccatatctttgtcatatctttgtcattttttttcattttttttttttttgttgttgttgtttttgtgtttttttacctttggagtgggtgagttttaggtgcaggcttgtcctaccttaacccaaaactgacttttttttaggatcatgtagttataggcttggcccacctatgcttagtaccgactttgataaaagtactaaatttgatttaatttaaaataaactaaccttggacaacc

SEQ ID NO: 142446 - DNA, 2431 bp, Cannabis sativa
agaatctaaatatccccctctagagaaactcactttgtgcctagtccacgcgtctcgtaagctatggctgtacttccaggcacaccgcataaaattgttaaccgatcagcccttgagacaattgttatcaaaaccagatgcttctagaagattgataaaatggtcccttgaactagggcagtttgacataacataaccccctcgaacatccatcaagggccaagctttggccgaattcttaatagaaggtataactctagaagaaattctgcctgtacatcgagaagcagaatcttggaagttatacattgatggtgcatccaacgagcaaggtttgggtgcaaggataatattaatatcaccagaaggctttaaatttcactatgcattgagatttcaatttcacgcatcaaataacgaggttgaatatgaagccttgattactggcttaaagatagtcgaagcgttgaaaatcaaaaacctcatttgccatagtgatttgcaactgattgtgaaccaggtcctcgaggaataccaggttaaaggcttaaaaatggcgaggtatatagagaaggttcagaagaacttggaaatatttgattactataaaatcgaacaaattctgagagaacaaaactccaatgccaatgccttagcaaaactgggctcgcaaagcgacttggatgaattgaacttagtaccggtggaaatgctaagcgagccaagtatatgtgaactggaagacgtagagatgataagacgtagagatgatagacagctagagatgatagacagctctcgagatgatagacagctctcctacatggatgactcctattatcaataatttactagatggacagcttccaaacgacaaaaatgaggcgcaaaaaatattgtatttagtgccttagtacataataattgaaggcaaactatatagaagagggtactcgatgcctctacttcggtgtgttctccccacagaagcaaatgaaatcatgagagaaattcatgaaggcttttgtggggaccatgcaggttggcagagtctatctaaaaagatcattagacaaggatactactggccaacgatcaataaggacacccatgagtttgtcaagaaatgtgataagtctcaaaggttttcgaatatacctcgcgggccaccaacagaattaagaatgatgacctcgtgctacccatttgctatatggggaatcgacctaattggggcattacccactgggtgaggaagagctaagtatgcggtagtagtagttgacttcttaaccaaatggattaaggtcaagcctctcgtttctataacctgtaagaaagtcctcgactttgccgtcaagaacattgtctgtaggtttggaatttccatgaagatagtatctgataatggaacccaatttgatggcgacttgttcactaagtactgcgagaggaacaaaattatcaagagcttctcgtcagtatccaggcctcaagcgaatggacaaatggaagttcttaataaaacaggaagaagttagacgctgccaaaggtaggagggtcgatgagttacctcaagtactctgggctcacagaactactgagaagacagcaacggggcacactcctttctctctagcatttggtcggaagcaatgctgcctattgaagtgaacatatcgactcacaaaagagagttttataatcaagaagaaaaccaggaacttctaaaattgtccttggatctacttgatgaaaaatgaactgagtcgcaaatcaccaacacagcgtatcaacatcgacttacaagatactttaacaaaagagtcaagaaaaggctattcaatgttggagacttagtgctaagacaagtatttgtaaatacgagagatgcatctgcaggagtgctcaacccgaactaggagggtccatatgtcatcgaagcagtagttagaattagagtttacaaattggcccgactcaatggctcgctaataaagaactactcgaacgtggaacatttgtgaccctactaccaataaataaatgatgtaactcgcattattgatgtaaaattttaacttcagttatgaataaagagaatcatttatactatttaagtaattacaaagttttacactttaaaattacttaaggggcattcatgtatgattaaccagaattcatctagaaatatatggtataatgcaaacccaccatttgaaaaaaaaattgaaatttagaaggttctcaagtaaacctctttgacgaaagaggagtcgaactgttataacttcctgaccaaaccgttttgacaaaagagggttgaattgttatagcatcttgatcaaacctttttgacgaagaagggatcaaacaactataatttttgattaaaaacctatatgacgggaaaggaaaatcaaaagt

SEQ ID NO: 142447 - DNA, 885 bp, Cannabis sativa
ggaatgggaatgagagtgggaatgcgtcgaggaatgggaatgggaatgggagttggggtttagtgtttagggtttagggtttggggtttggcgtttagggtttgcggtttaagtttagggtttagggtttagggtttagggttgctgttagggttggggtttggggattagaggttagggtttggggtagggttgggggtaggggtagggtaggggtttgggatcaggggttcagggttagggttctgggttcagggtttatggtttaggggaatgggaatgagaattgaataaaataaaatataaaatgcataaaaaagttgataaaaatcattaaattttttctcatcttacctgataattgttgttccttccattatgaaatagaatattcattccaccaaaatagtggaaagggcattctattgggatgattttccaatactttaaaaagaaactaaacaaaagaatagaatgaaaattatttcttttccattctatttcatcacctctaacaaaatgcgacctaagggtcagtgttcagaggttagggttcagggtgttggggttaggatttagggtttaggttttggcgtttaggatttagggtttagtgttttacggtttaagtgtttgagggtttaggggtttaggggttttgggtttaggtttcacggttcagggaatgggaataggaatgaaaataatataaaatttaaaattcataaattattgataaaaatcattaaattttttctcatgttggaatggaatggtattccttcaattatacctgaaatccggctggcactgtagaggatgacgcgtttaaccttagagaatacgtatcaacgaatgtaatggcagatattaatttgtactcta

SEQ ID NO: 142448 - DNA, 726 bp, Cannabis sativa
  modified_base (200)..(216): a, c, t, g, unknown or other
aatctcgcgttcgaggaacaaagatgcatgtttgctgagtggagagacaaagagatggaagcgttaagggctcatcatactgagattgaaaatcgtagttagcaagccactgtgctgatacaaaaagcctaccaaactatcggacaacaacttttgaatgtcatcccctgggtgagacagacgaagatccagcgatgaannnnnnnnnnnnnnnnnatggtcagccgccaaatccccggtcacaagttctgcttttgggcctagcggttggcgggcagaccttgtctagtaattcatcaggagaggtcatacctgattgttccaaccaggttaatggtgccattccacctgtcaaccaagcaaatcaatcgctgagacagccaggcgctttcgtattcgataggttggggacgactcatgacctaaggagaaatttgaacagaaggagaggagtagacgaatagattgtcacgacgatcgtatagcttggagcccgtgctcaaattcccactcacaaagatactgatgtgattcagatcgaccaaactgccgagcaagttagtccagctgtgcaggcacatctagacgagctgaaaaatatgttccaaggcatggtcggacagagaaacagtgatctcgagatggaccgagcacgtggaactcccttctctcccgagatcaatcttctggcgttgccccacaagtttaaaatgccaacatggaaaa

SEQ ID NO: 142449 - DNA, 725 bp, Cannabis sativa
  modified_base (232)..(235): a, c, t, g, unknown or other
gtccccaactcaagactgaagcactgaagactgcagcgaaacccgctctagcaagggtgttcgcgataactcaggctgatgcagaagctagcttttcagtggttagaggtcagctctcgatcaacaactcttatttctctgtgttgtttgactctagggccactcattcttatgtggtggccagaagttttagtaaattggataaatcgcatgatagttatgaatcagggtnnnnaaccctactgcctggcggagaattattcatctccaaaaggtggattaggtctatgtcgatcagaattgaggatagggagttgagtgctgagttaatagaaatgaatttatcgaattttgatattatactgggaatggatttcttgtctaagtactcggccagtattgattgaaagaggaatatggtaatcttccaaccagaaggcaaagaatcatttgtttttgttggatcggttcagggatctcagatcctaataatttcaatactaacagccaagaaattattacgagagatatttctagggttttctggtcatggtattggataccactcggcctgactctattcggccagaagacatcaaggtggtttgggaatttctagatgtttttcctaatgaacttccgggtttacaaccacaaagagaaattgactttatcattgatttggcacctggagcagaactagtttctaaggccccttacggaat

SEQ ID NO: 142450 - DNA, 561 bp, Cannabis sativa
tgtttcaacatccagaaaaaaattagtatattttttttaatattcatgtacgtcgttatagctgtgtaagatatcctacaaaattttaagaaatttgaaataatttacaatatataaaataatattcaaacagtatattttacatgcgtataaattaaaatagtcacgcgtttgaacgcagtttctggcgtgttaaatttttaatttttctaaatttcttaaaattttgcaggatgtcttaaaaataactataatttacatgaccatgaaaaaaattgattaaaaaattatttcggatactaaaacaaatggagatgtatcggtgtatattagtgggaaggcagagcaaaaacagaggaaaagaaaatcatcttttattgattgaaagaattgaatgaattgaattgatacaacaataggtagctggtcttatataggtaagtacaacaagtaactaaaataacagaaataacagaatataacggtctaagagcccccttcaagatggagtgtaaaattttttgacactcatcttggatatgtgtaacgccctgtccaaca

SEQ ID NO: 142451 - DNA, 724 bp, Cannabis sativa
aaggtcaggtgtttctccaaacatacaggggtaggggtgttcataaaatagccaatccaatccacaaagtgcagatatctgcatttgtgcggattggattggaaaattcaaaatctgcacttgtgcagattgaatttgaatgttgattgacatgtaaaagtaaccgattcaatctaatctatattttttttttataaaaaaaattatatatacaagtaatttaaaagtctaatacatttaatacaattatatttcaaaactattatatcaagtgtatattctatttttatatatatatatattttttttctaaatacaatttcaaataaaagtaaacattttttatacatacatttcttttcttcctttgaatttatttgttatttttatatattttttttcataaatattaaatatttaatattaaaaagtaaccagtctaaaataaccgtatgaattggattggatctaaaaaaatgaaatccacacttagtgcggatcggatgcactataagcaaaatagtgcagattagattgaatgaacatccccaaacaggagctactccatcattgttcaccaaataatccactatatcaaaagaaccaaaaggaaaaatattaagggtaaccttgtcttttgcaaaagttatcaattggacattttgttttgttaaatgacaaaataaactctgtattttctaaatggtacaaataggaccttaaa

SEQ ID NO: 142452 - DNA, 533 bp, Cannabis sativa
tattagtatgcttattataattgtaaatataaaaatagacatagctaatttatactatactaaaataaatatattttctttctattgtttctatatatacataattttttaatgagttaatgaacgaattttctattgaaatacaattcttacatcaaaaaataaataaacaaacataactttataaactcaaatattatttaattagaaaaaataaacaggatacaaaaaacaaaaaagataaacaattttttttatgtatattatttattttctaaaaaataaatatgacatacatagagtgatatagtaagcctatgtgaatattattattttgtttattaaattaatatgtttaattaatagaaaataaaataaacatatatatacatacaaaatattttatattattggtatgtttattatagttgtaaacataaaaatagacatagctaatatttagagtatactaaaataaatatattttatttctattgtttctatatgttgattattttctaatgagttagtga

SEQ ID NO: 142453 - DNA, 1020 bp, Cannabis sativa
tgtgcgttttgctgcagcaaaatgttagcaaatctttagtaaaaatctcatgttaacaagaactccattaaaatgcacaaaactcttccaaattttgtgcaatcagtccttggacctattcaaacatattcctatgccaagcaagctcaagaataccatttcaagcatagttctcagttgttacgcaaagatataacatattcctatattatttcaaatctcatctaatgagatcttgtgtcattcaatctaagtccattacatttaaccattccataattaaatataactcaatatcaagctattggtggccaaacaatatcaagaaactaacaataaccacacttggatgaacatgagaatttttactaaatatttgcataaaaaaattactaaactaaaacatagggttcttcaacaattcaaaccaaaaaaagtttagctcatagctaacttaaaaaccaccattacaagataaaatttaggcatggagtttgaatgttagagttagagaaaataaaagagaaaagaaagaaatagcaaacaactatagatgaggagttttccaaaagggtggatattgaatcttgttgttcttcttctcctctttcctccttcttcttcttcttctttcactcctttttttgtagaaaaatggcagaatatttcttccaacgtgctgccctcctttttttctctaaatggaggttgctttctttttacaatcctcctatgtttagtaccatttgccccaaataaaccctacacatggcatgcagctagcctctccatgtaatagctccagccaccactcctagaatgccatgtcatctccacaaatgccacctcttttaatgaaatgccagctcacccttttcctaagaaaataaaacacaacagccactaacatgtttgctgcagcaaaaacttcacagaatttcagcaaaattaagaacatgactaacttgctattttctttgccaatttatacacaatagtcattgatttctattaatagct

SEQ ID NO: 142454 - DNA, 917 bp, Cannabis sativa
taagatgtttaaaatttattatatctagtattttaaattactttgttaaaagaaattatttttataaaaataagtaaataaggtggtgtagaaaaaaattacggtgtttttcgtaatacactattttcatatttcgatcattcaaaattattcttactatactatctcacttgttgtctcattgtatctcacttattttcatcaccgtatctcacccgttgtcatcactgtatcacatcccttgtcattaccgtagttcacttgtagtcatcactattgtatttcccaaatctatatcttaatcttagatttcatctcaaattttaaataattttttaatatttttaagacattagaaaaaattcattagcttgttctgttattattaattaatttggttttaaaaattgattattattttttaaatatcttaattattaaaaaagaaaaaaagtacgaaaatgtgatattttagttatgagaaatgctaaaaggtgaccaatcgtactctactctatataaatagatatagcattatatattttgattgatattttatgtatgtatataaataaaatttacgattaattatatttgatttaagttttaatatttttttggaatttattttttattttctaacttttttttaaaatattttatattttttttatagaaaattgaaataatagcaaaatattaatttatacatttatgcttttttatagaaaaattattaaaataataataaaatatcaattagtagatttatgctttaataaatattaaaattgaaagaattaagaagagaagagaaaaacagttttaaagtaattttagaatcccatgttaacgcctcatacttctatatctttatatattaaaagtgcttatctaacggcatttcttggtttaac

SEQ ID NO: 142455 - DNA, 651 bp, Cannabis sativa
ttcaacgaaaatccactccataagattaattataaaaattttctccactaatgtaattgcacacaatcaacaaatctataggactttataggcttataatgtaaggctagggtgaaaggtagataaagaaggtcaatttgggctcaaatcacaccatagcatacatatataacattctctcaaataattcctatttgtattcctcaatcactctcctcaacaagtcaatcttatatcttttttttttccatcatagcatacatatacaacattctctcaaataattcctatttgtattccccaatcactctcctcaacaattcaatcttgtatcttttttttccataaaacttactattcccccacacttaaattgttgcaagtattcatttatttttcattgatttttttttttaaatacttacaacttgcatacattcattctaagggaatgataattttttttctcatcatcacttatacataaccatgaatattttctcatcaacaaaactctcacacaaatacataaaacatcaatatactatggtgtaaaaaatgatggataaagatttttttttaaggctcaaaggttattgcatagggttaaaagggtgtgtgctagttaaatcagtgaacaactcctaattc

SEQ ID NO: 142456 - DNA, 993 bp, Cannabis sativa
aaaccgtaaatttgaaaaaaaaatcaaaaaaatagtacataagataatttcccaattttaaaatgatcttaattaaaaaataaatattttcattctaataaatataatatagtactatatagtatatttcattaaaatactacaaatatttatatcaaattttaataaaataatatttttattaaattaataaaataattaggttaaaatattaatttacatacatatttctttatttttaaaatatttttattttattatttttggtatatattatattaaagtatgatacattatttatttaattgtcttatatattatatatgatatattgatattttctacaaaaatttatatttaatttttttattcaaatatttattatgttaaatttatgttataattatttattattaaaatatatttaaatttgattggtctttatttatttttttattttttttaaaaaaattatagcaaatgatctcaaatcatagtactatgtaattaaatgtccttatttcaaaacttgtacagaaatgatcattttatactattaattatttatattgtcttttatcacataaaaaaaatttctttttcatattatttaaagattatggtatatctatattagttgggttactactcaatgattacattttattgtaattatgatggttacatttttgttgacctgtaatagcatattaccaacatgtaaattttttttaagaattaaattaactataattaactattttcttaaaataattaatctttaatttaaatatttaataaaaccctttttaaaaattaattttaataattttattttcatatttaagtattcattatattttttttaacagttaagccattcaattataacattacaataaaactctattattttataaaaattaaacttccaccccttcttgctaagtttatcaaaaagacatgttaaagatctataaccaataacaatta

SEQ ID NO: 142457 - DNA, 504 bp, Cannabis sativa
tataaatttaattgaaagattaaataataagtttattattattttaaagtaattttatttctaatatatatataagaaattatttttgtgttttctttttgtctcttaagagtgtaaattaattaataaattaatgaattagtctaaccaaaggaggaagaaagaataaagggccagcattttcagaaggccagtgtccatcgctggcttgtagagctgagaggaattgaactgcctttcttactgatacagtgaccttttcatatgaaatctcttctccatcttctatcttattatcaacttcaccaatccttcctttcaattttttcactcccaaaaactgcatatagacatataaaatataaatgtatgacactatgagttatcatatatgatatacaggggaacctctatccaagaatacatgaccaagaaaataagattctaattaagaggttataactaaatagagttacttgggaaaaaaaaatcaaaatattaaaa

SEQ ID NO: 142458 - DNA, 949 bp, Cannabis sativa
tatgataagcttaggagatcccattaaaggaatagaaatacataattacgaattatgtactgtgggatcttatgattttgactgagtagtaatggttggacataccgagttaatgtgtttctattagtgtagacaatttatacaataaatgaggatatataattcatatgaaggaatagtctaatcttgtgaaattataaggttgatatatttggtgatgatgttaagaattaaaaaagattattgagaaccatggaggttaaagcaaaaatagtataatgttttattcttgaaaggtgggtaacctgagaagatcaatggaatattagaaacatgatgtgagcatatttgataaaggttagattatcttagaataatctcttccttgacgaggtgtttaattaaaagcgataattaaatgtaccactagttacgtaccttaacaagtgtggtacgagagaaatattagacgtttgttcactggaataagtaggccaggtagcttatcaactagccttaactcctacgttgtccgaagtatataatgtgtttcaagtctccatgctgagaaaatatgtatcaaactcgacccatattttgagttgtgacgatgttaaacttcagacaaatttattatataggaaaaatatcttgtccaggcttttggactagaaagagcaggtactgtaataccctggaattaagaaatggattagcaaaccctaattagataattaatatgaattttaacgtgttaagaccccgttagtgagacaggggcattttagtaattgtgacctcaaaagggtaaaatgatgaaattaatttacttacgtgtttaatggagctatgttattatagagtgtacctatgttgtcttttcaggtgtgttctgacaggtgggcgcggtatagtcacaaccgggtatttcgggccgaaccgggttcgg

SEQ ID NO: 142459 - DNA, 853 bp, Cannabis sativa
  modified_base (79)..(83): a, c, t, g, unknown or other
  modified_base (534)..(551): a, c, t, g, unknown or other
aaaatacctcaaagttctcacaatcaaagcacaccaaaatcccccaagctccaacaagctcaacaacacacaagagagnnnnntttgaagtgaaaagattgaagggagagggagagtagggttcaaccaagagctgagaaaataaccagaattttctttctaaaatgcaaaataattcctttttgttgcaattaatccaaaaggccaaatttaccaaaatgccccttagggccaaataacacataaaagcattccaaggataacatagtcatttccaacataaatatacccaattaaatttcagattaatcacactttattaaaataccaataaataatcccaaaattatttttttggccccgaacccggttcggtccgaaatacccggttgtgactataccacgccgacttgttagaacacacctgaagaaggacaaaacaagcatactatataataatatagtctataagcacgtattaaattaaattaatagttttatccttctcaagtcaaaattactaaaatgcccctnnnnnnnnnnnnnnnnnntaacatgtcatatctcatattaattcacatataataatttatataataatataatttcacaataatactcaattaactagttagtgtttttctaatccattttataatcttagggtattacacccagtgtgtgatgaaggcaaaataattatttttcccacttttgagcaatttgaatcacctcggtgagcagcatccataaaaccagagtaaatgtttgtcctgagtttttcttggtgattttgtatccatctaaatctttcttcctctcatatttttgcaatgtgtcaactctgttccct

SEQ ID NO: 142460 - DNA, 621 bp, Cannabis sativa
ataacactgttatagaaccagtttcattttaattataactagtttgagttattttatattatttatttttatttattatgttacaaaaccgattttatttaaattataaccggtttgaattattagtttttattcatagaaccggttatatttttagttatatctgagacatttacttctggtgacttttctagtgatttttccggcaacagtaacttttccgataacaattatttttttggcgacttttctgacaacactaacttttccggggacgacaactttttcgatgacttttccggtgccgacgacttttccggcaaaacttattgttgttttacaaatatgatattttcacttattttttttttacaaaaatatggcataaaaaaacccatacaaatgtaaaaaaaataataaaaaaaaacccataactttatagtgttatttatttagggctttttttaaaaaatgtacaataaaaacaatataattactttttcaaaaaaaaaaaaaaaacaatataattacaaaaaaactgcaaaaaaaaattattttaaaaacttatacattttgaaaacttattatatgaaccataaattttaatcattaaataataaa

SEQ ID NO: 142461 - DNA, 784 bp, Cannabis sativa
ccccgaacttctctactatatcaatgatgtctggcaccgtgtctcaaatcttggtgacgcaattggatacgcaacattcatatgtgaactggcgcttgacttccacaacttcattttctaaaagacttatatattttagaaacaaacggcatggaagaagaacacgtcaagaacgtacgatataagctaagtgacggccgtatggaggacataactgaatctgtgaacgtaacaaatgaatgaaatttggaagaatcagaaatgccagactattttgaagtgacagcagaaattttagaacttgaactaaaacgcccacctcaaatagaagaagaggaaatagtagaagtaatagagatttcttcagacgaagaatccaaagatgaggaaatgccagaagggtccaatgagccagattactctccaatactaaagagcgaggacttagatccattcacagcaaccaacgtcgatgaactagaagatgacatacctgattataattttgaagtagaaatcgatgagtcagactctgaatctgaggacatgccagcaccaatttcagcagatgtagaaatggaaataaacattgaggaaaacccagaagaagacctggaagaagaccctgaagaatctgaagccgagtcatgcgtggaggacgaataatagtctcttttaacttgtcaaaatttatacaaaaaaaatatttttctttctattccaataatctagtgactatgtaactagagatttagtacgcttttaagtaaataaagatttattt

SEQ ID NO: 142462 - DNA, 896 bp, Cannabis sativa
  modified_base (861)..(870): a, c, t, g, unknown or other
taaaataatttccaacagaagataggagagaagaagaactttctatttcatgacaggtgctcttcacttcaattgaatcatttggctttttcggatgatgtacttttgttttgtcatggatatacacagagcatcacatatatgcttcaggccctcaaactattttccctcacttctggtcttcacccgaatgccagcaaaactgcaatttattgtagtaatatggaggagggaagtgtgaagaagttgattaaagcatcgggtttctctagacaggattttccatttacttatctggggatacctatttgtcctaggaagattttatgcaaggattgtgagctattggctgaaaaaaatgactgctagaattaagagttggagtacaagaaatctctcctttgcaggtcagattactctaattaactcagttctaatagcgattcaggcatattggagtcagatgatggtattgccaaaaaaagttatcagagctatagaagctatttgtagggccgttttgtggaaaggtcaagcaatgtttcattatcgtggggctgtggtctgggaaagcctctgtcagcctaagaaagcaggaggattgggaattacaaagatagaagagtggaataaagcggccatttgtaagtacatttgggccatctcaaacaagcgggaaagcctctggcaaagatggattcatagtgtatatcttaaagaccaagattggtggagctacacagcctctatccatgctagttggtattggaaaaagctagtagctatgaaagaccagctggattttggtggagctacacaaagggagtgctcggccatagagggaatatgggcctcacttgnnnnnnnnnntttcctcaattttatttcaatttctc

SEQ ID NO: 142463 - DNA, 870 bp, Cannabis sativa
gctggtgcaacatatcaacgaatggtgaaccgaatgtttaaaggccttctgggagggaacatggaggtatacgtggacgacatgttggtcaaatcgaaggcatacgccagccatgcggatgacctcgaagaatgctttaaagtggttcggagatacggaatgaaacttcacccgaagaagtgcacctttggggtcaaatcaggaaagtttctaggcttcatcgtcaatcagcgagggatagaggcaaacccagagaaaatcaaagctctcctaagcatgccttcccccaaaaagaacaaagatgtacagagcttaaccggaaaggttgctgccctgagccattttatctctcgatccacagacaagtgcattcccttcttcaaaatcttgaagaaatgccaaaaatttgaatggttcgacgagtgcgaggaggcattcaaaaaactaaaagagcacatggctaaacccccgatcctgtcaaaacttgttctcggagaagatttgttcctatacttgaccgtttccgtgaatgcggttagcgcaaccttagtacaggaagaggaaaaaactcagcatctcgtgtactatattagcaaacgcatgatagggccagagacacgacacccaattatcgagaaactagttttttgcctcctaatggcctcgagaaagctaagaccttatttccaggctcatccaatcaaagtattaaccaaccacccgctccgacaagtcctacaaaaactggaggcgtctgggagactcctcaaatgggagactcctcaaatgggctatggagttaagccaatttgatctacattacataccacgcacctccataaaaggacaagcgttagcggacttcatcac

SEQ ID NO: 142464 - DNA, 521 bp, Cannabis sativa
agtgttcattcatacatactactctcaatttttgaattttgaagcctaatatagttactaatttgagattatatggttttttttttgtttttttgctcaaaattagggattatatcttggttccaagttttttctatgtcaattccaatgttcaatatagtttttatttgatttctatattttttttatttctgtgatgttgcttgtgcaagttcaactactgctttttcgttgttcgttttgtgtgtgaaaatagtttgtggtggtgcttaataaggtgaaaatttctattattaaatcagtgtcaagaaaatgttcggatctcccgaaaacagtaagtgtgaacttgaaatttcaacaaaagaaaaaaaacaagtctgaacttgaaatgtttgaccgagagattttttaacttctttaacatattgaaagggtttgtctttacatgtctcttgaacaaatatattgatattgtttttatttttcctcaaggaaatacaaacaaataaaaaaatattaca

SEQ ID NO: 142465 - DNA, 1128 bp, Cannabis sativa
ataaacgaatggatcttcaccttctggctagaaagtcaccattttccgcttacagtctatactggctgaatacttgtgcagaaaatccaccccaagtatgatgtcaaactccgttaattctagttctataaggtcagcactcaactccctatcatcgatcctaactggcatagacctaatacacctattggagataactaactccccgctaggcattagggttccaaaccgtctttcaaaaatatcacaaggcgtgcccaaaagatcaattattcgtgtagccacatatgagcgtgtagctcctgaatcaaataacacagtaaacaaggagtcgttgacaggaagctgacctatcaccacggaaggacttgttgcagcatcagcttgggtgatagcaaacacccgagcaagtacaggttttgcctttgacttctgctcttctttctttgcctgagggcaatccttcttgaaatgccccaccatgttgcactgaaagcatgtcttccggttacactctcccggatgatgtttcttacaacgtgggaactcagggtaagaataaccttggcgtccacctctgccttggttcccacgaaaccgcttactctgccccgagccacaagatgcaggagtaactttcctcttctgatcagtggtggaatcaccaccatccctaccataggcaggagtaggaaaattaggggttccaccaacattcagagtcacttgggtttcttgaagaaatttaactgcaccctcggctcatagagctttttcaaccatttccggataagttgttgcttcattagtagtgatcaccaggtcatgtctaatcttcacattcaaaccggccaagtacttttatttcttactaaaatctattggcacgattcccacggtgagcttggccagacggtcaaactttgtggtatattcagtaactgagatcccctcagtttgtactagttcagtgaactctttccgcttagcactgcgaacaacttcactataatatttgacgttgaataattctcgaaactcttcccaggtcataacagcgacgtcccgagtgagggacaccaagtcccaccacacaagagcgtcctcttggaactaaaatgtggcgca

SEQ ID NO: 142466 - DNA, 864 bp, Cannabis sativa
ttagaaagatataacagtaagtttatgatatcttattcaagttcaatatcggtccagttcaatgtatactccgtacattcgatacctattctgccgtatctaatcagcctagtcagaatatctttttcttcatgggcttgactttacaagacaacccaagttatgtaattcaatataaactctccaatagagggaaaaaggaaactaagtgtaattctctaaatactataaatacccaatgaattctacgtacggattaagagttgaattatattctaatacttcctcaggcaaacttgagaacttatgctcattgtattcccaaaggcttttctagcttaaagttacataataacatcaacttgtggactaagactaattaacgctccaaccaatatttgtgtctttcttactctttctctttgaattgtttattttttcagttctaattgtttataattggtttttcaaaaatctcggtaaatagtttggttctttcatcgagagctaaaagaagtagtgataccatctagagattgtgttcagttttcatggtgatcacacgaacaaagtctggtctttactttacttgttcttacaccaaagtatggaacattgatgatctgcatgaggcgaccaatcacttgtatgatcaacatggtgaagattagaaccgaggcgatccactaatcaaagatgtagagttgggagagaatagttctgacaatgctgaagatgatacccaggatacacccgaggatgctgttggggattattttgctaggatttaaatttactaacacgtatgttgattaacaccctaactatgaattctctaaaataatggaattaaacacatataaa

SEQ ID NO: 142467 - DNA, 858 bp, Cannabis sativa
ggccacttgagggtcagatgcatcgactctacgcattttcttttttgtacgagccatcatcctatggctggacggaagacttaagctaaaatgtccatcactcgaagaggttggagtagaacgaagacaaggatgatcctcgggcaagagttgaatcagatcctggtcgatttggtgtttgcttccccaaaactcacctgggttcatctacaaaagacaacacataagatgagtgtttggtcgggatatcgaacattaaaataggcaaatatgctgaccaagagtactcaacggattaaagaacaagaatattcgacgaaaagttaaaactcaaaagtttgaaattttcgtgagttagggcaaaaaaaattatgaagcttagaataagcaagatgaaggacatgcattatgcagctcaaaaagcaagcattatgaacgatgaaatagcacggatcgttacaaaggaaactcgcagagtttttaaacttagggtttcctgcatattttctacagcgaagttaaaggtgcattcagaaaataaatgtgcaaagtaaacataaaagaaatcgagaacttacttaaggatcaaacgtctagattcaggttatgccaagccaaacgagcaaatctggtgaaaacacttcagcaaactcgaagctaaaaacctctctttttgctctgaacttacttagcaaagaaggttggtgaaaaagagtttgtggacaaatgctcactgtatttataggtaaacaacgaaagggggtaatcatttcaaaagaacctcagacgcctcagttcccccaaaagcgaatatgggaaatcaaaagcaatcaagtgcagccgtcaaccgtggtgaga

SEQ ID NO: 142468 - DNA, 1922 bp, Cannabis sativa
ctaaaaatattctataacatgtatgggccttttattttattaaaaaatagtttagaccttatatttttaaaaataaaatataatactactccacctaattttagtcaattattttttttaatagaactaagatataacaaatttaaagttagttcctatcacaaagagagtacaaaaaatgtagtaaatttggtcataacacctacaaatcatggtattatattctattttgactaaagttgggctcacattattattatattctattttaaaaaataattatttgacaaaacagatggtctagtcggtaatttttaaaaagcaagattcaaaataatatttacttaatattagattttggacatctcgaaaattcattacattaatatattttgttgataattttattatattaatactaccttttgaaaaaaaaaatatttatggttaaagaactctgctaaatacaataaattaatctttaaagaaaacaaaaattaattttttatctcttttataatttagattttcttgatataaaattcaaaacttataaattagtcattaaaataattattatatgataagtaattaaattgataataataaatagcttatcttaacaaattttatgtttttcttctatatttctattagtaaatatgttttggtttaaatatatacattaatcgttaaaaataaatacacaaattaggatttgtaaaaaaagagaatcatgaataccaaaaaaaattattattgataaataatttagaaattttaaactgggaagaaaatgaatgattatagacttattaactataataataaaaaatttgaaatttcatttcaattttcaatagaaaaaaaattataataaaaagtagactcaattgtacacgtaaatgaaaattatatatgttaagaaaaaaattaagatggactttaattttattaaaagatacggcatagaagtttattttaaatctctttgatacaagttaaactaatagcatgtatataacatgtattaacaaagaccaaaaactttacaattctagtcttatatgttatttattctttagtaaccatgtttcaaattgtagagtcaaaatatttatatatatatatatttattttgtatttaataaatttgatataatatgaaatttttaagtatatatatatatttttttttgatgaaaatgcagaataaatttaatacaatataaaacttttaagtatatatttttttgaagaagaaatggtgaataaaaattaatgtgaacttttaattttagcgttatgaaaaaaaaaattatttgtgtgtcatgtgtgtataaattattacatataatctattattatatgagtaaaaactttatacgtctttttttaaaaaaataaatacaaaaaacaaataagactttaaataaaaaaaaaaagagagaaagaacttatatattttctctttaaaataaataacaaaaaaaaaggaaaaaaatgacttatattaaaaatagagttatttaatttacatgttattatatatattaatgcatttaattttttttttaaatgataatacatttgaatttataggttattaaatatgcattaacttaaaaactcacaaaaaaaaaaaaaacaaaatagtattaagtacaaaaagacaaaataacttaaccaaaaccaaaaaaggtcacccatctttatatatatgttatagactaggctgatggcccgtgcttcgcacatgcatgatattttatatgttataacccgccctatctttatattgagcgggttaaaaataatatcaacccgcctaatcaacttgactaacctgatatttaagagagtttatatatatatatgtgtgtgtttttattatgtacaatctatatattatataatttata

SEQ ID NO: 142469 - DNA, 806 bp, Cannabis sativa
tggatttactttagaacccacgggtttgtacgattcaatttaggttgtggtagatcgtttcacaaagtccgcacattttctaccagcaaaaacaacctttacagtggatcaatatgcagaattatacgttaaggacatagtgagattacatggtgttccaaagtctatcatattggatcgagatccgaagtttacttccaagtattggcatagtcttcaacgggctatgggtaccaaactgaaattcagtatagctttccatcctaagactgatgggcagtccgaaagaacaattcagatataggaagacatgtgacgagcatgtgttatggatttcgagggctcctggagtatgtatctaccattgatagagttctcgtataataacagttatcgagtacaatagggatggcttgctatgaattattatatggcagaaagtgtagatctcccattcacagggatgaaacgggagagaagaaatacttaggtccagaatcagtgcaacggactaatgaagccatagaaaagattaaggccagaatgcttgcctctcagagtaggcaagagagttatgcagatccgaaatgcataaatgtacagtttcaggtaggagatcatgtgttcctacaggtgtctccgatgaaggggaccaaacgtttcaagaaaataggtaaataatgccctaggtttacaggaccttttgagattcttgagaagttggacaagtggcataccgtctagctttgcctctagatctttcagcagttcacaacgtatttcatgtgtccatgttgtgaaagtac

SEQ ID NO: 142470 - DNA, 775 bp, Cannabis sativa
  modified_base (310)..(327): a, c, t, g, unknown or other
  modified_base (712)..(746): a, c, t, g, unknown or other
tggctgggaatatgttatacaatagtagaatccaagctttccttatggatcaaatattagttcccttatagtgttaacgatctgggagtgctaacagttggatctaaatatataataagttatatattaactgttcacattgaattaatcgtacataaagaatcaatagataattagaaggataaaacggtattttaaccaactctaattatgaactaataattagagggtgagctacttatattgattatatcaaatatgaatggactacaagtaagaattctgtaaatataattctatattgttaaannnnnnnnnnnnnnnnnnatagtggagtaataatagaattaaaccagattattctattgatgagatttgatagtaatcttagatttattggagctttaaaatataggttcatggtccttgagtcgcctctatacaacattgtacacgagaaagttttatttgatgaatgaatttcaagtaagaattaatttctatggaaaataaattcttaaggccaaaataataatttgtgaaattattgttttgattaattatggcgattatgaattgtatagttaatagtattttaactatttagttttattggataaaaatttattaattagttaaatataatattattactaaataataatattaaagagagatatatatataattttagagaaaataatatttattnnnnnnnnnnnnnnnnnnnnnnnnnnnnnnnnnnnatcaattattatttattggtagaataaat

SEQ ID NO: 142471 - DNA, 834 bp, Cannabis sativa
  modified_base (641)..(644): a, c, t, g, unknown or other
cggcatgggccgggagtgagaggagacgggagtggcggaggacggagttaaggattccgtgatgtcgcccatagatgaaggttacggtggggtgggtggtggttgggattgttgttttgacgacgtgtgtcaggttggggatcgtcgttctgagaaggtgggttggagtggagaggattaatgccggttattttgtttttgggttgagaagaaacgtctctagggcaaacctatagaggtcgcgtcggtggggtgtcgttagagatgagtgccggccgcatgagccgcgagtgtaggagacaggtcgccgggatgggcgcgtgaagcctactctcggcttgtgtggcttgcctatgatcttacttaccggctcgactctttccatctttttgttctccttttactttaatcgtacggtgggtctttcgcgtaagcttgtcaggcaggcgggaaacgaagtataataacttaactcaatttttctctttatttatctaaaaaaaaagaataaccatttctcttatcataactccaaaaaaaaaaaacaaaacactagccaactaatctagacattaaagattactaaggcaaatttttattaactaataaataagttttaagtttttttatttttacacttnnnnatagtttttttttttatttttacggaactctacatagaaacatttattgcaagtaacgctgcaacctaaattgcaacaaaaaatcgtatagaaacccttattgtaactagcgttgcaaccaccttaaaaacccaaaccgtcaatttgaaaaaaaaaaaaaaaaaaaaacagtatatggagtaattcctaa

SEQ ID NO: 142472 - DNA, 811 bp, Cannabis sativa
gcatcttttgtacaaaaattgaaaggaaatataaattaaaaggggtaagataaaacttagagggctcatttggtatgttatattgtattatattgtattgtgttgaattatattgtattgtattagtattatttaagaaaatagtatgtctggtgttgacttgtattaataggttgtgtaaagttataatatattttcaataaactcgaccctaacaccgactttggatcgggtccgggtccagtgtgggtccaaagtttgggttcgggtctggatttaggtctgggttggggtcgggtcttggttcgggccttcatctcagtcccggtcggtctcagtcccggtcccggtccaagtcccggtcttgagtttgggtcccgagtctgggtctgggtttgggtttagatacgtatccctagatccaggtcagagattggagttgactaggactgagcataggcctgtttggttggtttttttctatctaaaaatctagaattcaattcagtctggattggtgcaatccgaaaattgaccgaccaatctagaacctatcttaaaactgaccattttgaacctcggtttggtcggtttcaatcgcccgaatcgaacttctttttttctttaaaatatgatccaatttattctataaccacattattcaaaattctaccaactacagtcatacaaattaattgttcaaaaattaaatgtcttattctttttactttaatattaacaaaataataatatattattattatattatcaataactacaatacataaaataaaaaaaaacttaataaatt

SEQ ID NO: 142473 - DNA, 521 bp, Cannabis sativa
cgacaagggggtatactattacttggttatgcccttcggattcaaaaacgctggtgcaacttatcaaagaatggtcaaccggatgtttaaaagcctcctgggaagaaatatggaggtatacatggacgacatgctagtcaattccaagacatgcatggaccatgcagacgacctcatatctagaatgcttagaattggtctggaggtatggaatgaagcttaatccaaagaagtgcacttttggcatcaaatcaggaaaattatttcagatttatcgtcagccacagaggaatagaggcaaaccccgaaaaaaatttaagctttactatatatgcgttcccccaagaagcacaaagatgtgtaaagcttgactggaaaggttgttgccttaagtagattcatttcccttaacattaacactatggccggccacttatgaggcttttccaattaattttttcattattttaatgccaagtaattcctaacctaaacctagtggttaactataaatagatagt

SEQ ID NO: 142474 - DNA, 648 bp, Cannabis sativa
tgtgcttattttgtattttcacatttttttattctgattgtatgataatttctgaatgtgtatgaatttatattgaaccatattattttctgttattaatttttgtagttaaaacttcaatctttagtgttggtctaaattagcttgttgtttttaatgggacaaatcacaaaggattgtcatccgttacataaacataatagtgttaaatctcaatagataagtatttgtaaatgcaaaatctagttgtacattcaaagatgacaacttagactagtatttataatatgaaacaatgaagaagtttgtaaaataagaataacttgaactcttgcctaccgggacatcgtcagattcttattttattcgaaattatcctttaatgttttgacttagcatttcattttgaattttcttaaatagtatatcattagatgaatggtttataaatcatctgctcatgatgtcactctaatttctcttatgaaaatgaatggcgcagatgactatattcccgatatccaaaatgatataaattctcgatcctcgatcatagtcatagaaatctcctacttgtatatgcttactacaggaaatttaaacttagagttggattagtagtggtggtccaagaaagaataactactc

SEQ ID NO: 142475 - DNA, 801 bp, Cannabis sativa
attaatttatctaacatatttatcctttgtaatttttatttcaatctagttatgagcttctaatcttttttcaagattattaagataatgatgatgcaaaatgtaactagatagaattaatttttgtatacatgttgatttcctatttgtgctacagtgtccatggatttttctatcaaaatatatatctttttcatcttcaatattatgaatttttgattgttaaagcatatttcacgtagttattcattatgcaaaaatataatactctttgattaaatgtctttcattaaattatttacatctaattcttagaatatagtgttatattttttctacacgtagtttctttgattttgtgtagtttcattaaattggaacacaattaaggcttagaaattatacattttataagttaataaaaatcttacctttttgaaagaaacttgtgcttaaatagaaaatatattttgtaaaatatagtgtactttatttcaactatatatgaacttgagaattaatatacttataaatactattaaacttgcattttgtggattctaatatcttaataatcttactttacacattttatttgaaaactattttcatattcatttcattttaaatttttttattacgtctcatcaaatatttggaactaggttagaatattcttgttttatttaaaatagtttcttttaatgttagtcaactcctatgggttcgatctcgtacttacatgaatattatattccaaaacaattcatacacttgcgagtataaatattaaaacactca

SEQ ID NO: 142476 - DNA, 589 bp, Cannabis sativa
  modified_base (49)..(54): a, c, t, g, unknown or other
agcacctcagtagatgaaccaggtcctattctcctacgagcaccatctnnnnnnagcgtttgtgactcaaagacactacgccatataaagctcgaatttccacccaaatcggcctccaagaatgtacagttaggaaaatatcgagccttatatattcggcccacaagggagtcctgatgcaacagtaaccgccaaccttgctttcccaacatagacatattatactcacgcaaactccgaaaacccatccctccagaggtcttatatttgcatagattcctccaactaaaccagctcacccctttcctaccactcgaactccaccaatacttagacataaggctttccagatgtggcaagttttcaacggcaataagaacacagacatagcaaaacttggcaaagcttgtgctacagtttttaacagaacttcacgcccagcggtagacaagaaacgaccctcccagctttgaatgcgcttctgtagtttgtcttttaaaaaccccaagatggcatccttatttcttcccatgacacaagggagaccaagataagtactatgttcatctgcaagtctcattctaaggat

SEQ ID NO: 142477 - DNA, 1190 bp, Cannabis sativa
ccaaaatgtaggctaaaaatagcctaacattagtatttctactttatgattttatttgcatagacattttgatttcatgttctgtaaggaatgttgactttttacttttgaaaattatttattttcagctttagggttttcatgttcgttcttttggcctataggcactctaactttgaacattaatattgtttagccctacaactttttactatggatatgtgaccgaccaggcgatctttaatcttgtctatcttcttgttgccttgacatgtaagtatccaggttacatttttttgtgccaatctaaagtatgcctacacttgacttagaggcgggtttagtagcttgtactacgtgttaaattttttttacataagttttatgtgctagttcgatgcattgtacggtgtgggtaacccctacgtgagcacgcatacttacggtctctttgtcacttgcaattcaccaagtttcatagaccttgcctggaaattttcttggagtgctacctgatgtatatatatggaattgaaaaagaatagctttaagaagttagtcttgttagcaagtggtttagacacaacatatttgaacataaaatattattttttattctttaattggtctttattgatgcataacttacataaattgaatctacaagcttatataaagtccacttctagatatcaaattgctacccctgcttgacatgcaaaacagaggccatcgttgatgaatgatggacggccatgccaaaaggccatgagtactagctcttttactctaactctaatgatgagttgatagagctgctcctaaagataacattctataagacgatcattgatagtatttgtggaggagctccccattccaatatattggtacgagaacaaactccatgctctcgttgtacattcccagcttgtagccccccttactagttatctctgtaacttggtaagggccttcccagttgggttcgaacactcctgctgttggatctttggtgtccaggaacactctttggagtactaagtctcctttgaattttttcttgtccttgacttgttcgttaaagtgtcttgcaaccttttactggtaggcctacaactttaggttggcttgatctcttctttcttttatttcgtcaagggattctactagcaagatgttgtgtacct

SEQ ID NO: 142478 - DNA, 799 bp, Cannabis sativa
tataatgaaaaaatggtggtctttttctattttaccacttatctcttctaattatttaaataccaattttattttcataattataagtagttatcaaataaaatacaatttaaatatatttattaattagacccactaagtgtactaattaacaaataaacccctatttttcttttcttctcaaaattgcctaaacatggtaaaaattatcaaataagacatattctattttcaaattctaataaatttattaaataaattagttgagtctacaagatgatattgtttcaaaaaatataggcaccatgggcctatataatcaagctcctaataagtagattcgaaatttactaagcaaatttcctaacttattaattccttctgactccactatagattcggaattgcactcatgattacatacaatgctctcaataccaaatatagacactatgaattatgcattgtttcaatctaaataatcaaagatcctctatatattatttacatcgattacgtacaaattttctgttctactcttcaatgtattttatccttaaaacccttagcttcttataaataatatttcattaaactaatatactgaaataagaggtcatccatttatatctgttaagccaagctctacgaaaatcatcatttcaattctaaacagttatagaagctatagattcgatagttgtgattagcactcccactcaattgcacaaccatgttcgcaagatataagtattttgggcaatccatttgttcagctttaacgaacaagtgaaaaaaa

SEQ ID NO: 142479 - DNA, 565 bp, Cannabis sativa
ttcttcatgggcccgggcttcttgtacggaattaacgactgagttgccatatacacactctctatatcttcagttagaatagtaaatgcattgtgtttggcatgatcacagggagtttttccggatttgtcggtgaactttcccttcttcctgcttccttgtttgtggttgttgcgtgaacgcttgccacttgaattgttggaatagttgggaagttgggcggacgttccagtggaagaagccttcgctttgcctgacttttgctcaccttcagctcgttgaatggcttcttcgagcttgatgaagccttgggctcggttgaggaaatcactcattgagtcaaccggcccattcttccttatgtcattccatagttcaccaaggacttcaatgccccctagtatcgcggataactttccatcctccgttacccgcgagactttggtcgcttccgtcatgaaatcgttgatggatgtccggagtggctcgccaggtcattgctttacttcgaccaaatctcccagatgcaatgggagctgacgtgaggaagagaattgtgcatgga

SEQ ID NO: 142480 - DNA, 529 bp, Cannabis sativa
agtaatcaatctaaaataaccgattcaatctgtatttttactgattgaattggattgaatttgagctattgtgcaaattggattggacccaaaatatgaaattcacacttattacgaatctatgagcaaaatagtgcggattgaattagatgaacacaacaacactccattatcataggagacattatttaatagtgtcataaatttataggtaaaaatattattatttttttaaaaaaaaaatatttatgtgattcgacacttagtattggtatatttttatgtttttagatctttaataattataatcttaatttttcatgatatatattattgttattgaaatatatatatttaaaccaattggtgctagctcaagtggtcataggagagtgcgtgtgtggcgaagatcctgagttcgagtcagattatacatttaaatatataaacgcttaattcaaaaaaaatatatattatatatttatataattttttaaaacttataaataatttgtagtcactaataact

SEQ ID NO: 142481 - DNA, 767 bp, Cannabis sativa
agagaggcttcatgctaggttttatatctcaatctatgaaaaggatgcctctcataacaaagtattgctagagcttgcaaagttagacttcaatctacttcaatgtttccacaaaaaggagcttagtgaaattgtgaggtacacatatatatttgtttaattttggttatattagtatattttaattcatttgattaaaaaaaataccaattagaatttttaccccttgaactttgacatatactaaattatatgtccttcttgaatttttttaactgttaaaaattctccttaaattattgtgattgttggatttaaggacttttgtccaattttattcaattttactaattctatgattgtccatgtactaaattatgttccccaaactttgatatctactgaatgaccccctcgaattttgacatgtaccaaatcatgtctattaaattttcatccatgttagactttccttaccaaaattagacaaaaatctttaaatccaataatctcaatagttcaacggaatttttaacggccttaaaaattcaggggcataatatcaaagttcggaggacaaaaattttaattagcttaaaaaaaaaattgtcacataattgtgcgtgtaatttgtgagtaattcatgaatattgggtatatcattacttttgtactttttgttattaatttagattgttcttataataattaattattaggtggtggaaggagcatgagtttgcaaagaaattcccttttgcaagaga

SEQ ID NO: 142482 - DNA, 822 bp, Cannabis sativa
tttatcctttttgtatgttactacatctgacatggagtatgtcttaggcagacactttgtgaggctcttcgcccaagcattgatgtcacgatacgtgtcacccaaagaaatataccacgtcattcgaacaaaattcaagataacactaagtaaatatagtaacttgtaactacttacaatgatgttcttgaagtctcttagaaatcaaaacaaaagtcactcaatatatctacaattaagtataaacaagcacaaataaaattaattacataattattaaaatatagttactaagactttctcaatattaatattttagaacatttttaaaaactaattagtcactcttctaaataaaaatgtgtgtaaaatttctcaatatcaatatttatctacatgtttcaagctaaaaaatacacacatagtactcaaatattactattaattttggtataaataaaaaaaaaacaaaacaaattaacaaattttattaaaaaaaaaattagcaaaaaatatgcagccacctatttcaagcttaaaactcacaacttttaaaacccacaacaatacccatagaactctaatgttactatttaactcacattaaataaaaaacccatatatatgagtgcactcttaatgggtattacccattcatcggtagttttatgaaaatttgagtttttatgcatttttctatctaattataaaaaatctctcatttttatattatacgagttaagattgttccatcagctgaaaaaaaaaattaaaaaaaaaaagtttttcgacagaaagaaagttgaatttgacttaagtatt

SEQ ID NO: 142483 - DNA, 526 bp, Cannabis sativa
  modified_base (270)..(270): a, c, t, g, unknown or other
acccatctacatgtagtttctaggacggcttgtcttcattgtgacttggctgaggtgtttgcaccagcttggggttgctttcttgtatgctttctttcttgcatgcgcattctaccacaaagtctgccaaggcttggcctttgatcgctgttcgggctgttcggggttcggggttcgaaagtgatttcgtactggcccaactctaccgcccacttgagtagtcatccagaagcgtttggcttttgcagtatttgacgtagtggctggtcngtgtatacccgaacaggatgagcttgaaaataaggcctcaacttccttattgttagaataaggcagtaagcaagtttttttattaacgggtattggccctcgacctcaatgagtcttttactaatgtaatagactgggtgttgtatgctattcttttctctgattagtacaacactcacggcatgtttcgtgacaactaagtatattcccagttcctcactgtccataggttttgagagtacgggaggttttgcaa

SEQ ID NO: 142484 - DNA, 1473 bp, Cannabis sativa
aatgcttgctttctaaactgcataatgcctgtctttcatcttgcttcttctaagattcatgaaatttttgccctaactcaagaaaattttaaatttcttgagttttaacttttctttgaccattcttattctttaatctattgagtactcctggtcggcatatttgcttgtttatcgctcgatatttcggccaaacactcatcttgtgcattgtcttttgtagatgaacccaggtgagttttgggagagcgagcatcaaatcgaccaggacttgcttcaacttttgcacgaggaccatcctcgtctctgttccagcccaccttcttccagtgatggacattctcccggacattctccctattctccctcaaattctccctcaaatcttttatcaatcttttatccagttttatccagccatagaatgatggctcgtaccaagaaaacaacgcgtatggtcgatgcgtctgatcctcaagtggctcggcacgccactttgcccagcaccgaacaggatccaaccgtccaggaagaggaagaggaggacgacgtacgtcctagaagtccctccgaggcggaggaagaggaggaggctgaacccccaaactacgagggatacaacgaggctggggagccaattgatgccgacagaaatgtcttggatgagggcgtggactacgtcagtgaggagcttactgctgcggttcttcagagaaggcaaggtgccttgggtgccaggtgggtgagtcctccatccagggttactgaggcgcgcctgcagactctcgaccagggtggctacctgggcgaattggactgttacattcccgcccataataatcgtgccacaaaccctgaaaaggggatgtgcgcttggtcgggcactcatgcccagcaaggggcactcatgcctttgtacaaatactttaagaatgtggtaaacttcttcagcctctgtccgggctagtttactcctaagggcattaagtatctatttgccctcttcgtcctttatgcctcccagaagtgggatatgccttctccccacgaggttagttgttctttgatttgaagtccacccccaagcaaggtaggtcgggatacttctatttctcttaaccagacttcaagtggttgacaggcactgggatttggtcatcagcaaaattaggcattttgttgatgagtacttcttggtggatggcgcaggcatcacccgtactcggttccaccagatcccaacatatcaccgccctcccctcacccttgctcttagggatagagctcaaaagcttgctcgactgccgtgggaagaccggaatatcagttgaccgctgaggataactttgtgaagtacgtgctctatccaatggatttcattactaagccagtgagggagaggaagaggaaatctggtgctggacgggctgaacgagctcataaggagaatgaactcattcaactcaagcgtga

SEQ ID NO: 142485 - DNA, 1123 bp, Cannabis sativa
aaactttgacatgtccctcttacttatgtcctttttcatgggagcaggcttcttgtacagagctactgactgagtagccatgtagattgtctccaaatcgtcaatcaagacagagaaagtattgaatttggaaggattttctctagggtcctgttcggctttaccaacaaactttcccttttttccattgccttgcctgttattgttgttagaccttttaccgcgtgagcttgaattgcttgggtattggaggtgttgaacggacgttctagtagagaaaacttgtgattggctgggtttaagctcgacttctgctcgctgaatggcctctttgagcttgatgaatccatatgcacgattgaggaagtcactcatagaatctactggtccatctctcttgatgttcttacaaagctcttcgagaacttcgatgcccccagtattgcggttaatttcccttcttcggttaaccgtgcaacttgcattgcctccatcatgaatctactgatataagctcggagaggctctcctgaccttttcctcactttgaccaggtcctctaaatgcaatgggagttggcaagaataagagaattgtgcatggaattctaaggagaaagccttccaacagttaagccttcccgatgtcaacttgtaataccattgttaggcaacttctgagagagtggtaggaaaaactctgcatcacgcatctcctcgtactccttgtaagtccatttgcatttcaaaatatttgagatgtgataagggatcttctttcccggtatacatcttccaggttggcatcttgaatttgtgggcagctctagaacattgatctctggagaaaaaggggattcaggtgctcgatccaactcgagatcattgtgcttttggctggccagatcttggagcatgttttttagttcatccaattgtgcctgcacggatggatgaacttgttcagcctcttggccgaccaacgttacgtcaggatctctttgagctggatcttgagcgccggccccaggctgagtggctagtggaacatattgttcgtctaaccctctccttctgttcagatcatccctgatatcatgagctgttcccagtctattaaatac

SEQ ID NO: 142486 - DNA, 1085 bp, Cannabis sativa
ggctttcccgggggtgatataaaatctcaaaatctcacagtcgtagtctttaaccaattcttgccaccttctcttccttatatttaaatctttctgggtgaaaaagtatttgagacttttatgataagtgtaaatctcgcattttcaccataaagatagtgtcaccatatttttagagcaaataccacagcagcaagctctaaatcatgtgttggatagcgttgctcataatctttcagttgatgagaggcataggctataactttgtcagcttgcatcagaacacatcccagaccctgtctggatgcatcatagtaaacaaaaaacttttctcgatctgatggcaaagctaacaccggagcggttatcaaacgttgcttcaactcttgaaaacttgcttcacatctgtctgaccatataaatcgctgattcttcttagttaactcagttagtggcataaaaatcttagagaatccttcgacgaaacgtcgataataccctgctaaaccaagaaaactttcaacttcaaccacagattttggcctcggccaattcttcactgattcaatcttactcgggtcaaccataattccatcttttctgacaatatgccccagaaaagataccttcgataaccagaattcacactttttgaactttgcatacaacttatgatccctgagtccctgtaacaccattcgaagatgatgctcatgttcctcttctgactgagagtatacaaggatgtcatcgataaatactatgacacagttatcgaggaaagccttgaatactctattcatgaggtctataaaggccacaggagcattagtcaatccgatgacattaccaaaaactcatagtttccatatctgctgcgaaatgcagtctttggtatcttcttcccgaattctgagctgatgataaccggattgcagatcaatctttgaaaatacagtcttcccctgaagttgatcgaataaattgccaattttgggtaacatatacttgttcttaatcgtcagcttgttcagttcccgataatcaatacacattctgacggaaccatccttctttttcacaaa

SEQ ID NO: 142487 - DNA, 804 bp, Cannabis sativa
attgatcccaacatttggcctgttcaacaaaagaggtggtttctagacaaggagcgtgcccaggcgctcaaagataaaatggaacagttgagggtcaatggcttcataacaaaagcattttaccatcagtgggtgtccaatccagtgttggttcctaaacctaataagaagtggagagtttgcatcgacttcaccaacctgaacaaaacatgtccaaaggactacttcccactgcccacaattgactagcttgtggacgccacagctgtccatgaagtcttgagttttatgggtgcatattcaggttacaattagataaagatgtatccacccgatcaggagtacaccggcttcatgacagactaggccggtactactacaaagtcatgcccttttggctgaaaaatgcaggggtcacttaccaaaagctggtgaacatgatgttcacagatctcatcggccacaacatggagttgtatgtggatgacgtacttatcaagtccaaaaaggctacggggcatgtggaggacctaggcgaatgcttcaaaatccttcgtagctacaacatgaagctcaaaccccttaaatgttcttttggtgttggctcaaggaaattccttggcttcatagttaatgccaggggaatagaagcaaatccaaacaagatccaagcccttttggacatgaagtcgcccacagctgtcaacgaagtacaaagcctaactggatgcattgctgcactaatcagatttgtgtctaaatctatggaaaaatttgtacccttcttcaacattctcaaaggca

SEQ ID NO: 142488 - DNA, 1197 bp, Cannabis sativa
gtctaattatgtgatcagcggctcggcagactccaccagccgggtttgggccagggagcccgatagcggtcagcacacgtgtttggcggttttagtgggccatagagggcccattaggtgtgtgacggccttcgttgggaggtttggggaggagagtgaccaggatggttgtaccatttgcaccggtagccttgatggtgtggttaaagtgtggcgcgtgacgtgcgtgggaaatattaatcgttgttccactccaagtgggtgtgagtattttgatctctaataacagttacatagtattacttaaatttctcttctaggtagcttctaatttctaaccccagttagtagaaatatttgtatagataattagttataacatttaacaaccatgtatggggctcaaacttattattatgtatgtgtggagctactgaactgaattaatgggttaatatatcgatcaagcatttgaggtattttaattatttacaacgagataataatagataataatatacttacttgtttatagtgaatagtgatcaggtctttagataaatctagggacatgaagggtggtggtgtcatgattggaggactgcatttctaaatcattgttgagattttgattattatgatcagtagtctgagaatttcttctctttcgacaatgatgaagtgtataatagagaaggcgtagacaaaatagaatgcttataatcaccaaaactgatagaacgtagattttgaaggaggaatgagaatgttggccgccacagaaaagtcccaagcacaccatagctataactaactatatatatatgtattgtataggcaatgatcaccaatcaaattttatatacttcaatatgaaatatatactctatatagggttcctttcttgttcaagttatataggattttcttagctagatattatataggttgatacatgcaatgaaaggatcatttcagatcatgtattcttgccttctacttagactgtgtacgtataatcacttgtctatcaagtttggaatagtttatgtaatatatatttatatagatatatataaaagaataatttgcggctaaatcctcccaactatcgtttcacttgcacttaaccatccaaccttaaattttggtggtaaaaccctccaaactatcattctgtttgtatttttaaggtgt

SEQ ID NO: 142489 - DNA, 686 bp, Cannabis sativa
  modified_base (659)..(660): a, c, t, g, unknown or other
cacatatttagaaacaattttttatttacaaaatttaaacttttatttccaaaacacatttttaaaatataatttttgaatcacaaaccaatcaacccctaaaagatccatataagttttatgcatcaaagacatgtataaatgagactttaatttcacaaaactaaccgtgttcgtatgttaattttccagatttgtttttaagttttcatggtttcttaagtagttttcatgcataaatcactctataatatgatatgaatgtgataatgcttaaatgattcaaaataaacaccgaaaaataaaaacttaaaatttttcgtataaaacaaccgtgaaccaaactatcacgtatataaatattaattttaaaagtattaaacatcaaattttgatctaatgacgaataatgaaagagaaatttgaatttctttgcttaatttaactacttaattaaaaaaaatatatatcaaaaggtatctctttttacactatatgaaaaatatgttcatataaagatatttatgtcaaactcaactttttcttttcttttttcgctaattttttttttttaattttttttaccaatagaataatcttagtccatatgatgtaaaaatgagagattttttttaatatatgggtgcactcttaatggnnattacccatgaatgggtaaaattaga

SEQ ID NO: 142490 - DNA, 1182 bp, Cannabis sativa
  modified_base (949)..(953): a, c, t, g, unknown or other
ttcaaaaagtgcaaattttggttgtccaaggtatcttttctagggcatattttcggaaagaatggaattatggttgatccaagcaagattgagttagtgaagaattagccgaggctaaaatcagtgactaaagttccaagttttctcggtttagcagggtactatcgacgttttgtcgagggattttctaaaatctctatgccactgaccgagttaactaagaaaaatcagacaaatgtgaagcaagttttcagaagttgaagcaacatttgataacagcttcggtgttagctttgccatcagatcgagaaaagttcgttgtttactgtgatgcatcaagacagggtttgggatgtgttctgatgcaagctgacaaagtcatagcctatgcctctcgtcaactgaaggattatgaccagcgctacccaactcatgacctagagcttactgctgtggtttttgctctaaagatatggcggcactatctttatggtgaaaaatgcgagatttatactgatcataagagtctcaagtactttttcacccagaaagatttgaacatgaggcagaggaggtggctggaattaattaaagactacgactgtgacattctgtatcatcccgagaaagccaatgttgtggctgatgctttgagtaaaagaggtcccggctagatttccactactgttatgatagcccctcaactagcttctgagatggttagtgcaaggattgcgtttgtggttggaaagttgcataacttgacactttaatctgatctgttagagagaattaaaaaagcacaactagaagatcccgagctggtcaaggttcgagatgaggtgatggctggtaggcccaaagactttttagtcttgaataatggaatgctattgtataaaacttgattttgtgttcctaatgttgatgagcttaagaaagagatacnnnnngaagctcacaccacaccttattcattgcatccgggaaaaaccaaaatgtatcaagacttaaaaccctacttctggtgttatgggatgaaaagagatgtagtagactacgtgtccaaatgcttaagctaccaacaaatcaaggctgaacatcaaaggccggcagggttgttgcaacctttggcccttcctaaatggaagtgggaggacattacaatggattttgtaactg

SEQ ID NO: 142491 - DNA, 866 bp, Cannabis sativa
gcagcaaagatggtgatactttgagcaaagtgccacggctgtccttctaaaattcgacccttatccccctcacaaccaaaagtcacaagaaacaaaccatgagcatgctcagtgacagagacaaggaatctaccctgtgatgactaaataccagagagggttttcatcaaagagggcctattatatagtctaatggtatggagcttaaggagaaggctaatggttgcaggagtggaagaggaagaactagcatcatacgtgaagatagtgttttcatcagaaggaagaactaaggtattagagatagtgttaaggaactcatccatgatcaaaaggaagtaaaaacagaaatacacatataacaaacacccaaaccaagaaattgagaaaatgaaaagaaagtgccataaaccatacctcagccttactatatatagatagaactagaaaccccgtagatgccttctcgaatcgtccctagtcacatccctagcctccacctgaagaggcgcaatgatggtgaaggtattaagatcctcataattccaggcctccgcccccattttccgatctccaagagaaaaagatggctggaaaatatgctcaggtggtattaaatgccaaagatcccaacataaacgcccaggagagaaacaaaacgaagaaagagaaagagaatagagagaaaaaatgggtttacaattaatgcgatgggattgtgtgaacaggggataacacatagagcaattaatgcccttaatcatgaagtaaagggaactaaaacgacaaaaagaagaggaagatgaaagagaaccaccacttaactgagtagggtggacgagaatcatgttagaaattattttacc

SEQ ID NO: 142492 - DNA, 695 bp, Cannabis sativa
ttagcaatcatctccgcgggttttaggtaaaagtcgagcttgatgctttggccatttgttgaccaggccatataaacgccatcgtcaaagcgcttaatgcatcggctgcaggagacgggagaaaggagctcatctttcttagccttcttcaaggcttggtctttaaaatccttaagctccttcagctccacggccaggtttgccctggactccaagtccgcctggtgaaactcctctaaggacttcaccttggcagccatttcgtctaaagcctccctagcctcccggagctcacacctggccttggcaacaacctcgccctccacccttagtgcttcccagtgcttggcttccagcctatccctccgaaggacctcctcttggatcatcgtctctgcttgggcttccctttgcttagcatcttgcttgaacttggccttagcaagggcctcctgccgctcagcatcctcttggaacatccgcctttcagcagacagatcctgcagggtctttacgacttcatcaatgcccccaaattcggacaagacgaagccgtgattgattaggttcttggaaaggagaccgacctctgcagcaagctggaaaaggatgcaagaggaaagaagtaaactacggaatacttaccacggttaaggaatggctgagatcctgaacttgaaagacagagttcaagg

SEQ ID NO: 142493 - DNA, 800 bp, Cannabis sativa
attatagagattagagaaagagaatatatataaacaatatataaatcttatgtaacatttatattatataatatatatatatacttggctttttttataagaattgatggcagccaaaaattaatattgatttaaaaatatgagaaaggaagagaatgatactgattttcttaaaaaaaagaatgagagaaagagaaagaatgagataaaaatgggaatgttaattatgtatttatataataattgtacataacattaatattaacgttatgttatgcaaaactatcaataacaacctttcctatcctcaatattaattctttttatattttcaaaataataataataataataataatttcctattattttgggaccctgtgcaactgcccaggttgcacaggctattagccgcccttgattttgttatgctatggcctaaatttttcaggttcatcattatatatgatcatttttctccatcaatccatcccagaaaatccatcccataaaattgcatcatggtcaaaagtaagaaacaatgctatatttttttgtttgctcatctaaatgttatttattttggaaacactcattttagatgtcatacatataattcaccaaatcattatgttagttattcttctttttttttttcacaaaattatttccatctaaagccttcatcaaaaaatccaaaaatgttacttataagaatattttatttaaggaaatatatttctatttaaagaaataaatttttatttaaggaaataaataaataattgattttctgataa

SEQ ID NO: 142494 - DNA, 578 bp, Cannabis sativa
tcagaccttcgaaattgcaagagagaaagagaggggaaagagagagaccttcagttcttcaaaatcgcaagagagaaagagaaggaaagagagctgttcagaaaaagagagggaagagagctcgaaaatgaaagtgtcattcgactgtttgggtgtaagtgaacaataggagaatttgcgtcgttttatcacactcacaatctctttaccgtcgattttaaaacgccacataaagcttgagtgaggcttttaaaacgacgctaataatgaacgatttttttttaatttcttgacttttaccgtcggttgggtaattagtgacagacatagaaccgacgcaatttgtttattttttgtgacatttttaaaatgacgactatattgaatatagtactattcatgtcggtcaacgcgatgaacaatcgcgttgaccgacatgaatagtggattttgtagtagtgaataaacagaaaaagactaatcaatatgagaaaatagggaagagaattatgttgatttatttacccaattgttaatgcctaattgctattctttttcttgatgtgaatgacagatta

SEQ ID NO: 142495 - DNA, 632 bp, Cannabis sativa
  modified_base (147)..(153): a, c, t, g, unknown or other
cccctcgtggtccttatatgcccgccctactagtcccactgactagtagtagctcacttaacaccaaggtgtcagtgggtggtggagagctgacaccaattccccccttaaagagcattctaagtttttagccttctaccaggaacnnnnnnnattttggctctgtagacatacgaccaaaccatatacaaaatcatagagttactcaaatccaatggcgtcattgtattcgtagacccaaagaaatggcgaataccaagtcctgtcccgatccggacaatattgaagatatttacgaaaatgtcactatcatacaaactaagcatcaacatgctcccagcatgcacaacaacatgcgccaccacttgaccaccacttggccaacttgtgggcatcacctagcttgtaacgtgctatcttggcatgcacgttacatttagcaaagcatgccttaaatgttaaggcttcaaatttatgggatgttccaaaagaaaaaaactactacgagaatatgttaaaggtattttcacattgaataattttcccaattcatatttttttttcacatttttattagggatattggcggctaaatccaaaattttggcagcataactacctaaaccctggtt

SEQ ID NO: 142496 - DNA, 532 bp, Cannabis sativa
  modified_base (32)..(60): a, c, t, g, unknown or other
  modified_base (366)..(368): a, c, t, g, unknown or other
tttagaaagttcttatttaggatgttaataannnnnnnnnnnnnnnnnnnnnnnnnnnnngtaaaataatttccaacacctatccccctgtgaaagttatttatgcagtggatcaatacgctgaactgtatgtaaaggagatagttcgtctccatggagctcttaaatccattgtttcagatagggatccaaagtttacatccaagttttgtgtgagtctatagaaggctatggatacaaagctgacgtttagcacaacttttcaccctcagaccgatgggcaatcagaaagaacaatttagatactagaagatttgctgcgagcctgtgtcatggactttaagggttcatggagtaagtacttgnnnttaattgaattctcctacaacaatcactaccagagtacaatagtgatggctccctacgagatgctatatggtagaaaatgtcgctcccctacacatggggatgaaactggaaaaaggaagtacttaggtccggatttagttcagaggaccaatgaagctataga

SEQ ID NO: 142497 - DNA, 1206 bp, Cannabis sativa
ttgtcacatttctttgcgaagttgaaagcgtcttgccgcagggtaggccagtaatacccttgccgcatgatttttaaggcaagagaattaccaccaatatgattcccgcagatacccccgtgtacctcgcggagtatatagtcgtaatcttccccatcaatacatttaagtagcagctgactgaagcttttgcgatataatcttccatcatagatgacatatcgagtagcccgctgtcgcagttttctcgtttccattttgtcatcgggcaagataccattttccaggtatgcgattattggagtcatccaagtaacttctttggcaacatctatttccatcacttcttctcgactcactgtcgggtgagccaatacgtcaacaggaatgacatcgagtaattcatcttctctagttgaggccaagagggccaatgcgtctgcgtgtgagttatgagcacacggtactcgggatacgactactttcttaaatttatgcaacaactcgcatactatggccaggtacttagccagacgctcgcctctagccaaatattctccattcacctggcatacgacgatttgggagtcgctaaaagcctcatactcggcttcattgttagatgcagaaaattcaaaatgcaaagcagcgtataccttaaaattgttggggctgattagtatgattccaccaccgaaaccttcgctattagaagccccatcgacgtacaacgtccatccttctccattcagtacaaccgtgtcaattttgtcatttatgagtgccacttcagtacttgggaactcaagaatgaaatctgccaaggcctgccccttgattgcagatctcagtttgtatgtgatgtcgaactagcttaacgctactgaccatttcaacaatcttcccgatgcttctggctttgctaagactttcctcaaagggtagtttgttaaaacttcaatgctatgagcctgaaaataaggtcgtagctttgttgacaatattaccagggcgaatgctaatttttccatttgaggatagcgagtctcagcatctaacaagcgtttactgacatagtacactgggtattgtcgtccatgatcatcgcaaattagtaccgaactaattgcatattctgacaccgctaggtaaatggataagacttcgccggttatgggtttagataggattaggggctgccccaaa

SEQ ID NO: 142498 - DNA, 590 bp, Cannabis sativa
caggtgagttttgggagagcaaacatcggatcgactaggacatgcttcaacttttccacgaggatcatcctcgtcttcgttctagcccaccttcttctagtgaagaacattcccaaaatcttatacccagccatagaatgatggctcgtacaaagaaaacaatgcatttggctgacgcgtttgatcccctagtggctcggcacgccactttgcctagcgccgaacaggatccagccatccaggaggattgggatcataaaggggacactgaggtccaggagattaaggagtacgacgatgtacgtcctagcagttctacagaggcggaggaagaggcaaagattgaacccccaaactacgggactacaatgaggctaaggagccaatcgatgctgacagagacgtcctagttgaggacgtggactatgtcagtgaggagcttactgctgcagttcctcatagaaggcaaggtgtctggggcgccaggtgggtaagccctccgtccagggttaccgaggcgcgctttcggacactcgaccagggcggatactgttggaatttattttattaggatcttagatctactcaca

SEQ ID NO: 142499 - DNA, 634 bp, Cannabis sativa
aaatgagttttggtgctgaaagttaaaagctctttctagtgatatataactgtatgcttttattctttgccatgtgcaatgattttgctaatgatagtgagattgaatttctgcagttgctagattgaagaatcatcctggtgcaacaatctttacactcactgagagtaacagagatgcaatgaaagagcagatatcctctcttttggctgatttactgagaaaaatatagacctttaagagtgattggatttgcaatattttaagttatcatttttctcacttgggtcagagtttggtatgcaggctagttttagcagcaggtcaatggatttagaatcagttattctttccttatgaccgtttccttctctatatttgctctttacagtttctaatagaaaaatactggacttaccattaacttatgaaagaaactattgtcgtatacttgatttaacacatgttgtgctttcaaattgtttgtagcacacccacacacccttttcgacatttacatgaaaagtgttatatgctaaagaatcggagtatttgaaacaaataaacaaacaaaagccaactgaaatgtatttcgactcatgatgagttggactcaaatggggactacgagctt

SEQ ID NO: 142500 - DNA, 507 bp, Cannabis sativa
ataagggtgatattttaatactcttagactacaccaaataaggtttctagacttgcgttaatgctagaaagtctactgatgagatagtgattactatgggatggaacaatgatttttggagaagtgtaaaactaatccagagtctctaaactctactagtgagactgaatgttaaagcatccaagaagactcctagataattatttagccaatggaaagttctataaattttttggcattattctagtaatggattaattacaagtattactttatgaccaacacagatatagttgccaaacagtaaagaattcagtatcctaagaggagtaaacatatagaaagaaatttcacaatatcaaggattttgtgactaaagagatgtaatggtggagaaggtttgtactaaatacaacctgtcgaatcctattatgaagacaatactacatacaacacttaatttagatatcaaggtgttgagattaattgaaatgcacttttagtttt

SEQ ID NO: 142501 - DNA, 675 bp, Cannabis sativa
cgcagccatgacgaccacctctgtttccttaaaactttctattaccctctgatgttctggaagcatcagccttccgtttgtgatgagggttaccaccgtcagtccccttatagacattaccactagcaggagggtttaatgctatggcagcatcctttgctgtctgttcttttatttacatgttgcttagcctcctcaacaattaaggctagctctaccactttcttgtacaaagtttcatgagtagtggtaattttcaagtcccgactgattgtggcattcagtcctctcacatatttctgtttcctggtgaaatctataggcaccagatcaccagcaaacttggacagcagatcaaactccagagtgtactcggccacagacattttcccctgagttagtttcacaaaatcctccatatgtgaagtcctcacagcgatgttatagaatttttcctcaaatagactcttgaactcttcccaagcatcacactgacatcacgagtctgtcccacaatatcccacaagacgtgcgtagggctgaacatcgggcgggcttatcgagtttcgggttcgtaaatttcaggttcacaggcttggagttcaaaaaaatgaaagtgaacttggacccgaatagggcacgagttggcgggctggcgggttttggttgggcggg

SEQ ID NO: 142502 - DNA, 795 bp, Cannabis sativa
ttttttatttattgtgtgatttctttgtgcaattaaaacgatttggtctccttgatattgtgtctttattgctcttttctttcaagggaaagaattatttttcagctgcccattttctttttttggaaacttcttgtaagagaagaaattttcttatggaaagttaattttatttagaaactttgaccattgctctttctctttattgtgttcgattgtgtcttgatatgttcagatcaagcactctgtttttggcaggtataaattccatgttcatgatcgagcacctatttggcaagttttcttcctggtctggtttgctgctgcagaaatctgattctgatgttgcaaatcaggttttgtttaggaaagtttgtacagttgtggaatcgattttgtggctgtctctagggttcctatgttctataaatagaacctagagagcaacccatcggttcaactcttctagcttttattttttatttttttttttgcatatttttcttttgtgacgagagagttctttttgtaaaaacctagtggttcaggtagattttagtacttatgtatttttttcttatactggtcttagggtcggtttgaacaacttgattgaacaagagaaaggtcttcgggagaagacttatacgagccttacttcaggaggaagtatgcattcacacttcaaagatgaagggagttcgttgtttgatgatggtttagaaattagtcgtgaagtgaattacaaaggattgcggcaaaggtttagagggagtctaaacttgtttaagtcaa

SEQ ID NO: 142503 - DNA, 617 bp, Cannabis sativa
  modified_base (27)..(31): a, c, t, g, unknown or other
aaaatagattacattgaaatggagttnnnnntagggcataaaacctaacactttatagaaataaagccccatgttggttacaaaacttgtgtgttcttgatcacagacgtgcatcttgatctggttatatccagaatatacgtccataaatatcatcagcttgtgtccagcagttgcatccaccaatggtcgatccttggcagtggaaagcaatcctttggatatgctttgtttaagtctaaaaagtcgatacaagttctccaagtaccatttggcttcaggacaagaatagggttcgatatccacgatggatagaacgcctcgcgtataaagtctttagtcagtaatttgttcacttcctctttgagtgccccttgtctttcaaaatcccagggtcgcctcttttgtctcttagctgggtaatttgggtcaatattcaagtgcagacagataactttagggccaatccctatcatatttgaatggctccaggcgaattggtcctagttttccttcagaaaacttattagctattgctattttaatttttcatccagatttttcccaatgaatacacactttgtgggattttctggatctaaaataacttcctccaa

SEQ ID NO: 142504 - DNA, 670 bp, Cannabis sativa
gggctggtatacattcttattgggccgaatattaagtgaaatgggcaagtcttgtttgactcggctcttgttgctttgaccgaaggtatatatataagagaaggggaggcttgatttgagagagaagagtcttgctctcttgattgaattggttcttcttggtgttgggcttattaacattgggtctgaaataatatagcacaaatactgagttacaataatatcacttttattatggatgcataataaagtgtagaaatttgaaaaataccacttttgcattttgtattgattttgtttcttaaagtgtgttggacaaaaacaaaagttatagtttggtttaaaattccaacagtggtatcagagctaattaatttccgcaaagaaagattaaaattaatacattcaagaagcaagtctgaaagatattaaaaatcaaggacaggaagaatttgatattctagaacacaaggatggcaatcaagaggaggaattagatattggagatttggaggacattctagacctttatctaatttaatttttgagcaaatacaatatgaggagtcttaaaattgatattgataagtttgatggatcaggtgactacagaatatggaggaggaaaataagatctctactggcacaacagaagctgttgagggtcctt

SEQ ID NO: 142505 - DNA, 512 bp, Cannabis sativa
  modified_base (58)..(71): a, c, t, g, unknown or other
caattggactatgattaaaatctgattattggatctatcaacaagttaatcatagcannnnnnnnnnnnnnaataataggtttgttaaaaaatgtttgaataaataatttatatataacaaataataccatgtaaaaaattgtgaagtgagatattaattacttatataattaaattattatttaactaatcaataaattttgaaaatttagggttgttaaaacaacctcaaatatcttttcaaaatttataaattcaaaaatgaataaccaaaaagatattttcaatatcattttctaatcctagaattttataaaattaaaatagcaaaataaactaattataaaatagatatggttaggcaattattattttaagaataaaataataatatgtcaaaatatattcaaattaagcctttttttttctcaaatttcttcaaaaaaatatctatgttatttaaatatttaaaataatttataaatttctaataagtaaaaggatataaaata

SEQ ID NO: 142506 - DNA, 1062 bp, Cannabis sativa
ttttgttctaagatcaaccagtgatattgacttagaaagatacaatggtaagattataatatctttaccaagattaatatcggtcccagtccaatgtctaacatcaaatattttatgtatatttattaaaaaaatatattataagggatattggcggctgaaccacctgaactttacagtttgtaacagttaaccacaaaaaccgaaattttggtggcataactgcccaaaccctggtttcgttttgctctgtacccctccgtccaaaatcacagttaagtgcgacggtggactgtcccgtgtacacatttatacacgtagcgaatttttagtggtccacttaatattaattttaaaaaataattacaaatatttaaaaaaaaataaaaaaaaaaatcagaaaatctttttttcttattctattcttcttcttcttcttcttctttttcaataccctaaaattaattgttattcttacattttttttcttcttccttcttcaaccttatcactgtaacaaccattatcaccttaaccactatatcaccaccattaacaccaccaccacatcaccaccattaacaccaccaccatcacaccacaaccactactaccaccacactaccaatactaccaccattatcaccaccactctatcattaccaccaccattaacatttttcctaattaaaaaaagcacacagatccaaatcgaaaaaatagagaaagtggtgctaatcgtttgggttttaagaactattttaatacataaatactagtactatacaagacttgttagatcttcaaaatccccaatttgcaactttggcgcctctattgcgacgacagagacaccataaaaatatctttcactatgttcttatctcggcgaagacgctatcaacctagtggatatcgaggttaactctttcgtcctcaacgacgagttcaatggcaaccggcttcaacgattgaagggctgagatggggccttttggctcaattcccttttgcatgagagagagagagagagaggtaacatactgttagagattttataac

SEQ ID NO: 142507 - DNA, 1635 bp, Cannabis sativa
  modified_base (421)..(425): a, c, t, g, unknown or other
  modified_base (1402)..(1402): a, c, t, g, unknown or other
aaaaattttgagcacaaagctcaatacaatttatgtacaatcttgcttttcaagtttagcaataaaattcaaaaataaagagaaaaaaaaaagtttgaatatagattcagtaaagttgtgaaaaattaaaatttatgttgttaagatatttttgaaaacagtattaatattctttttcaaattaaaataataatttaaataaacaattttaataaataaaaatcaaattatatttatatttaaatttaaactatataggatatttttcaaatatatataatattatattctttttctcaaactattctaacaactttaagatatatattttcacattatatgtataaatatatttttccttaattttctcattttttaatattttattaaagtataaatttacaaattaatattttactannnnnttaataaattttctataaaaatatgtatcttaaattaattattttttaaaatacacataataataaatataaattaaataaaatacttattcaattatttatacatatatattcataactatatatgtgtgaaatttttttttactttgcagaatataggaaaaatatttttttatagaaaaaatttattatgaattgaataaaaaaaagcaggtgtgagattacgtagaagaagaaacaagtgtgagattatgaatcaatttttttttataatgcattattttatatttcaattatataaaattgatgtcctcatatttctaaacttaacactcaatttatcgttcttttttttttttttgattaatggaacccttggaagcgccagggaacacaaacaacaaaccaggccaaacggcctaccaggaaactaacacagaaagaaacaaagcaggccaaagctaattaaagtctaaacaactaacaagaatctaaactagaagcaaaactaccagtccaactaacaactactatcaaaagggaggatttaagtcatccaatctttgtaagaacaaagcgtaagggaccatcctcaagagacaaatcaagccagccgaaagagttgttttgatttgcccctttcgccaacgaatgggccacaccattgaggtttttgggtatccaagaagcttcccagagattgaaactgctcgaaataccgatgaacttatggaccagctcctggatattaaaattgagcgagttgatgtcttgcaatttagttttcagggcagatattgcattagcacagtcattttggaagattaccttcctgaaaccttgcttggctgcttcttccgctcccttgcatatggtcattgtctctccaaggagcggctcactaacagtcagcctgaaaatatatagtattgaccaaactaataattcttttaaaaaaaataattttaaaaaacaanaattagttaaaataaattcatattattcagaaaaatattatatacatattaaatgaaataaaaattcatttttccatattcttttaaccatattaactttacaaattaacaataattttttttgtaaggagattaacaataaactttggttctcgattcaaatctattttttaattttattttcatatattcaaaattctcattccataaagtttctactaatatttttcaat

SEQ ID NO: 142508 - DNA, 678 bp, Cannabis sativa
  modified_base (75)..(76): a, c, t, g, unknown or other
ttatccatcatcacatattggtgcacttgatactgtatccttctggacagtgccctttcttgaggcaactcgccnntggttatgtattcgatgatgggggtcatccattttggctctagctcaactgttgccacaatatttttggctttgatgcttggttccatgaggtgttcaatgggcaccacccccagtttctcaacctcgctgtctgatgctaacttagccaaacagtctgcatgggtattcttttctctggggattctttccactttataatccgtgaactcatggagtagctcccggacaattgctacatacatggccattttttctccacgcgtttgatattctcctgacacttggtttaccaccaactgcgaatcgttgaagacttctactctcgtggctcccaggactttcactaatctgagccctacaatcagggcttcgtattaagcttcattattggaagccgggaatttgaaatacagagccacctggagtcgaagtccattcgaagatatcatagttatccctgccctggatccatttttgtttgacgctccgtccaagaatactttccatgccggagtttgtggtactggtacatttgggatagcttctgcttcgttgcattttgttatgaagttggctagcgcttgtccttttataaaagtg

SEQ ID NO: 142509 - DNA, 504 bp, Cannabis sativa
aattaaagaaccagctgacctcgtggggagaaggcataccccacttttgggaagcgaagaggacaaagagggcagacagatatttaacgcatttaggagtgaactgggctaggcagaggccgaagaagtctgccacatcctttaaatattgatgcaaaggcaccaacgccccttgctgggcatgagcgcctgaccaagatcacatccccctttcagggtttgtggctcgattattgtgggcgggaatgtagcagtccaactcgcctaagtagccatcttggtcgagagaccgcaggcgcgcctcagtaaccctggacggaggactcacccacctggtgcccaaggcactttacctccgatgagcaactgcagcattaagctcctcaccgacgtagtccacgccttcgatcaggatgtcagcgtcagcatcgactggctccccagcctcattgtattccccgtagtttgggggttcaacctcctcctcttcctccacctcagagg

SEQ ID NO: 142510 - DNA, 582 bp, Cannabis sativa
actcatcagtgatgtaagcataaaactccttcacaattcgatccacatagccatcaaatctgatcaaagtatccacccattgtctttctttcaatatgttataaaccccaaatggcttatcagcaatgacattgaaaattttctcaatagtaaaattcttattctcataaaatttcatgtctctagcattatcattataacaaaaataatgagaatggggcttgaagttttcaagagtaataccagagggcctctttcttttatgaggaagaatagggcttggagaaacaatggatcgttttcctttgtccttctttggaattctagcagggacagcaaccggttctgcactgacaggttcagcttcaggcacttcactttcagacccagaatcatcagtagagggtttttctttgggaaaaaactcttcacttgaatcagacacaccctgtgattctttgatccttttcggtctcttcttcaggttcagaatctgatgatgaaacggaagagggaatttctttgagacttttggcctttgaagatgaggacaccaccttctttcctttggaggctcctttg

SEQ ID NO: 142511 - DNA, 630 bp, Cannabis sativa
agaagcaacaaattgactaacaatttgaacatcatatccaatgtttggacgagtaatagtgagataaactaaactgccaatgatggtgcgatacgaagtacgtaggatcttccaaaggagagccatcaaaaggaaaatattgaacattcaactcagaggaagtgtcaaaaactctagtatcagtaagacgagcatgctcaataatgtcagtaatgtacttagactgagaaagaagataaccttttggagaaaagacaacttcaatacctagaaaatagcatagaaaatccaaatccttcatctcaaactgagaagctaattcatactttaactctctaattccttgtaaatcatctcctctaataatcatatcatcgacatacaaagaaagcagaatacaacctatagatgtaaactttacaaataaagttgaatcatgatcacttgagacaaaataatagtaaagaacttctaaaaccatgctcagggggcctgttgaagaccatggaaggctttttttagcttgcaaacccctccttgcttatgaggaacatcaggaggaggaaccatgtatacctcctcatgtaagtcaccattcagaaagggattcttaacatccatttgagatat

SEQ ID NO: 142512 - DNA, 779 bp, Cannabis sativa
aacctgataaatagcgttcgtggaagcgcaggctgcatatcttttggctgggagttgggtcagatgggaaacgaattggctcgtcagttcggagagcaagggcagggccgatgaagaggttgaaccaatccgtcaggggatccatgttcaggtcccaggcgttcttgaaggcctcctcgcgcaaagaattttgttgagcctcccataagaccttcttcaaggcttccccctgttgtattcatccatggcataattatgtttggcaactcgaatctgctgcctctcctcatcggcgggaaccggagtaaggatgatgctgaggggtacaacgtattcctctgcttcaggaggaaaccctgaatctgggctgacggccggggtgtcctttcttctgggcttcttggaagacttagcctctaccattttgcccttgcgctttcggtcgagcggagccacaatctcgccttcctcctcctcctcggcctccccatcctcgtcgatcaagacgattgtgcctaggggggcactggaagatgacctccccagagtcaccatctaggcaggcgccagaggaagagaagggttcgggctgtaggtttcggcaagagttgccaagagatcctccattggcctggctgcttcaaaaagaaataaacaaagtgttagaatggctataagaaagcatgcacctgaaaaacaaaacaataaagctagtcctaccccgactatctaactcagccttagcaaagtcttgaactacaatgttggcttcatcatcc

SEQ ID NO: 142513 - DNA, 722 bp, Cannabis sativa
cccagacatgggcttggaccaagacccggacccaggacctggacctggattggagactcagacctggacccaggacccagacctagattggggtccaaaacaaaaaattagaacaagaatcgagacctaggactgggacagtgacccaagccccaaccccggtctcggtcccaaacctggacccggacatggacacggacagggacccaagctccgaatcggaccgaatattgggatccagatcttgacccacgacatggggcttggacccaacccctagtgggggtctagatatgggaatcgtaccaagaccagaacctggaaacatttctagactaggaaccaaacccaaactcggatccgagacatgaaatcggaataagaacttgaataaggaccgtggaacaggaattgggcatgggcccaaaatcagatctagccgcagaaccgaatactgactcgaaccaaagacacccgaacccaagcctagacttgcgccaggacctacgacccagatcctgtaacccaggacccattacccgggaccaggtccagaacccaaacctataccagaacccggacccagacccaaacccagaccaagacccggacccagacacggattgaaactttgacccagactcagacccaaaccaagactcgtactcgtactagaacacggactcgaacccgggacccggacctagaccgatatcaggtat

SEQ ID NO: 142514 - DNA, 738 bp, Cannabis sativa
  modified_base (161)..(161): a, c, t, g, unknown or other
  modified_base (218)..(238): a, c, t, g, unknown or other
tcatatgaacgttctagactcagtaccatgtgggacacagtgatagggttacgatcgggtgtatgggcacctggttataacccgggatattttattacgttttttgttattcttttcttattgagtccgtcgactcacagtgctatttccatgtgtaggtnagggcaaggctaaagttgaggaaccgtgaggccaagcagatgaagattgtacatgtnnnnnnnnnnnnnnnnnnnnngtacgatctttgggacattagggctttttctgtatagtcgctaggcgacaaaacttttgtatatgaatagaaaacttttgtaaatgggatcccggaattgtataagtatgttactttatgttttaattaaataagaaaattataattaatcacgtttttcactaatctcattgattaggaacgagctgcacagtacattaaaaatcacgctaacatgcctaaattagttaaggagttacatgttgcatctatggaataggggctttatgttctttgaccagatgaaccatttgcgcttaataacaaactatttaaggtagctaaacctagaaaccacaaaaaacaaaagatcgataatgaagacgaaacatatctatgacacttacgtcttggtcatataggctatgataaacttaataggttaaccaaaggtgatcaattgaaaaatgtcactttaggtgaattaccagtttatgaatcttgcctagaaggcaaaatga

SEQ ID NO: 142515 - DNA, 836 bp, Cannabis sativa
gaatcaccctcaaaacttggtgttttgctggattgaagctaaggaatcaagcactcttgaagctaaggtaaccctagacactcttagctaagttttctcacggttttaattggtttcatgctgtgatttaaagaattagtggctgttagggtttgggatgtttaggattcgaattttagggttcttttgggttggcttcaagttcttccagctggttttagtgtattgtgttggatttatgcaagtttgagctttgagttcaaagctttgatctctaatggcataatttgattcattgagtttttctgtgaaatattgggttgaaaatattgtctatgcattgcttaggtactctgaaaagtttggttgcatttggtggaaaattgagcaaagaatgaaaagtttggggtggactagtgcaaacaggctagccggtttaaccagacctctaaaaccggctagccggttttggcagggaccccaaacgcttcattttctcaattttcatccatttcagtgctgtggttgggtgtttccctatttctagagtttgagtaacctctagggagtatagcagaacctaaggttgtgggttcgggtttcctgggattagggttgtgatcatgtaacttacccggtttcataatgtgattagggcatccatctagcgcgagacttttcgttcaggtcggccaacgcacttgaatttggaaagaaggtaaggactgtgtatgatgtgtgatattaatgtctgagtgtatgtatatgttttgtgtatatgcatgcttaaagtgttagttgcactaccaacacttgtacagttaaggtatagagtg

SEQ ID NO: 142516 - DNA, 1018 bp, Cannabis sativa
aagtatctgaatagttcattcagactgcccatccatttgaggatgaaaggccatactaaacttcaaactagtacccatggcctgctgcaaacccacccagaacttcgatgtgaatttagggtttctatctgaaacaatagactttggtaccccatgaaggcaaacaatttcttttacatacaagtcagcatactgatccaccatatatgttactttcataggcaaaaaatgtgctgactttgtaaagcgatccactatgacccaaactgagtcgtacatccctctggtcctgggtaatccaaccacaaaatccattgcaatgtcttaccacttctattctagaagtgttaacagctgaactagtcctgccggtcgctgttgttctgctttgatttgctggcaggttaagcatctagttacataatccactacatctcttttcattccgtaccaccaatagtagggcttcaaatcttgatacatcttggtggtacccggatgcaatgagtaaggggtagtgtgtgcttcatttagaatttctttcttaagcttaggatcacttgggacacacacccgagtcttaaacaacagcattccattgttcgaaattgagaagtccttagctttggctgctgagacatcttctcgagttttaaccaactcagggtcttctaattgtgctactctgatccttccaacaagtctgactgaagtgtcaggttatgcaattctccaattataaattcaatatttgccctagacatatccaaggctgactgaggagaaatcctttccgtactgaaagtttggttgggccctttccaactcaaggcatctgctacgacatttgctttctcggggtgatacacaattttacagtcatagtctttaaccaattctaaccattgcatttgcctcatgtttagatccttctaagtggaaaagtacttgagacttttgtggtcagtatagatttcacaccgttcaccatataagtagtgtcgccaaatcttcaagg

SEQ ID NO: 142517 - DNA, 683 bp, Cannabis sativa
ctgatagcctagcatatatctattggcatctctatgtaactctatgtacacctcactgatgccctgatatgctaatctgatggctatagatttgccaaacatacatatgttggtatctcggtgcaactctatgtacacctcactaataccctgatatgttattctgacagcaactaacatgtaccctgaacatgtattcataaatgcaaccattttactaatcttacctcgtttccgaattcaactgtgccgaccatcctgagtggaacagctgctcgatgatttataggcccctaaattacattatttggaaaactgataagtgacatgctaaatcacttttcagggacttaaacttgaaaccaaaagtttctctatcgatgaataacatggaaataccctaaatatttcaaaaatgggaaaaactaggttccctaaaatggcccaaccggtagatcggttccctatttggaattctggttctgtggggtttcctggggaccaaccggtcgaccggttcagtgcaggaaaagctcaaaaattcactacaccctcaatttgacctcaaattttactagaccttccagaactacttaatataccgtaatagacatatttcatgcaacaaaataactcaacatgctcagaatcaaaaaccaccattagagagcaaagtttgagtt

SEQ ID NO: 142518 - DNA, 765 bp, Cannabis sativa
gagagtaatgaaataaaaataaatgatgtttcattcatttttattttttttatttattgtattttaatagaatattttttttactattttggggaataattttttcatttgaaaataagaagaaagattatttcaattcaaggtgaagaaatatacatatttttatccatattatattttacattgttatttttcttttgaaaaaaattaaaaaaataaaatatcaactatatttatatggcaggttagactagagtgaacgaaaagaataagataaaaaaaatacatttttaaaattatttttaattaaattataatttagaccaattaaaaaactaacaattaataaatcaattaaaattacgactaacgaacttaagtatcgttgatgctatttttcgaatggtaatgctgcaaatttctcatattattataccctaacacaatatagtataagattatattttgttggatggaaaggagaccatatgatgagaagaaagggtccaaatactccaatgctaatggagtggaaaaggtgcaaaacaaccactttcttctattgttttgtgctttcacttgtattttaactaaactacataaaagcctcactttatatactgaactcgagtattaaccggtggacctacttcttctcttctgttccacaatatgattggaatgaactgaatccaatgtaaagaaaagttgaaagacttgattcttttttctattaacaaacaaaattttaacatatttgataga

SEQ ID NO: 142519 - DNA, 782 bp, Cannabis sativa
aaaaaataattaaaatatttacatcaaaaatacaaaatgcattctttgttactaaaatacccccacacgcttattgttactcttttactcttcaagtttatttaattacacttataccacttgcatacacatttcatgcatcacacttgttgcttacttctcgccacatttctcacgtacccacctacttcttttctatttcccacatacctacctcttttttctcacctatttcttctccattttccaccccctaaaacgaaaatcttaactctccaaaatcccacccacgcctccacatcatcgacctcctctctcgatctccctttcttctcgtctctctcgtccatccatctccacccacccctcctcttgtcggtctccctctcctctctgtcgcatacgtcggaccaccaccacctctcgtcggtgtccctttcatctccgtctcatatgtcggaccaccaccacctcccgtccatctctatctctctctctctctctctccgagctctataaatacatttatttattatatatatttattttattattgaataaatttaacgtgttttaaagttagttgttattgtaataaaattaattagttattttattttaatttaggtaaaattataaaattaatacaggaaaaaaatgagggaaaatgtaaattttttctgccatcaaaaaatttgtatttttttttttttacattcccaatggtttaaaaccgtcacgaaaactgtcgcctattttgcccgttttgcgacagtcgtata

SEQ ID NO: 142520 - DNA, 580 bp, Cannabis sativa
agaacttgcatgtttattcttttgagatgaaatccttgatagtgttcaattggaatatgacttaggcatttgttggatagtttgagcctttaagcctaccataataatgtgtatctatagttaacattttgagcctaaacctgttatgtttttcacccattgatttgaaaaaattgtaaccacactattaaattttcttcaccatgttatccatgatatcataagctacatgattagtttggggagaggagaaacatttagtgtgaggaaatagtgagagggaggaaaacttgtaagattgagaagaaaaaaaattgtgtaattcaatgtcactgaaaaaaaatgaaatatgatgaaaaaaaaacacaataaaaagtaaaaatatgtgttcaaaaaatatgatttcagtgatgttggaaaataatagagatgtcttctatcaatcttggtaaatttgggaacattatggggttttagaaaaagaagagcaaaaagcttgtgggttatgtttgtgtgcttatgatatcttgagccaaaattgtcgtttgcctatccctgaatatctgagccatactaccta

SEQ ID NO: 142521 - DNA, 630 bp, Cannabis sativa
tttcaattttatttgaattagtttcgattttttgaaaaattagaaaaatcttaggggtggtgacaccccacacgcgcgcggacacccgtgtcacacgagatgcatgcgggttcgaacaaggggatgtccgagtattctcggacaggggaaaaaatttgtgtctgatcaggggccgtgcgcgcacggagaggctgcatgcagcctccctgtgtatgatttctcggctaggccttccccatcacgcgtgcggccgcaccaaatccaaaatttttcaatttttttcaaattttcatgtgttttcatggaattaattttgaattttttgtgtagttttgtattttgatttttacttttcaaatttcaaatctaattattagaattaaattaattaatattttttaaattaaaattatgatattagtgaaattttaatttgaaaataggtaaagatctatctttttgcttagtttgttatcttatatttaaaatttaattattttatcttatttttaactttaaggttaaatatttagtattttaaattattcaattttttttaataaaatgaccttatttgaaatttaaaaataagattattttaatcagaaaattttaaattgagataagata

SEQ ID NO: 142522 - DNA, 588 bp, Cannabis sativa
taaaataatttccaacagtagcttacattgataacatgctagagcgattctttatgaatgacatcagaggggtagttatgccttctagacctggtgtgcgactatctaaggaacaatgtctcactgatccccaagagatagaagatatgagaagatttccttatgcttcagcagttggaagtctaatgtatgatatgctatgcactagactagacatttgctatgcggtaggaattatgagcaggtctcagtcaaacccaggaaaggaacattggaaggtcgttaagaatattctaaatatttaaagaggataagggattatgtgttagtctacaaggttgttgttttaaatcttttaggccataccgactcagatttctaggcttgtcttgatgacagaaagtctacttcaaggatggtatttactcttggggtagagcagttacttggagatgtgtcaaggaatctgcaatatctgactctaccatggaggccaaatacatagctaccgttgaggctgctaaagaactattctggctaagaaagttcttcacagaacttggtgttgttcctgttaggttttatgcc

SEQ ID NO: 142523 - DNA, 910 bp, Cannabis sativa
tcccggtctcgtttcgatttggatcctaggtcctggtctgtgttcgtgtccgggtctgggtctaggactgagatcggggtcgggtcttcgattccagtcccagttgggtcccttttctggttctaattttgagtttgggcccccaatctttgtcgggctcctaggtccaagtcttagtcaccaatctcggtccggtcttgggtttgggactgggtccaagtctgtgtctgagttcgggtttatgtcccgagtcgttatctgagttttgattcaggtccgcgtcccgctcgagatctgtttctgggtcttagttagattacggttcttggactcaaacctagacttggactcggacccaggtctggggtatgggtcttggtctaggtcagggtcttggtccgagtccgggtctgggtttgagtttggatatgggtcccagatccaaacactgactacaggttaggtccaagccccgggtccagatttgggtcacggtgtcgggtccctatcttgttccacttcaggtcccaggtctcgctctgagtcctaggtcagggtccgggtctggggtcgggtcgtgggtctcaatcctagttctcatgcccgtgtcccgggtccaagtcccccatcgaagtctgagtcctaggtctcgatctgagtccaggacctagtcggggttcaagtcttggtctgagttcgggtttgggatccgatccttgtctaggtccagatctgggtttgagtctaggtccaggttcgggtccgagtctcgagttttgagttccgatatggctctgggttctcatgcccatgtttaagtccccaatccaggtccgggtcctaggtcccgatttgggtccatgttcgggtttgggtcctagtcccaattttgattttgatttagtgtctg

SEQ ID NO: 142524 - DNA, 749 bp, Cannabis sativa
  modified_base (719)..(723): a, c, t, g, unknown or other
agaagtaaattatatctgagaagagattataaattacttgagtaaacctactattgcatagaatttggtaataggaattgaatcaggttagaccataaaaaatagatacaattgaaatcatatccctattttcacatctattgttaaacctcttatttatttgttttatttatttttgctttgtttatttggtttcaaaatttatctattcgattgtcatataaaaataagaattcaattgattggtacttagctacagtccatgtggaaacgatctcacttacctatgtattacttgttaatacgatacgtatactagcgtgttaaaataccacaataagtttttggcgcagttattggggactgttttagttaatatcaatatagttgaattctattccaatttggtttctttttaattaattttacatgtgttttactaatgtgtttgacctgtaaggtaaattcagatgctataccttgaggattttgtccaacaacacaatgagccattctattttgctaggggagatttaaagagctcggagagagatgttatcctaatatcttaagtgggtgttttacttggttcttttataacggacttgatgatgaaacaagaagctaggttgattatggagcagatgttaccggagagcctttgttaaagagaggtcatgatgtaataaatgttggatttattttaccaggatctagannnnntaccatgtatgtttcattaacatcct

SEQ ID NO: 142525 - DNA, 643 bp, Cannabis sativa
acttagattaaacctaacaaaatcacgtaaaaatatctagagttattatatattttattacttattaatttatgtcgaatatttactactaaaaggctatttaattttggttaacaaaaatctgcgttaacaatgaaattaattagttatgtcataattaaaaagataaagtcaatttaggtctaatgaacttgataaattgaagagcgctcataaatccaagcgcaactctatagaaatcaactacataagatttattattctaatttatctttttattttaattaattacttaattagctataaattaaagctaaaccctagtgatggcctacataaagaaagtgatgtgagaaccctaaagcgaagcaattcactttcagtttcttgtcagaaaaagaaagccctccttttcctcattctagtggccaccttatagcctctctttctctatagttttcattcatatatattgttgaggaatagcccacactatgttatttgatacccagatctctgtggaagatcatgaaaaaaattgaaagagaaaaacggctgaatgcgaaataataaaactagtactgaaacagtttttctgtagctacagaagacaactttataactccagaataaaccaaaaaaa

SEQ ID NO: 142526 - DNA, 759 bp, Cannabis sativa
ttgcagccactgacacttcctgagaggaagtgggaggatgtcactatggatttcgtggttgggttacctagaaccacaagaatgtatgattctatttgggatgtggtagatcaatttacaaaatctacacattttctatcggtgaaaacaacatttacagtgaaccagtatgcagagctatacgtgaaagaaatagtaagattacatggggctccgaagtccattatatcgaatagagatttgaagttcaccttaaaatttttgcagagtctccagcgggccatgggtaccaaactgaagttcaatacatttttccatcctcagattgatacacagtctgaaaggacaatccagatactggaagatatgctacgtgctagtgtgttagactttgaaggctctaagagtaagtacctgccactgatagagttttcctacaacaacagttatcagagtactatagggatggctccctacgagatgttgtatggcatgaagtgcaggtctccaattcactgggatgaaacgggaaaaaggaaatatttaggtctggaattagtgcaacgaactaatgaagctatagaaaagattaaggccagaatgcttgcctctcaaagtaggcaaaagaggtatgcagatccgaagtgtagaaatgtagaatttttaggtaggagatcatgtattcctatgggtgtctccaatgaaggggatcaggcgtttaagaaaaagggcaagttatgccctaggtttacaaggcct

SEQ ID NO: 142527 - DNA, 663 bp, Cannabis sativa
gaatgggacctagttttttttcaaaaacattggcatatagtcggccctgatattgttgctactgtttgtgatttctttgattcaggaatatttccttgtaatctaaatgacacaaacttggtgcttattcctaaaaagaaaactcctaccacaatgagtgatcttcgccctattgctttgtgtaatgtttcttacaaggtgattgcgaaagttcttgcaaaccgtatgaagcttctgattgaccaaattatctcacccactcaaagtactttcattcctgggcgtcttatttcagataatattatgatcgcttttgaagttatgcattatcttaaaagaaaagttcatggaaagaaaggctatatggtgctaaaactcgatatgagtaaagcctatgattgggtcgaatgaggatatttaatggcggtcatgcttcaaatgggattcgatcaaaggtgggtcaatttgattatggcttgcgtttctagtgtgcgctactcaattgttcataacggccatgtcatggggccaattacaccaacctgaggcattcgacaaggcaacccgctctccacctacttattcattatttgtgctgaagggctctctgctcttatttctcagtttgaaagggaacgtttgctccaaggctgccgtgtttgt

SEQ ID NO: 142528 - DNA, 1787 bp, Cannabis sativa
  modified_base (420)..(420): a, c, t, g, unknown or other
tagtttgtgtactagggccacccttaggttgggtcctcctagaacgagtggtccgagtgcttgggccaccctcaggttgggtcgtcctggaacgggtggtccgtttacattgtgagttggaaggcctcctagagctcattggctcttttccaggacggtgaggggtttcttcatgtggtgtgtcaatattctctccattgccagccatgaagaaaattattttttgtatgtaaggagggtttttctgagcttttttcatgaacgctctcaatgaaagcatcaaactattaacgccgattttcattaactatatttgagccaaaatagtgatagatttgcacagaaaataaaagcagaaaaagaaagatatgaacacaaaggtttttacgtagttttgtagttaaaattctgcatagtccncgagtcaatcttattagatttttaatacaactctcaggttgttttttctctctaatgattttttcgttccttttttagtgtaacttgcctctatttataattacatagtaagacagttaattacatagttgagtgatatcttagaataattatcccctgaaatcgtggggtttgattacataccacgtaaaataaatgtggttaatatttaaaaatcacacagctatggtaggtctgcttttaccgagtcaaggtaaacgtatattaaatatgttgtaaactgtaacgttctgagatgtctagctgggaacacggtaacaatagccttggtagtgagctggaacctttcccaagtttttccaaggttgatgatgtaagcctcgtcattcctgcacctgaagatataatgctccatctgaaaatcccagttcttggcaacaaggtggacttcagcagtcaacatcatttgtatgtcagtttctatctaagagagctgactcgacagagctctgaccccataaaggtgtgttggagctgattaatgaaggtaccatgagcgcgccaacctatagcgagatgggtgcctcgctattagttgtttgaatttacccgactgttatacttagtctgtataaggtgtattatacactaagtgtcttaccagtctccatgtcttgtctcctaatgcatagcgaggttgatgcctcgccttgtacatctaaagtcgtatggtttctcattaatgtacgaggcaatagtttgtgtatctttatcttgcataagaccttttagtcagcaagttgtaaatatactctgtcaattccgcattaatgagtcattccattttcaaatataattactgttacattcattgattcgtattctttccaatttgacacgtgtcctcctttgaaatgatagccaaattttgggtataacagttgtatatataatttaaggaatctacatattttaaccactgaaactcaacgtacaaacaacgtgaaaggaacatactcaaaaagcaatgaaattaaacaatgtatttacaactttaaaacaacgaacaatgttattactaaatataagtaatttttcttcatatttacaatctcttcctatcaatcccccaactttattcaaaatcaacataatgtgtgatctcttattattttacatgtcttaatgcaagagataagataagtttttgttttgacatgtaaaattctatttttttacttgttgaacaactagtgtagtgtatactaatttataacaaactttgcaacaacacgaaaataatttgattttatgtaatattttcatgttgcaaaaaaacagaaaaaaaacttcacaataatatgaaa

SEQ ID NO: 142529 - DNA, 509 bp, Cannabis sativa
tgcttaattcacaaaactaaacaaaattcggtgcttgtgaacttcaagttattcatcaattttacttgtgttttggtaagatacagaaattatgcatttggctcttaaacgatattgacagtcagatcgtccaagtttcacttataaagtttctactcttatacatatttcacattgaaattgggtgaacataccacaagcagatcagcttccaccacttcttccaaagttgcatgaaacgcttcaactaactgaagaaatagattgtattttcattagtgacgaagaaaataatcatggaggtagtgaaactgtgaaaggatataatcattgaacttgtttttcaatatacctgcactggcaaatctgatataaatcctactgtatcacttacaagcaccttctttctggaattatattaacatgggaaaatcaataaacgtacattacagacgagctgcaattttttattgaaaatttaaaatgcaattacaaaagtaattctcaaa

SEQ ID NO: 142530 - DNA, 781 bp, Cannabis sativa
ataccgtattgtatttatatgtttatcatgttctatgtgttttgtgctttattattgatgcaaattttatggtatattattctcttcaaagagataatactacataaacacttagaaattaaattcaaatgtttatgaataattgtaaattcttaagcaattattaagattttgtttaataaaaaatcttttgatctgataggggtggaagaagttaagaaacaatatatgcagttcaaaaatcttttacatctattgaactctagattatatttagaactccacaggatctctataacacttaggggtggaagaagttattgatatatgtagttcaagcatttttaactttgaactctagactatactcaatacaccacagtatctctatggcacatatattttgattagacatggatataatataataaacaaacaagcaaactattagaacttattctttattctataagtgttctaattaacatgttactgtagtaatagagattgataccaataaagttcttggacatagtatcacagtaccttatcttagtgggagaattttaaaattctagcccattattatttggatgtcactaatgatagcctactatgttaatactagaatactacgttgatgacttagtctagaagagacttattgtttcagactaagatataatatatcaacaagaggtccctaagaaccaatagtaagaggttaagtgtacacttgtgtacgaatttaaccagactcctactgttgagtgggagtcat

SEQ ID NO: 142531 - DNA, 715 bp, Cannabis sativa
tttggtatatttattatattgtatctcgtactgtaggactgaacatttcgagtaggttcgacccgaagccgagcaacccgcccaaactcgaactggtgaatccgtaatttttttttttaaaaaaaaaatattcgggcggatcgggttcaactcggtacctttcaggcgagttcgtgggttgagttttttagggctactggatttcgggttgaacccgccaacccgcaatttaaatatataatacatatttttattttttattatagtttatatatatatattaaattattaattaaaaattaaaaaaaaccctaaaaaaaatattacatttcagcactcattgaacaccacaaaaacaaatagctattctttcaatatctttaactaaaaaaatgatgatctctcaattcaattaaagcattattattatctacaaaatgtaatttaagagaaattagataagaagctaagtaagcatatgacgaaatcattcaatttttttgttcattcattccaatgacttgagaagcctaaacaatgctaatgtttctctagttctcgagaactcgatacaaaatgcttgaactttgatgaacagatccttaactataaccatacatcataaacaaacaaaattattaccaatctaatcattatatatgtttaatttaataaataaaagaaataaaagaaataattatttgaataaaaaatt

SEQ ID NO: 142532 - DNA, 580 bp, Cannabis sativa
  modified_base (26)..(32): a, c, t, g, unknown or other
ttcccctgggagaaacggaagaggannnnnnnatgaatacttcccagactactaatggtcagccgcccaatccccgtttacgagttttgcttgtgggcccagcggtaggcgagcaaaccttgtccggtaattcatcaagaggagtcatacctgacggctccaaccagactaatggtgccatcccacccgtcaaccaagcgaatcaatcgctacggcaaccaggctcttctgtgttccaaaggttgggagcaacccatgacctaagcaacgatctaaatagaagaaggggaacagacgaacagaatactacaacgatcgtgcagcctggagcccgtaatcaaatccccgctcaaaaagacgctgacataatacaaataaacaaaaatgtcaagcaggttagcccagccgtacaggcctagcttaacgaattgaaaaatatttttcatggcatgactggacaatgtaataatgatctttagttagaccgagcacgaggaactcccttctcactagagatcaatctcctggcactgcctcacaagttcaaaatgccaacgtggaagatgtatactgggagaga

SEQ ID NO: 142533 - DNA, 652 bp, Cannabis sativa
caactcaagatacatctctcataacattacaagctcaaacaacaatttatcatcaacaaactcttcaattcaaacaaccatgcaaccaacaactaacaacatcaaacatacctaaatatcaacatattatacaacatcaaaactcaaaataaagaagtgggaaaaactacctcaagctcttcacaatcctagcaccaccactccaaaaatccaaactttgattcaaggttaaatctcaaagattaaaaagattaaagagatgagaaagggtgagagagaggggtcgggtgggctgcgggaaaatccaaaaaaataaaattttcattttacaaaaatttattttgttgaaaatagagtcaaatggtcaaatgaccaaaatacctctagggccaatacaccacatatgcatacaacaagggaaaaattgtcattttatcacacaccaaacttaaataaattttagattattcaattatttataaaatgccaaaataaaatcccaaaaatatattttgggtcccgaacccggttcgacccaaaatacccggttgtgactatatcgcgctgacttgtcagaaaacacttgcagaggacagaacaagtatactatataattatatagtccataagcacgctataacattaaaattac

SEQ ID NO: 142534 - DNA, 1206 bp, Cannabis sativa
  modified_base (1157)..(1167): a, c, t, g, unknown or other
aggttgagggcttaaccgatgatgcaaaggagggtacatcagagttgcctaaggttctttgacgttcttcttgaacaatcatggaaaaacacgtgagaggttgggaataggctcattgagtaggatctgagcacaaatcgaggcatatgactcgtttaaaccagtgagaaattggaggacctagttttggttatagtagtcaagaaatgccttcatagccccgcaagtgcaggttgtatttggttaaaattccttcaattcatcctatagggatttcagtttagtgaaataggaggtgacggactgatcaccttgatgcaaatgagtcaattgtgtttgcaattgaaagatgcaagggccattggcctcattgaatatttcatcaagatcaaagtacattatgctttgggcgatttcaacagagacagaattaacaagccaagacatgaccatgttattgcaacgagtcaaagagttaagaagattaccagcagctggccgaggcaaggatccatagatgaattgggtcttatttttagcagcaagtcccattgttatgcctattttctaggattggtaatttgtaccattgaggatggaggacaccaagacgaggccaggatgatcgctggagttgaggaagaacggactggaaacatcatcgacagtaccacgatcttgagttgatcgagaagagggatcaacagcaagggaaaagatagaggagtctggacctagctgcgatcaaggtctggttgatcgacgaggagcagtggaaggaggaggaatcagagcagagatgtcttcaggcaaggtctcaaactgatgaggctcagaatttgatgggggaaagccatcttgtgatcttgttgatggtctggccatgaaagaagtatgagatgtgtcttctgataccatgagagaacccgagaaatagaaaaagaaaaatgctttatttcacaaaaataaaatggtacagagtcaagtgcttttataactgtaataatcaagaacctagttggtcaaatataactaaacaatcaattagttaataacagaaataccaaatggtaacagaaatggcagacaagtgaaaagcctataactaactcaactaattacatttaatatagtcatgtaaattatagttatttaannnnnnnnnnnaaattttaagaaattcagaaaagtttaacacgccgaaaa

SEQ ID NO: 142535 - DNA, 745 bp, Cannabis sativa
atgtaattaaaaaaaattataaattgatatattatatgtattatgtacataaatgctacataaataaaatctcataatttttttttttttttttttgcttcaagactccaatattatttacttattatgaaatatacttgcaaaagattcatataggctaataactatataaatataactttaaagctaatacattcttgataattaaatgtaaatgattgttgataatgctatgtgtgtaaaatgttttaatgtatatatcatcaatctttttatatctttattttagaggataaaaataaaatataactaaacaaattgtatgacaaaaaataaataagcttctttaaaataaaataaaataaaagagcttatcggttaacaataaaaaaattatatgatattaataaaagtttgaaactaatagattccttataattaaaatataattttgtataaattttaggattttttttatttttacattttaaagcagtttttttgttttgtatttacacacggagcaacctaaatagcaacacaaaccaaataaaaataaaatttaaaaatagtatatggagtgattcccctaaatattagatagttgtgagttatttgtattgttatttatgatatgttttaaaatattgttgcccctgatttttcccaatatacgtggaccaaccgaataaggacacgtggatcaagcaatgtacaatccaatatttgctaagtctttatgttg

SEQ ID NO: 142536 - DNA, 1738 bp, Cannabis sativa
ttggataggatcctcttgctttggaccaagttgttggcgaagatcaggtttcttccgattcaagtgctctcgtagatccggctgggagtaattactagcagacattgtttcactcatagactgcgtcctactcacggacctcgtcctcgagtgactcgcagatttactggttcccatactttctcgatcattagctcgtcgagtactttctcctcttcgagttgattgactgtgggtccttgaacgccctgaggtcacacttgcttcttcatgctttgttctttccccttcagtgtggtttgtcgtatttcccccattagggtctgacgagtcctctctctatgggttcgcgaagaacactggtaatttctcgcaggtgacctacgttctccaagttgagtccaagatcttcctcattttcatgagcgatttcttgttcatcagtttctggttgcctcccattctcatttctatgagagggttctggctgatcattccgatttttaaggggaatttcattttccctaggttgttcttcctggacattttcctgtctcctggttcgtgagccacgaggtctgcctcgtggtcttctcactccaggttcaggttgattttgagcgttagtctcctgtgctgccctagctgcggctgcatcgcgctctaattcagcattctgtcgttgtgcctccttcaggcggcgtctaaggtggcagttttttgtttcacaagtgctctctcccataggctgagtacctccacgattgggtacctcatcccttattccaggattctgatcattcccacgctgagttctcctcgagcgtgttgttcacgtacaaggaccaacatcagattgggtcctcctagaatgagtggtctgagtgctggggtcacccttaggttgagttctcctagagcgggtggtccgtttagactgtgagtcggaagaccttctgaagcccatgggctctttcccagaacggtgatgggtttcttcgtgtggcgtataaacgttttctgggtttttagccatgaaggagatggtttttcttttaaaaaaaaaaaagagggtttttttctgagctttttttacgaaggctctcaatgaaagcattaaactgttaacacagattttcgttaaccaaaaattgagcctaatagtgataatctcacacagaaaaataaaaacagtaaaggaaaatgtatgaacacaaataatttttcacgtggttttgcagttaaaattctgcatagttcacgagtcaatcttactagatttctgatagcttttcagggcctttttcttatgattttttcgcccctttttaatctaacttgccattatttataatcacatagtaggtaattaattacaaagttgactgtaatctttacaacgtttaccccatgaaacgtggggtttgattacatatcacgtagtataaatgcagttattatttgaatatcacaacgtttaccccctcaagtactatcttgcatagcaaatagaaaagacgcttaaaaataataaaattaaataaaaaataatataatataatttgaaaatgtttataattgtgtatttaaatgttaaaatacaaaaataaccctatatggtagacccaatcccatataaaggcccaaaactaaaagggtaaatggcggcaaaactcccaatactttggttttggtttcactaaacccccacaacctaaatttctgcgggtaaaccccc

SEQ ID NO: 142537 - DNA, 755 bp, Cannabis sativa
tgaagttgatgcaataactaagtttgtagcccaggtagaggcattaacaaagcttgtaactgcacaagccaaacaagctcaagttgtctgcgagctgtgtggagaacctcatactactgacacatgccctatactggactattgaacaacacccaaacacttgtagatgcagcagttggtggggcttttatgagaaaaagtgctaatgaggccataactaattaacattggtcaacagagggaggcccaaccaaaaaggtcgcaggaatgcatgaagttgatgcaataactaagttgatagcccaggtagaggcattaacaaagcttgtaattgcactagcaaaacaagctcaagttgtctgcgagctgtgtggagaacctcatactactaacacttgccctatagatgtagacagtttgtcaatggaacaagcccaagccattggaaacttccagaataattatagtttcaaccaagggggtcgtcggcaaagtttccaaaaacagtttcctaatcagcaataacaagggttctacactcagaaaaattaattgcagcaaagccaacagtttcaccaacaacaagctcatagtagagggtctgattcttagaaagatgcgttaatgcaattcatgatagagattaagtcatccattaaggtcttggagaacaaagtggagcagttggctcctcaaaacactaacagggctcaaggtaacttgcctagcactactgaagtcaatccaaaggagaa

SEQ ID NO: 142538 - DNA, 829 bp, Cannabis sativa
  modified_base (28)..(34): a, c, t, g, unknown or other
  modified_base (754)..(754): a, c, t, g, unknown or other
agtggcttactcgtgtataagagccatnnnnnnntgggtgtaagggcccaatgaaggcttgaagcgggaacattacaacgtcaattaacattcatcgtcttcccaaatcgggagtttagttcataaaacccacattaacatccataatcaaatctagaatagaagttaacataaaaaatcaagagttaagaaagaactagttggtgattgtgctccagatcatcacaatagcttcctctcctccttcactcacttttccgatgttaatctctgatgatttttgtcattaaatgtgagtcctttaattagaaactaggtttgctacctctgaatggcgaaaattgaaaactggccaaaaatctcgtgtttcgcccatggtctcgactacataaagcctagtcgcgaccataggcaaagtgaaaaatccatgctctctgcctggcctcctagtcgcgaccatgggtaagtctggtcgcgactactgaagctaatttgacagcttcaatagatttttctccaaaatgccccgtcttttcaacaattgatacaatttgaactctaatgcctcggggacttgaaacaaggaaaatcaagcgtaaaaccattccaaaaggcaacattaactaagaaaacacttatgaaataaacccgtaacttaggctaaaaatagcctaacaattgtattatttatgttctttaagttgttcgtgaaagctaacttttagttctggtggatacttacatcttgggaacntggtagttcaattgagtgggagctctacccatagatatggaatctatagcatccataagtatttagaagtgaaac

SEQ ID NO: 142539 - DNA, 699 bp, Cannabis sativa
agggttaggacttaagatgtttatatgatcggtttagaaacggtggtgagatactaagagagagagaggttgtgggtcaaacaaatcgagtggtgagaaagtgagatttcagctttgttgagtttgagagtttttggctgctctagattattactttgagttttatttcatccaagaggagttttagatgcgattggaaagtctgtaatcgcacctttcgacagacaccattgtttacgttcgaaaataccgttcttgaaacggacccatacttgaacacatttaagttttttcagagatcaaaggaggttgttataggaccccaataatcagttttaacgtgaagaatcagagctttaaggtctgaaacgaaatttttcatttttgactccattaacaacgctacaccgaagttggagaagacaactccgatctgacgcattggggttattatcttgggtagttcttgattttttttgagtacctaagcactgtggaaagcttcgacgtgaacgttggtgaccgcgttctgggcagttctgaggtgtttttctcacatatttttatagattttgattctttattttattataaggtgtttgataaagtttgataattttctgaatttatttggaattattgtgaattatttagtttatttattaaattaattaggaaaaatacttagattactcagaa

SEQ ID NO: 142540 - DNA, 665 bp, Cannabis sativa
tttgaattaaggcatcattttttgccatgaactccatcgtcaatacctcaaatgagcttggttgagtcatttgatgaggatcttcttctatgttgaaatcttgtaaagcttccaaaatctcatctttggtccttgagtgtaagtgtcataatttggctccaaattattgtagtcgtcctcccaattatgattattatatggacaattacaacaccaattggtgtactccgccatgtcttccaacatctaataggcttcatcgattgatagttggtagaaattggtggtaccatctcctctttctacccattctcatgtgcttggattcagcccattgaggaagaccactaattgacactctttggacagcccgtgatatggaaacctcattagaaatgccttgtatctccaccatgcttcatccaagggctccaagtcgtgttgaacaaaattcataaggacttgtcatgcgacatctcaagtaccttgcaagtgaaaccaaaacaagacaaacaaagcgtaaaatagaaccaaaaataactaaaactaaacaaatgaaaaaaaagaaaaacaaattgatagtaattaagttccacaaacaaaatttcactaaatcaatccccggcaacggcgccaaaaacttgttgtaaaaaattgtatacgca

SEQ ID NO: 142541 - DNA, 1529 bp, Cannabis sativa
ggtaaaataaattccaacaaataccacaatcaaaactgaagggtttcatcaatccctgtcagacaattcactcttcatcaaaataacacctacaattcccctagctgtgttgatctatgtagatgacatcattgtagctagtaacaatgaatcagccataacccatttcaaacagttcttagataaaacattcaaactcaaggacattggctcactacgattcttccttggcatggaaataaggagaaccaaacaaggcatctttgtttcataaaggcctttcaccttgcaattactaactgacacaggctaccttggagccaaaccagcatccattccaatggaacctaacctcaaactcaacaaggataaaggcaaacctttacccgatcctactacctacagaagcctcattggtaaactcatttaccttaccattacaagcctcacatctcctatgttgtcaatcaccttagtcaatttcttacttgtcctcgaatgccccaccttcaagccacacatcgtgtccactgccaaggattgaccaattagtggatgcagctgctagacacgagcttatgtcgttcatggatgcatactctggatataaccagataaaaatgcagtcccagatcaggaacatacaagcttcgtaaccaacatgggactttattactataaagtcatgccatttgggttgaaaaatgatagggcaacatatcaacgacttgtgaatgaaatgtttgcaagacaaattggaagaaacatggaagtctacgtcgatgatatgttggtaaaatcgataaagagtggagatcatactacagacctcgtagagtgctttgagatattaaaaaagtacattatgaagctaaacctgaaaaagtattcctttggagtttcctcaagaaagtttctaagattcatagtcaacgcgaggggcattgaagcaaaccttgagaagatcaaggctttgatagatatgccatcaccaaccaaacttaaggaagttcaagccttaacaggaagaatggcaacacttaacagattcatttcgaagtcaactgataagtgcgtaccatttttcaatgtattgcgaggcaagaaataatttaagtggacaaaagagtgcgaggaggcctttaagagcataaaaaggcgtttgtcgacacctccagttttggacaaaccagtaactggagagacgttactcctctacttggctttctcaaaaaatgtgattagtgttgcaatagtgcgagaagcgggaatgcaccaacaacctgtttactatgttagtaaaaggttactgggggcagaatcaaggtatcccctcttgaaaaactttccttacgcctaatccacgcatctcgcaagttacgaccttacttccaggcacatccgattaaggtgttaactgatcaaaccctgagacaagtttttttaaaactagatgcttctggaagattgataaaatggtcaattgaactggggcagtttgacataacttatcacccacgaacatccat

SEQ ID NO: 142542 - DNA, 1059 bp, Cannabis sativa
aaattaataaacaatataaatgtttatttttgcttatggtagtataaatgtttatttaaggtaattttaacccaaaatagaaaaaaccccataaaaatatatgacagaagttaataaataaaataaaattacatcccttatatataattttgctaataaaaatcctacaattaataccagctttacatcaagttaaaagattatacaagctttccctcaacatgagtagagaaaaaaatggacccattaggcattaggtactacttggtagcagttaacccaaatttaatactaattagtagtgtttttttaataacaattaatagttaaaccaaacgtttagatactaactaatactcttttggataatgattagtagttaaactaaatatttcaataccaattagtagtttttttggatgataattagtatttgggcctagatagtaatactgaggaaaacaggatcacccagcccatttgtacaatgttagtccatatccatttaatgtaatataactagcttcttccctcagcccatttgtattttttgtgaaaattatattaaatatgggattttgtaaaaaaattataaaaatatgatatttataggtttgctacttttctatgacattttttcacatttaaaacttgttatggtatttgatatgtcatatttttataaacctattatccaaacccatattttatgtttttgcttccaacttaattagttttattttttttttagtttattttacatttatattttagagtttctttctatttgaaaaatttacactaaatactaactttttttttttcaaacattacatttataatttgacaaagaaatttttatatttatacttttcttaattttttttttccttttttactgttttttacttattaaagttttaaaaagttttttttttaatttatttatttttatcttttttatatattgtttagtcaattttagctctcttttttcttttcattttttataagtcagttctgactttctttttttttctttttctctctctctctctc

SEQ ID NO: 142543 - DNA, 901 bp, Cannabis sativa
  modified_base (839)..(847): a, c, t, g, unknown or other
acatgttaacataaaccacttcaaaaatctaaattgataactaatcagattgtaatgggttttatttagggcccaaaacccaacaattttaacttcagaaaacatagataaacaccagtagcaacaacaacaaccgattcctcaaaacatgcataatccattattttacaattcaagaaataaaaaaaaaaaagagttgtaaagaggttaccttggcttggatttaacataaggctgctggaatttgcaaggatttgaagaataaaaatcaaaaccctagctgatctagggggttcgaaaatgagagagagaatttgagactgtattgcttcctttccaaattatctgatttttgaataaatgaaataaaactttgttttattaaatatctcagcccatttatttaataaaaatctgaatttattaattaataacaaaccactaaatcaacaaactaatagggcaaaatgaccattttgtccctctcacactaaaagtcataaaatagcacttaggggcattttgggaaattctaaaatccagaatgttcccgacattcccaatgcttaaattattgccttctatactaaaaatactaggatgtgattctaatagccaaacaccgcgttctaatgttgccagacacaaatcatgcaaaattatgaaatttctacatatgacataaaaatgcattctaaattcaaataaatcatcataaataattaattcaatattgataaataattttcataattaaaccataattatctgctaattccaaattaaagctaggcggttttttacaattatccctccttaaaaggatttcgtcctcgaannnnnnnnngaacaactctggatattgagctctcatgtctgattctaactcccaggtggcttc

SEQ ID NO: 142544 - DNA, 606 bp, Cannabis sativa
  modified_base (463)..(463): a, c, t, g, unknown or other
tgcttgacgactttgaagcaagcttgcttggaataattggaaggaaggattttaagcttggaattgaggtattttctagctgaggttatttagaaattattgttgaaatccttgctggttttgtttgttgaaaagtatgttttgaattgtggagtttgtggagttgcatgttcttggtgttgggttttaatcttggtgattttggtaaagaattgcatgatttgagttgttgagcatggattttgattatagggtattttctagtgttgaatcatgtgtttttgagatgttttcatggctggaaattgtttgagttgttggagatgaagctcttgttcaagagcttgatgttgccatgattatgcataaattttatgattcttctacaatctgaattgagggtttattgttggatgttgatgcatagtgatatgttttaaatccctagtgtttgctagcaacnctggtttatgatttggaagttttgattatgaatttgtatgagttcggttgagttttaggttaaaaattcgtgtttgagcttggtggtttctgggtttggaacccagatgtcgcggcatgatttgggcatgccgcggcccgccc

SEQ ID NO: 142545 - DNA, 1017 bp, Cannabis sativa
  modified_base (838)..(842): a, c, t, g, unknown or other
tgaaatgaggtttatttagggcataaaacccaacagacattccaaagacggcttttcagactaggtatgggcattatgaatttctagttatgtcttttggactaaccaatgctctcgcaacttttatggacctgatgaatagggtattcaagaatttcctcgatatttgtgttattgtatttatcgacaacattcttgtgtactctcaatcagaagaggagcatgagcaacatcttcgtatggttctacaacggcttcgagaacacaagttgtatgcaaaattcaagaagtgcaagttttggctatctcaggtgtcctttcttgggcacattattagcaaagacgggatcaaggtggatccagggaagatagagtctgttagggattagccgagaccgaaaatagttacagaagttagaagtttcttgggtctggctagttattattgtcggttcgtagaagggttctctaaaattttaatacccttaactgagcttactaaaaagaatcagcgttttgtgttgacggataagtgtgaagcaagttttcaggagctgaaacaaagattaatcacagctccagtgttagccctaccttctgatacagaaaagttcgtggtttattgtgatgcatccaaacatggtctggggtgtgtactgatgcaggtcgatcgggttattgcctatgcttctcgtcagttgaaggaatatgaacagcgatacccgaatcatgatgtagaacttaccgcggtagtgtttgctttgaagatttggcgacattatctctatagagagaggtgtgaaatttatactaaccataagagcctcaaatatttctnnnnncagaaagacttcaatatgagacagaggcgttagttagagttggttaaggattacgactgtgagatcctttaccatcctaggaaggctaatgcagtggctgatgccctgagcaggaaaggccccaggcaggtaatgttggcttttgtgccctaaataaaaaccatttcaatataat

SEQ ID NO: 142546 - DNA, 702 bp, Cannabis sativa
gagatcaaaactaaacaaccagactctagaaatgaatagaaagctctaacaagcaagagagatcaatctagtacttctatcaaaataactattatttgcttgaatgattgaaaattttcctacaataataacaaaataaagaatgagttcttacaaaatatcttgtaacatcaagtaaactaactataagaaaccatcataagataagcaaagcaaaataaaaaaacttatctcatgtaagaaactccaaaagtgaccttgaaaacctccataaatagtcaccaagtaaaacaaataaaacaaaacaaaaaaataccatactataacgtaacatacacaaacataaaaaaaccaaataaacttaaattactattaattaataaatttaaataattaaccaacatatactataaataattaatttcacagtaatactaacttttataaaatttaaaattcgtattaacaccgtataaaaataactaactttaagatttgaaaaaagattctcaaaaatcaaaataagttaaaaggaaaaagaaaaaaaaaaccaataaaaataatagttattgtaattacaatctagtttcttacttgattatttttaagaaaatataaaaagttaaaataaactactaaatgataaattagattaaaaactttactatgaaaaactagagaaaacttagctaataatttttt

SEQ ID NO: 142547 - DNA, 1241 bp, Cannabis sativa
ggtttcttgagtatagctaattggaacaaagctgctttaatcaagaacatctggtcaattgcaacaataaaagacagcctgtgggtcaaatgggtccatagtgtctacatcaaaaatgaaaattgatggggatacaaagcccctctccaaagcagctggtattggaggaagttagttgagctcaagaatgagctcaaaaaccaaatagatcctgctatctttatcaataataaatatatgattgctgtaggttacaaagtgtacaatcaggctgatattcattaccattggagcaaacatgcttggaatagactcagtattcccaagcattgttttttggtgtggattgctttgctgaatagacttcaaacaaaggatagattgctcaaataccatattgtatcagatgatagatgtttgttctatcatgggaattctgcaactgttgagcacttgttctttgactgttccttttcacaggaatgcatacatcttttagagcagtggtttggctggaagatggccctcactccattatgggggctgcttcagagattggacagagttaagggatacaaatttcgaaagagagtgattaaggctggtatagcagcattggtgtacaatatttggctgaccagaaatgatgtattgtggaatgagggggctgctagtgtccaaaacatttttcagcaaacaaaggggcaagttaagaatataatttcttttgttatgcaaaagaatttaaagaaagaagaagttgaatggtttgagaagttataaataatagtggaaattgtatagaatcatatgacatctcttgatggtcattagttgtagaaattgtttgtgtgaaatgaaagtctgattcatcaaaaaaaaaatctcatttttcttctttagatcatgcataatatggtaagttctctacttgttccttgtaagaattatatggtgatttttttttggattaatgtgttaattattttttgtatatctctatttcgatgtaggttattgaatttgagtttgataatatatctccttttttaattatttctatggatgaagaattatatgatgagttttctgtagatttattaattgttttgttttgatctctctacttagcattagttgttttctccttaattcttctattttttagttgttaaattttaaattgtatatgttttttttatttaaatatatttaagttataaaatgaaatttttacacca

SEQ ID NO: 142548 - DNA, 1200 bp, Cannabis sativa
  modified_base (70)..(74): a, c, t, g, unknown or other
  modified_base (347)..(366): a, c, t, g, unknown or other
atcttttctgggcgttattgctttcccctgcgatatgtggccctcccaaaataaccaggatgtcctctcnnnnnacaggaagaggttgtaacccctggttgtttgaattattgggcagacttggctggttatatccatgaccctgtcttttcacgtactatttgaaatggcctcaagcgatgagactctcaatctcatctttcaattggcaacgttcgtcggtcgtatgctcaatatcctcataaaatttacaatacctgttaggatctcttttgctcctcgcattccgcgtgggctcgggcttggcgaaggcaaccttttgctcatgtgtgaggtaaatattctcnnnnnnnnnnnnnnnnnnnntataaatagtatacactggcatgtacttatcgtgcttcttctatttctttttatccttcgacggttctttagaaccgtcctttctctttgaaccagaagcccccgagttatcaattctcgtggaaacagtagttgttgaaatgttgctgggttttcttcctgagcttgttttaaacaaattcatttcctttcaggcttcttccttttgaaggaatacctgggccctttcgttgaactcagtgatgtttcttactggacaaccttgtaagtcatcccatagtttgcctccgcaattgatgaatcaatagagatccccgtttagagggctgtaagttgtgtgctgttatccaaattcctaaccctagctgcaaccgtgctaaaacgactcaagtaatccttaagtgtctctctcggctactgttttatattggttagcgaccccgcttcgggtcgtctatccatggtagcctggaactatttcttgaaatccctggacaactgctcctaggaagttattgaatggtgagtaaacttcttaaaccagctgctcgctgctccaataagcgaggtggggaacaaaatacagcgtaaattgttcatcacattacttgctcacattattgtattaaagttattcaaatgcacgactaaattagtggttttgtcatatgacgagacatgcaggtttttgaatcttgaaggaaaaggggtactcatgatatctggatgatacggctcaagctcgtcgtctgagtcgtatcctgattgtctccctagttcccccacttgatatctcctgaacttgtcctccagctcatttatccgcaattggat

SEQ ID NO: 142549 - DNA, 950 bp, Cannabis sativa
  modified_base (125)..(141): a, c, t, g, unknown or other
  modified_base (195)..(206): a, c, t, g, unknown or other
  modified_base (275)..(276): a, c, t, g, unknown or other
  modified_base (303)..(307): a, c, t, g, unknown or other
ttcacccctcaacgtattacccctcaacgtattttatcaacgtattttatccttaaaatacttagcttcctataaatgatatttcagttagctagtatactcattgaaacaagagctcttccatnnnnnnnnnnnnnnnnnagctcgaaggaaatcatcatttcacttctatatctagatagaagctatagattnnnnnnnnnnnnttagcgctcccacttaattgtactatcatgttcttaaaatatatatatcaccctgaccaaaaagtaggnntaattaacaaatcaaagaacatgaatnnnnntcctgagattgaacctaagcatgtgaggattaagatattttgatctacgatcaaccagtgatattgacttagaaagataaaatagtaagattatatatctttaccaagttcaatattggtcccagtccaatgtatactccatacatctgaaactagtacactttgccaatgttctggaaagaagataacacttatccaaggtataagtatactttatcgctgattatcacattagtgtagatccagtacacttatgaatcagggacattgtcttttgaagcatataatcataatcaggttccactgtgttgatattactataattgtgaataattatatgttctggacttaacagattttgtgcaaattaaaccatgaacatgaaaactacatgtaaacataaatgatttcgaatcttctattgataacaaataagattagattgaaatgtgttttatttagggcataaaatcccaacaataacatgttcatcacactataataacattaatgccattcttatatgactgtgcgacacagaccttcatgttatgctcacatgcctatttatgcctacgtaatgtaggcctacgtgttgcgctcacacgtctaaatataattaggccttagaatggttcatctc

SEQ ID NO: 142550 - DNA, 828 bp, Cannabis sativa
  modified_base (548)..(564): a, c, t, g, unknown or other
atagagctataaataatgggtaaagactctgttattattttaaacgtgacacatataagatttaaattcttaattattgggtgttgacaaaaacatgtagtattatttttttctaatgatattctttaataaattaaaacagaatttattctgacgaaattggaagaaaattacagtttcacaaacattgagtacttatacctctaaaaatgaacattaaatttatgttgcttacaaacttaaaattttgtgtacttatgtcgctatttaccatatttaataataacaactaaaaactcaaatgttgaaaaataccataatgctcccttttattcgaaattaaatagctagcttagataggtaccagattttaaaacaaaagttacatactaaaaaaaaggtgcatctaatgcacctcctaggaggggtccatcgatacactttatatttatatttcagcatttagaaaatttttttatttgttaattttttttatagttgtctatgttatagttatttaagatatcttacaaaattttgagaaattnnnnnnnnnnnnnnnnntaaaaaataatgttcaaatagtctattttacacgagtataatataaaaaaaagtaagtaaaaaaaaattgaaataaaagactcatgaatacagaaataaacagaattacattttttaaatttacttaaactagtttttttttttgacgtggtgaacaaagtcacacttgattaacaattcagcacaccacaatcggcggtgaagcccctcgaacaaggatagctcattgtctaaccgaaaggcatgttttgtcaaaccatgagc

SEQ ID NO: 142551 - DNA, 874 bp, Cannabis sativa
aatgcttcgtatctctttgtgatatccggactccattttgggagttccacatatcgttggaaagctcgttctgacctatatatgattcttttgaattagaatgccaattttataattctgtgaaaatgaatttacggattagccatttttgtgaatatcagaaattgtgactaggattaccgacacttggtcagaagcacccggggatttggaatctccatatttttgggacatcaagtaagatagtagttagcacatagagttatgcatgatggcacttatattgaatatgatatttgtgattaagaaccggattagggttattacactgaagtgagtggttttatggtctagggttattaccctagtaactgttaaagtttaaatgctatgccatgctatatgtaattgagaataataattatgcgttcaaggcataatttggttgaacttggtcactagaaccgagatgaactgttataaggccttattgtaattagacgtgtgagcgtaacacgtaggtctatgcctcatagacattgatatgcgcatgaacgtagcatgcaggtctatgctaaatagacaataaatgtaatggcatgattacaatgtatgtgaaatgtataattatgatcactgatatttatattgtcttgctgggcttggctgaccggtgctctactgtgcaagaaagggtaaatctgccactaatcagccatgagtgcgagggcttggcgatgcttgtacatgttcgggtcacactacaccaagcgggctgggatctaccagtgacatattttgtaatcctaattttttcgcttaggtcgacatgtaaaacagacttgtgatattttgtgaaaatatttacgggatc

SEQ ID NO: 142552 - DNA, 575 bp, Cannabis sativa
aatttaaactagattatttctaaagattattaatattttaatatcaaaataagatcattcaaattttaataataaaataagtaatatctgatcttataattaaaataaaataatcaaaaaattcaaattaaccataaggctatttttgtgaaaaaatcaaattttcaaactcaaaggctactaatcttctattgataacaaatcagattgcattgaaatgggttatattccagccatcctgcatcctacagatgcatggccggccaaaacttggcctggcaggactttggtgtacaacattacatggggacaggaagctagactgcgaattgggccttaacaacccacaaaaaatatagggaaaatatatattttttaagggaccttttagtcatttatattttactaatttaatatgtaaatatctacttattttactttattaaagtgtttaagctctcttatctaaagggccttaactaaaccctaaagccctatgctatctaagtcattaagtgctaagtctgaactttaagcctgaactctctctctccctcggtatcaatacaactaaa

SEQ ID NO: 142553 - DNA, 724 bp, Cannabis sativa
tggaaagaggccccctccggacggatgtcaacaggaaagccttagaaggatttcctggacaaaagtcgggtacaaaaatcttacagatggtgacattacacataagcgaaaaaaggaaaagaaaggggaagggtaagaatcaagaaagacaaaagtcttctctgtgcccttgaaggtcatctcgtaaagagcagataggcctttggaaaatacaatgtgcaaaataaaagtgacccaaacactagagaagagaaatctaaacttgttacgcaaaaactcaaggcgaaaaattcccagaaacttcaaacattaaacccagaaaaacagatgaacagtaaagcatgccatgaacacaagcaataaagcaagggatgcgaaaaatttacataaaatgttagaactgggagttgttgttgatcgacgaagaaatgttgactgacagtaacgaatgagggttaataagaaacctatggtgtttgaaagttgtctggtttgagggttttctttctctctggaaaacttcaggaaatttggtgaaaggatgaaagtaaccaaatgaaggaatgatggtggcttttataggtcaagctgcatgtggaacaggcgcaatcacttaccaatcgaacggctcgagaggcgcacgattcgaattcccaagatccaacgactagattgatttgtaattaaggcggtggaaacgtttgagtatccgtctgacacccat

SEQ ID NO: 142554 - DNA, 1275 bp, Cannabis sativa
ttcaatgaatataaaatattcaaaatcaattatttattttattttcttaaatagaaaatcattttttttaaataaaaaatttatttccataaataaaatattcttttattttaaattttttaaaaaaaaaaaagccaaaaggataaaaatattatagccaaatattttggagttattaatttttttttaaaaaaaatgtcattttttaatatctcatttttttgttttcaattttgtttaaaaaatgccaaaagcacaaaaaaaaaaaaaaaaggcaaaaggcccgaaaaaaaaagagttattatttttttgaaaaaataacataaaaaaataagagaattatagagaaaataaataaaaatatatgttttatattaattaatatttataaaacaataaaaaaaaatttgaaaaaaatgagagaataaaggagataacaaataatactaattatataaggtgccacgtcaccgcctcatatttattctttatatatatatatatgtatagatagattgatagattttaaatttataaaaaaatattaattaatgatatttaatattacttaaaaatgtgaaaaattgagaaaaagaatagagtaaaatgaagtcattttagagcgccacatcaccgcttcatatctctcatttatatataaatatatagatttgttttataattatgtttatttgttatataatttattttgtcaaattatctgttatataattaaaataacaataatttaagttgaatttaaattttagtataaatattacaaaaatttaatatttaatttgtgattatttcattaaagatatgatttctctaatttgttaatttttttatttatttttaataataaagtacataagtgaaaaattcaaattcatgtatatgcagaacaaatacaaatacaaaaggtgatttgtcatcataacaatacataaattttttaaaattataaaagtgattatccaaataatttattagagttcaaaaaaaagttcattagagatttacatatctaaagtcattgaccctagatcaagagcaagagcctctttctatagccttctgctcctatcacaatgcacactcatcaaaaattataataaacaaaaataaaaaaaaaaagcatatcacaaaaattaaaattatctctcttaattggtaatataaaactaatagtaattaagtctataaacaaaaaattatctactaataaaactttaaagatgtgtatccaagtcaataaaatcaaactaacat

SEQ ID NO: 142555 - DNA, 740 bp, Cannabis sativa
tattaaattagaattaataattaggttgattttattctagatacttaattatttctattttaatgaatttaattaaatagaaaactatctttaagtagaaaattttttaattttagataaatttaaattagaataattgtcaaaatatattttattttattttgagaatcatttcccacacaaatttcgaaatacatttatttaatgtagatatttcgaaatgttttatttttgaaaattagattaagttgaaaattaatttattaattaattttagatcaatttaaatcaagtaatttttaataatgatttatttataatacatagactaaaatatattatattttaattagaaaaatagtaattagtttatgaattatctagatagatattttttaggtagccttttggtatttttctagatatatttaattaaataaaaaaattaatatttaagtagatttgttctaaacacttaaatatttgatatttttcataaggatttaattaaataagaaaattatatttatgtttagatcaacataaattagaataattttttcagttttattttattttattttaatagatttttgaaaatgtattattttaatatattaaatttaaaattttgtcttatatatttgtggaaaattaaatttgagttgaaaattaattatttaattaattgtggaccaacttgaattaagtaattttcataatatttattagaaaattaa

SEQ ID NO: 142556 - DNA, 731 bp, Cannabis sativa
ttttatacccatgataatggtttcttagatcagagaaagatttgatccaatggacatgattcgaaccggaagtgggaaagatggtcatttaattctgatgtacctcgaaactacacaactgccacaatcagagggaatgtgtcttttcaaaaaaaaaaaaggaatgtgacagaaataccctttgtaatcattaaaaagctctttttaaggggaaattattatacccaaaatttggtaagcacatcagaggaagatacgtgtcgagctgagaagaacgaagaactcaaacacgcaaacgaaaagtatacttagcatggaacaactcgttggaaatataatttgcatggtatgtttataactcgactggctgaatagccttctgcgagataaaaatatatgaactgctaacttatgtattgacgaggaaccatgtgggcgcacacgttcatgacgaggtctcaacctcgctgcatgaaagagaaagcgacaacactaaaaacacttagcgtatattatatgatatacaaactgagtatagatagtaggacaagtcaagataacagacagcgaggcgtttatctcgctagaagatggtatgcatgcgagggagatcatctcaactccagaaggtataattatcagagttaaaataatattagtcttgagaagccaaaatgacaagcaactgctcgctatcaaagttatcttggctccattctcagcgaggcatc

SEQ ID NO: 142557 - DNA, 591 bp, Cannabis sativa
ccataataactatctctcattaaaaaccttgttgccagccagaaaacctaataggataaaaactcggccaaggaaaaaagagtgtagtatgaattgactccgtcttatttaggtattcgtggagctcttttaatcgacgaagtctaatcttgtatgtcgtcttctcaaatgttgatgttcgtaataattgtgaatatgtgtgcatatttgttgcttgattaaatctattaaacatcagttgatatcaccactctcttgaagatcatctgtaaagaagaatttagttaaatgggttttatctccttcaatttacattcctttagcgatgcaagcaattatccttcatatagaactgttggtacttctttatggtgtaattcatatgtactcaactaatgatctcagttacacacattatctacttgcttcatgaagtataagtatgttagcattatttaaagttgtctcgttaaaaaccttgtcagaaaaactcggtgggataaaacctgagctaagaaaaaaatagtgtaatatatattcataattatttgcaagttgtctcgttaaaaaccttgccagaaaaacccagtg

SEQ ID NO: 142558 - DNA, 1159 bp, Cannabis sativa
ataaaagaggacaatgtaaaaagggtataaggtgtaatttcatctttattcttcaagaatgctatattttaagtatttgctttgggtaacatcttcactattttttatttttttttttcacaaatgttattttttatttaaatacaaaaaaatattaaatccaaacaagatattttcaacctaaaatacattacaaaaatttcaataaaaatatttatttgaaaatttgattaatttataattcttttaataaaaataatatatttttttaacttttttttttttaaaaaaaaaattcttattataccataaatattaattattatttatatagaaagataaaattaatcttaaaataaaaaataatattttttttaattaaaaaataaataattttaattttacaaaaatataatttaaaatttaattaactttatacttttatatatgtaatattttaatatttaacaaaataattttcttttcaaatgcaaacaatttctctccttgcgagaggaagagttttgactcttaataatcatgcttcaagcaaagtttcaatgtaaaatgtatatagcagtaataagtatgtcttctctttttccttatatgtcaagcttcattttttaaaaaatcatatcatttttaatgcatttgtgaatgggttatttgttccttttagattcaatattcctgaatcataagtgattataagtgattcttttagttctattttttggattgtttttttttttttttttcatttttggtggctttaattttttgatcaattcctttttttaagatgagatagttgttagaagattttttttttttattgttctaacgccatattagaattgtaagttgcatacattttatctcaaaattaattagcaataagagaagtaactcatggatcttatatattttattatcttttcacatattagtaatgtaacactctctaacataaccttataatttttataatactaggtgaggctggcacgtgcatttgcacgtgcctagctcttttgctccattttatttatattttttttttgttttatatttattttcataaataattgtatgaaaaatttctataatttaatttttatatcttaattataatgcatattaaaaaatatatttt

SEQ ID NO: 142559 - DNA, 1617 bp, Cannabis sativa
  modified_base (1566)..(1589): a, c, t, g, unknown or other
aaaaaaaaaaaaaaaaaactaagcctcctggttaggagacttagaagtaacatcctcggcttcaactgagccctccgcgtctttagcttccatttcttactcgaattctttagcttttatggcctcatcttcttcctctatcttttcaaaggtcttgatgcttttctcgacatgaggctctaagaaagatgtgttcatcgtcttattattttaacgtaccctataaagagataatcgaaccatctcatttagccttctctaggcatcctcctcgtgatcgtcaagagctttcttcttttccgcatccattgcaattaaagccttttctagttttgaaattgtggtatcattttgctcaagttcaggaactatcttgtctttgtaatattaaaggtgagaaatttccttttgaaagagggaaattctctctacgacagagtcctgcttgacagttaaggggttcttttgttcctcattatcttgcagaacccaatttatgcgatcgagtggaatgttgattatacaaagagaagctcttatgagccataacagagatctgtttttgagaaagagaaacaataaagttagcgattcttacacttagaatggcaacaaaaacaactcgcaaaataaagaaccttaccatgcacatcaagctctcgcttctgtccattagttcaaatatattactgtgattgagcatatggcaatcatctttctctaaactatgaaagaagcgagcttgcttggtgagatgctcagatacaagcttggcctctacaaccccaactaagtggtttggaggaaggctaggatcgaaaaggtggacttcagggttatcagcgttgaaagtaattgctttagcaggattgagtgcttcgttccctttctcggttctctccaaagaagcatccacgttgaatgctagttgttggctagaatctgttatggtttctgaagtcgagggattcacctggatattggagatagtcttagcgggagggtcaattttattctttttcgaagtagcagttgttttcgaggaaccctttccatcatctttgtttcatctccttcccgtttttataggtaggctcaaactttggagaagatctgtgaagttattaaccatctctacacaaccgagaaagcaaaataagtaaagttagcgataagattgactaggcacaaaaatattaagacaaaaagtcccacctaaattactatctgaaatgttagttgagggagaatcatatcgactcgattatatttatactccctcaagcaagtgatttcatgaatgtctaagctattaattgggaatagttcccaaattgatgcccaatagttgttcgagttgtattggtctggaatatcataatacaagttgttaccagtgacctggacatgataatgggggtaccaattatcaaacctatgggcgatcgatgagatctacgtaattccaaatataaaaattatattgactgtcactgaatttgacaagacacgtttaatcagccttaaggacaatagactatgttgaacttggattagatatgatannnnnnnnnnnnnnnnnnnnnnnntcaatatcacctagttgattctagatca

SEQ ID NO: 142560 - DNA, 2307 bp, Cannabis sativa
  modified_base (96)..(105): a, c, t, g, unknown or other
  modified_base (497)..(498): a, c, t, g, unknown or other
gagagagagagagagaggggttgtgcaccatgagaggggggttgagtgctagggtttgctaggatttttttgttaagaagaagaagaagaagaagnnnnnnnnnngaaaaaggaaaaagaaaaaaaaataaagaaaaaataaagaaaagaaaaaggaaacagaaaaaaaaaaagaaaaaaaaaatattttttttataatttatttattttttataatatttataattattttttaaaagtaatattacgtggaccactaaaaacttgtcacgtgtacaagtatgtacatgggaacagtccaccgtggcacttaactgtaatttttggacggaggtgtgcaaagcaaaacggaaccaaggtttaggtagttatgccgccaaaattttagtttttgtggttaactgttacaaaccataaagtttaggtgatttagccgtcaatatccctaacaaaaaatatgtatcttacaatagaaatatatatatataataacaacnnataaaaataaaaatatataggatgttaataaaattatatatcatgtcacaaaagtacaataaaaaataaaatttaaatgttatttaaaaatataatataccgtataacaaaaaatacatatatcattcaccaaaatatatcctaacgtgtataatatactaaccaaattatataaaataattaatatatatatatatactatgacaataaaattatataccaccattgtatataataaaatagaaactaattaaatattatttagaataaataatatattatacaattaaaatacataaaaataataattaatatatgtagcatgccaaaattatatacatacattaaaatttttgtattatactaacaaaattactataccactattatacgtagcaacataaataaaatatcatctaagaataataatataccattcaaaaaaaacagaaatatattgtacagcaatccacaacaactcataaaaaattaaaaaaagctacataactttcaaataatttttttaataaaactaatatagatataccataagtaatttgcttttaattctaaaaaagataggaaaaaaatagtatttttttatgtgacaaaagataatataaataataaatagtctaaaagtcatttctctacaagttttgaaatgagaatatttactaatatagtcttataatttgggatcatttcttataatttccttataatatatcataattttaatcttaaatattgtattatttaataaataatagagtaatttacggcaaaatcccctcaactatcaatttacttgcaaaaaactatccagcttcatattttggttggaaaatcctccaaattaagtactgtttcgtttacatttttaaggtgtcgtctgtccagcctcgttaagtcataattttgcccatgtggtaatgacaggtcaataaaaaattatcttacgtgaccatattttacaaaataaaaattaaaatgagtaattaaaataaaaataaaaattttaagagtaatttgcggtaaaacccccccaactatcaatttacttgcaaaaagccatccaaccttaaagttttttgaatattaaaaacccaaccagaccaataaatttctcaaaccaaaccaaaccaaaccattaagaatggttggtttggttcgaaaccacggtttaagtagaatttataattattcatattgttttaagtaattgtactatttttattaagtaattttcaaaaaactatccaacatcatattttggttggaaaatcctccaaagtactgttccgtttacattttaaggtgtcgtctgtccagccttgttaagttataattttgcccacgtggtaatgtcaggtcaataaaaaattatcttccgtgactatattttacaaaatgataattaaaatgagtaattaaaataaaaataaaatttttaagagtaatttgcggtaaaactccccaaactatcaatttacttgcaaaaaaccatctaactttaaaattttttgaataaaaaaccaaaccagaccaataaatttctcaaaccaaaccattaagaactgttggtttggttcgaaaccacggtttaagtggaatttataattattcatattttttaagtatttattaagtaatttgcggtaacccccaactatcaatttacttgcaaaaaaccatccaaaccttaaaggttttagatggtgttttgcaagtaaattgatagttggggggttttgccgcaaattactcttaaagcttttatttttattttaatttttattttgtaaa

SEQ ID NO: 142561 - DNA, 517 bp, Cannabis sativa
  modified_base (65)..(67): a, c, t, g, unknown or other
agtactcctggtcggcatagttgcctgatttaatgttcgatatcccgaccaaacactcatcttgnnngttgtcttttgtagatgaaccaaggtgagtattgggaaagcgaacaccaaatcgaccaggatctgcttcaactcttgcacgaggatcatcctcatcttcgttgtagtccaacctcttcgagtgacagacattttagcttaagtcctccgtccagtcataggatgatggctcgtacaaaaaagataatgcatacaatcgatgcatctgcccctcaagtggcctggcatgccaccttacccagtgccgaacaagatccgtccatcaaggaggaggagggtcatgaaggggacccagagatccaggagattgaggaacaggacgatgttcatcctaccagtccttccaaggtggaggaagaggaggaggttgcaccaccaaactttgggggatacaatgaggctggggagccagtcgatgcggatggcgatgttctggttgagggcgtggact

SEQ ID NO: 142562 - DNA, 1015 bp, Cannabis sativa
  modified_base (334)..(364): a, c, t, g, unknown or other
  modified_base (891)..(898): a, c, t, g, unknown or other
tgtagtatgtagtattctctcggtaataggatctgacaagttgtattcaatacaccctttctccaccattacatatccttaattacaaaatccttgatatcgtgaaagtcctcttatatgtctactcctttaggaatattgaattctttaattttggcaactacttttgtgttagtcaggaagtaacactagttgttaataaatatttggtacaatgccaaaaaactgtataaaaatttccataggctgaataagtatctttcctgcaactttaacattcagtctcagtggtagagttagagattttgtatcggtttttacacttctccaaaannnnnnnnnnnnnnnnnnnnnnnnnnnnnnntcatcagtagactttctagcattaacacgagtctagaaacctaatttggtgtagtctaagagtattaaaatatcacccttatcgactgacatatagttcctctccttgatcttaagattcacttaattgtttccaatattcctttcctggattaatctgatacttactcattactaccactcaacaacaggtttctggtctaatgcattgcaaagcatacctaagacctcccactattgatcctaaggaattctttccttggcctttatcttttctagaatagttgaaactgtccctttgataaataaaacctaagtctagaagtcgaaaagctttttattgatttagccattagaaaaattctttagcatcttactaaagtaagttgctcgcagtagagtaattaaatcaccatgcataccacaagccacaggtttagataaactcaaatctataatactaggatcggattaatctaggaaaggaacattagaagacaattaagtaaatcttaagatcaagaagannnnnnnnatgttagtcgataagggtggtattcaatactcatagactacaccaatattgatttggagaagtgtaaaaacctatctgaagtctctaagtctgccagagagactgaatgttaaagtt

SEQ ID NO: 142563 - DNA, 764 bp, Cannabis sativa
aatagagaatctgtctcgactgtaagttacctattcttgctcaatcaataaagaggatttcggtggtgttctaaaactcgagtagagccatagatcacatcgatatatcgggtttgaactagtttatatcttggtgttgatttctttgttttatgcatttattgtttctagtttttccatactctattcatccccatttttatttcgattattgttcttgatttgttaatcttgtcattgtcaattgtttgattgtttaaagtttagttaatttgattctgcactgttagtcgtaattttcccataaatcatagcttggtaatcgatcaagaacgcagaattaagattctttctgctgctattcttgaagaaaactttgaatatcatcaatggcaagatttgaattggagaagtttgatggaactttgaactttgcactatggagagaaagtctaaaaggaattctagtgcaccagaaagtctccaaaggttcttggagatgagaagttattggcagaaaagaaactagaggaaaaagtaaaaatggaggagatggcgtactacaaggtcatcatgtatctatcaaacattattcgaagaaaactcattacagagaagacgacaaaaggagtttggaacaagttggaagaactgtacttaaaaccatcaatatctagaaggatcaatttgctagaaaggttatacggttttagaatgatttcttccctttctttagatgagaatattgatagatttaatgagat

SEQ ID NO: 142564 - DNA, 708 bp, Cannabis sativa
gtctcttattgttgggacaggaatggaacaggaaagttgggacgggtgatttttattcaaactctataatctatatctttatttttgttatgatttaactctcttacttgaaaaattatggctatacttgctgtactcgataatcgttttgttctatagtccttccgtctattttaatctattaagtgctaaagtagactgcttattttcattagtccacttaatgttaataatttatatattacaaagattatttaaaatatttaaaatctaaaattatcattgcattgagtatataccaaatttatgaaaaaagaaaaattataaaagactttcataaaattataaatttaaaacaaaatgaatagaattttgtaatacatgcaaataaagaataaagaaacttttaaaaaaagaacaaatgtcaattcccaatgcaatgataattattgtttttttttactaacagtttttaaactaacggaagaattatagttaacatgtaataaataaaatggacagatgttagtctcttattgttgggacaggaatagaataagatgttagtctcttattgttgggataggaattgaatagggaagttgggacatgtgatttttatgttagaaataatagagagattacaatggaagaataaaataagatgaataaaagactaagacaattacaactctaaacaaaatatta

SEQ ID NO: 142565 - DNA, 672 bp, Cannabis sativa
cacattgagaaaaaaatagaatttttgtatcatcataggggcgggccgcggcacccactttgctgggtcgcggcccgtgtgtggttttcatgcattggtaattgatttttgaataggcgagccacgacatgcccattcctaggccgcggcccgtatgcttcattgccgacgtttttcacccgtataatcttttttttctaggcaggattccgatttttcacattgatattttgtgtgatcttttatcttttattctcatctttttcgttgatatttttcaaatcttcatctattttaaatctacaaaaataaaagataacaagcgtaaaattgctccaaatacgattaaaactagctaaattaaaactatactaaaattaatctaaaattagtactaaaaataacctaacaaaagtttagagaaccttatattgtttgcagcagaataatatggttccttccactcagatctttaatccttgttcctttctatcacagagtaataaaaagatctgagcctagatctccttcaggtgttgggttcttcacaatttttcacactataattgagtacttgacttcatatgagtgggcatgtactctatcactatagggataaaattttgatgaagaaagagagggagatgaattcaaaatagagagagagagaga

SEQ ID NO: 142566 - DNA, 1073 bp, Cannabis sativa
  modified_base (173)..(173): a, c, t, g, unknown or other
  modified_base (449)..(450): a, c, t, g, unknown or other
atgggaggttgaattcgtgggttagagcttcacaggggatgctagtgggttatggagaaagaaaaaaaactaacagaaaataaaagaaaaattaaaaaaaaaaaaagattgaaagagaagaaggtggcagagatggagtgtaatatgagagaaaacccatgacataagcatgnatatgtatttttgtaattatcaaattttttaaaatataatattgaaaaacaaatttttttaaaaatgtttaaataactgcataaagacaaaatatatataaaaaaaaaggcaaaaaaagacaccaagtgtaaaaatccctaagaccaaatatagaaaatgtaaacatttttgttttaacacatttagatcagattattattaaattttatggataaaaattagttcaggatcatatttgtaccattttagaaaatacatggtccattttgtcattnnacaaaacagagagtctaattagtaacttttacaaaacacagggtcgaaaatagtattttctcaaaattaaacttaaatatttatttcaatcggtatttatactgcaaattactctataataattaaaagataaaatttaatttatgattattttaattttttatataaatttttaaggtaaacttaaatttattaatatttttactaaataaataatatataatattttaattgaataagagggtaattaatcaaacacttgtataagtattatttatttatagattttatgggaaacacttaatattagtaaaaaaatatgacttttatttataaattttatgggcaataactaaagtatttttaaataatgtgagatttttttactaatttagtaaaaactgatattacatttttctttattaaaaacttgaacctttcaaaaaattgtaaaattacattaaaaaaatatgagatgtcacctagggatgcacacgtggggcagggaattggcgggcggggagtgctccccctgtctccattcccgttaaggattttaatcaccatccccgcttattctccatcgggaatggagcggggaatcccctaatgggaacggggac

SEQ ID NO: 142567 - DNA, 754 bp, Cannabis sativa
agacttttttactaaaattgaaaataagtccttaaatctaagaggcatgatttagtacatgttaaaattcaaggagcaaaaatcctaattaacctttaaatagctaaaatataaaaaattcaaattaaaatcatttgaatataaaaacacaagatgaatttacattgtatacccactttactttatttgttttaatttttacctccattttcattttctttaagatatacccacttgtagagatgatgtcttatatacctcttaaattaatataaattatatgctagactaaaatagaaagtggaggtatatttcaataaataaaggtatttttgattaatggacacaaaaaagaagtatttttcaacttatcccaaaacacaaataagtacactgaaaaagcatcctataattttttttagacgtattggctttatttaaatgtatatttatgcgaagctttatttaaatgtatatttaataaggatcacaaaattttatgatacatttaaaaagccaataatacccaaattacactgataaaaattcaaatctagcatcatatttaaaagaaaaagggtgcacaaaattaaggtcacttgctatgttttgtgtagtgaaaagaactccaagcataagctacatggtacaagaccacatcacaattttgacaaatactttactatccaacttaacccaaactgagaaacaaattaagttttctttttccatgaatgacaaatgcattactatc

SEQ ID NO: 142568 - DNA, 814 bp, Cannabis sativa
tcttgatgtttttcccgacgaactttcgcgtttacctcctcagagagaaattgattttgttattgacttggcacctggagcagaaccggtttctaaagctctctagagaatggctccgttgaacttaaagaattgaaaattcaactccagcggttgcttgttatagggttttccccgcccagtgtgtcaccctgggagctatagtattgtttgttaagaagaaagatggatctttgcggatgtgcattgactaccgggaaatgaataatctaacaatcaagaataaatatcctttacctaggatcgacgacctttttgatcaacttcaggggaagacactcttctcaaagattgatctctgatcgggctatcattagttgagaattcgagaggaggatatgccaaagacagctttccgcactaggtatggatattatgagtttctggttatgtcttttggactgaccaatgctcctgcaacttttatggatttgatgaatagggtattcaagaatttcctcgatatttgtgttattgtatttatcgacgacgtccttgtgtactctcagtcagaagagaagcatgaacaacatctctggatggttttgcagtgacttcaggaacataagttatatgccaagttcaagaagtgcgaattttggctatctcaggtgtcctttcttgggcacattattagaaaagatgggatcaaagtggatccaaaaaagacagaatccgtcagggattggccaagaccgaaaacagtgacagaagttagaagtttcttgggtctggctggttattatcgtcggtt

SEQ ID NO: 142569 - DNA, 964 bp, Cannabis sativa
attttattttttctttttgtggaagtttatcaccatttaggctcatatctggttaacgaaaatttgtgttaacaacttctattatgtactctgtctatcccgagatagagttattatctcgccaatctttaatgggtaatagttattattcttatctcgcatatgcttatgtggcagtgagtttgaatattttatcgaccgttattactaaagcgagttatttaacactactacaaatatggtgttttttgtcagtttgcaactgacatatattcttttagcctcggttgttaaaactgacgtatataccgtaaacgcaaaaattacattgttttgcgtcagttttaattggtcgataccaaaaattattgacggtttgaaaacaatcgctaaagtataaaaatcaaattttacaacattcccgtcggttttgtactgacacaacagaaaaaaaaaacaaaataaaaatagatccagatattcatctcaaggtcacacctaaatctaaaacaaatatcttgattttaatgttcaaataattttacagatctaaaatagaaatatacaaatactgagatctacacaaataaaaatacaaagaaaatctagaacagatccaagtacaatacacaacagccaccgtcatgagatcaaaaaccaggtacggacaatggtcgtcctcttcatcttcgtccccaaattaatctgtgcaaaaaaaaatatttaacccacgagatcgaaagaaagagagagcagagataacttacatcgtggcaccgacatggtgttaagacgagagagaagggaagaggccattcatggcccatttggcttgtcggtgtgtgggtggcagagctggtgtcgagaggagataaagaaagggagaagaagggtcacacgactagacgatccaaggaggcagtgcatggtgtggttgtcgattgtcgagagagagagagagaga

SEQ ID NO: 142570 - DNA, 656 bp, Cannabis sativa
  modified_base (482)..(492): a, c, t, g, unknown or other
atccaaacactaacaacaacaacagcaactgaaaccacaaaaacatgcataatccaatttcttaaaattcaagaaacttaagaggaagttgctagaagcttaccttggcttggaaaacacttagagctgttagaaattattggattgaagaagaaaaacaagaaccctagctggttcaaggtgggttcgagagagagagagagaagcttgggagagaagatgagttttttgtctaattttgtgaaaatgaaataaaggttgttttattaaaataaatcagcttaaaactaaataaaaatctgattattaaacatagtataaactcaaatgaagacaaaaccaataaagggcaaaaagaccaaaatgcccttacccacactaaaggtcataaaatcacttaggggtattctggtaaattccaaaatctcgactattctcgacattctcattgtctaactatactgtcccgctatactaaaaannnnnnnnnnngattctaatagccaaacaccgcattctaatgttgctgggcacaaaacatgtaaaattataaaatttctatatatgacatataaaatgtattctaaattatatagatcattgtaaattaataattcacaactaatatgcaaatttcataactaaaccctaattat

SEQ ID NO: 142571 - DNA, 737 bp, Cannabis sativa
ttcgacgggcttggtgttcgacgggcttggtgttcgacgggcttggtgttcgacgggcttggtgttcgacggcttggtgtttgacgtttgtggttgacagtggctttgaatctgaatttttttttgttatttaggtttattttgttataagtttacacttatatgggtttatttcattttaaataaatatggtatcaataaactaatttaggttttcttttatttatttatttttgtaatttttaatagaaattgatatgagtttgtattaaggctcatataatttataatttcaatttaaaattgtgtttatagattgtattacattttattaataatcttaataaaattattttgtattttgttattttattttttagttgaaacaatagaatgcttacatttacttaatgaaaattatttttattatatttaattttatttatatataattaatataaattattatttataatatatgaaatttgaattagatcaaattaaatattatttttttacaaaaaaatatataatatagtgacactttttgtgtgtcactataactccaaaaatattaataaaaaagaaaaaaaaaaagaaaaaaaaggatatagtgacacttcatgtgtgtggctgttacctttccagtccgacaaaacctgactctatacgcctatagtgacacgcagaaaatgaatgcaaaaggtttcagtgacacgtgtgaagtgtcactaaaa

SEQ ID NO: 142572 - DNA, 549 bp, Cannabis sativa
atgctcatcaaatccagaaaggctggggggcacataaacgacctggacgaatgcttcaaagtcctcagaaaatacaatatgaaactaaatcccttaaagtgttcccttagagtcagcttgggaaagtttttaggcttcatagtcaatgcccgagttattgaagctaatctagagaagattcaagccctcttggatatgaactcgccaacaaaaaccaaagatgtgcaaagcttaacttgtcagatccctgcgctcagcagattcgtttcaaaatcaacagacaagtgtgtctcattcttcaacatcctgcgaggaaacaagcagttcgagtggacagaggagtgtgaaaaagctttccaagagataaaatcacaacttgcacaacctctcgtactctcaaaacctctagacggtgaggaacttggaatatacttagctgtcatggaacatgccgtgagtgccggactaatcagagaagagaataacgtacaacacccaatttattacatcaataaaagactcattgaggccgagagccgatatccgttg

SEQ ID NO: 142573 - DNA, 1315 bp, Cannabis sativa
  modified_base (386)..(392): a, c, t, g, unknown or other
gtttaaattacattgttttataaattcatatttaggatgttaaataacatatatggtagtaaatctagattctggtaaaacataatccaacaggtgggtctctccactatccatcctaagtttttgagattgaccaatctctacgaagagggtcttctaggaaaggttgaggatttcctgttggaagttattttaccaaaatctagatttactaacatgtatgttgattataatctataagctaacatcctaaatatgaatatcctaaaacaatgaaataaacacataagagattaagaaatccttacattgtgacagcagaataataaggactccttcaattcagatctctagcccttgattcttgtctgtagcagagcattatnnnnnnntgaacctggatcttctctccttcgctttggttagacacaatcttcctcactatgctaggtattgctttgacttgagtgggcatactctcaatcactatggacttcgaattattcagtatataagaagaacaattttgaaatagagaagaagaagaagaagaagaagaagaagaagctctctctttgttttctatttttctgcctaacaaagtagtctgaagtcaattgagaaaactagagccatcttattctatttatagtattccttctaaggttaggtttagaatttaaatgaaattaaaatgataaaataatggctttattggacttaagtggctgaccatattatgggcctcactagttttaattttgtcatttatttaactcatcgttcttttcacaaatgctatattttcattataactctataaatgtcaattctatctatttgatcattataattaattatcaaataaaatggtcacttaacttatttattaattagatcttacaaagtctcttaattaacaaataaattctaaatcctcttttcttctcaaataagcccttccttggtgaaaattcacaaaaaagacatagtcttatttagaattctaattaattaattaaaaccaattaattgagactataaaataaaattataccagttagtgcagggactatggccctatgtaatcaagctttcaataagtagatatgaaatttaccaagtaaattttttaacttattaattcttcctgactctactttggatttggaattgaactcttaattacatagaacactttattgccaaaaaatagacgcaatttaaattacccattatttcgatccaaatagtcaaagatcgtctatagatgatctacatcgagtagggacaaatttaccattctacccttcaa

SEQ ID NO: 142574 - DNA, 1446 bp, Cannabis sativa
  modified_base (1384)..(1396): a, c, t, g, unknown or other
ttttttggtttactgtgatgcatcaaaacaagggttgggatgcgtgctaatgcaaaatgacaaggtagtagtgtatgcctcaagacaacttaatgagtatgaatagaggtacccgacatacgatctaaagttggcagtagtagattttgcgctaaaatatggaggcactatctctacggggagaaatgtaaaatttatactaaccacaagagcctaaagaacttctttatgcaaaaggaactcaacatgaggcagagatgatggctagagcttgttaagaactatgattgtgaaatccactaccacctagggaaggccaatgtagtagtagacacgctaagtagacgcagttatgctagcttggcaatactagcacgaatggaaaagcccctacaacaggaactccaaagaagtggtatagagatcattacacaaaaactagctaacctaaccattgtctcgacgctacatcaagaacttaaagatgtacagattgttgatgagttcttacaaaagaaaagagcaggcttgccagagaaggaggcagaggatttctctgaaggtacagacggcatgctgaggtatatgggaagagtgtgtggccaacaacgtagagcttaaaagaaaaatcatgatggaagcacacactacaccctactcaatgcatctagggtcaacaaaaatgtacaatgacttaaaaaccttgtagtggtgaccatggatgaagaaggatgtagctgaattcgtagctagatgccttacatgtcaacaagttaaagctgaacatcaaaaaccagtagggatgttgcagcccttgaaaatcccagaatggaagtgggaagatatagccatggattttgtgacaggactacctcgaacaaccaagcaacacgactcattttggataattatagacagactcacaaagtcagcacactttgttccagtatagtctactgacaacgcagagcagtaagctgacttgtacgtacaagagatattaaggttgcatggagttccaaagacgatagtctcggatggaggttcagtattcacctccaagttttgcgagagtttacataaggcaatggggacgagattaaaacttagcacaacattttatccccaaacagatggacaatttgaacgcaccatccaaatactcgaggatatgctttgagcatgtgcactggacttcactggctcgtggagtaagtatttacctctaatagaattctcctacaataatagatatcaagccaccatcaaaatggtgccatatgagatggtgaatggacaaaaatatagatcaccgcttcactaggatgtagttagagaaagacgctatttaggtccattaagtagccagagtgacgtactcgtnnnnnnnnnnnnntcattccgtgggtgtaaggatccaatggaggcttgaagcggggacgttac

SEQ ID NO: 142575 - DNA, 712 bp, Cannabis sativa
cttatgtctaattggaagaatggatgccactgagtttaccttttaaaccttttcaatgctccctataggagtgttggcagaagagttctcacaagtcatgatcttttttgattaggttattgggatttatgccctcaaaataagtaattaatggataatatattacaaaatatataaaatacaacaataagataaatgaatacattaattatagaagtataattaataaatatcagcaaattctttattcatatggagagggtattatttagtaaggatgtacaagagaattaagattatacgatataaataaaacaagtcagtagtgcattaaagttaaggaatctttcatatgaaactgccaagtacggtttactatacactatacttctagtgtgtgtgatttttatacagatcacatatgtggatagacatgtagtaaaggtattgtgtataaattgattatgcatgtctggatcgatatgaaataatatctttcattaacatgtcatttaccatgaaagaattattcatatcataatgatgatcattggtcgatatgtctgaatctcgagtattcatgaactcctgattgtgttcattatgttctttgattcactcgttaaagtttctcaaagaaggtgattaatacaacttctggtttggaaatctactaacatgagtggctgggaacatgacatacaatattgga

SEQ ID NO: 142576 - DNA, 862 bp, Cannabis sativa
tctaactttgttatgaaatctcatatttcatgtaattttcactaaaaataaaaataaaatttactagacatacttttgttttttgtttttaaaattgaaaaataaaactgtaatttttatgtttttttttgttattcaagccctaaattttaatattagtaatcctaaatattatatttttttatttttctatataaaattcttcaaacttacatttttttttttttgaaatcacctcaaaattaaattggttaattttttttaataaatgtgtttatttgtaatatttaattattttattttaattttttaataataattttaatgtactgaaaatgaaaatgtaatttaaaaaattatattttatttttgtgtgtaatagactatttaaatttgtttttcagtgtagtagtttatttaaaatttttaaaaaattatcaaatattctaaataacaaaaatgcacacttacaaaaaataataaataatataattaaaatatggtgcgtactatttttttagggaattacctcatatactattttttaattttttttttttcaaatctacggttttggtttctaaagtagttgcagcgctagttccaataggagtttttatacgactttttgttgcaatttaggttgcagcactagctgcaataggagtttctatgtagaatttcgtaaatatgcaaaaaaaaactgtgttgaagtgtaaaaatgaaaaaaatccttattttttttatacacgtggtaagtaactgtatgagcttttattttcaacaatgtaaattatttattttttttaaaaaaaaaaaaaacaaatagtcctaaataactataatatacacgattataaaa

SEQ ID NO: 142577 - DNA, 761 bp, Cannabis sativa
taagcaggaacctccttttccggaggtcccgatgtcatgaaagttgagcagtggctaactatgattaccgaaattctgaactttatgagtgtcaccggtaatgatagagtggcatgtgccacattccaattcaaagaagacactctggtgggacatggtgtccctaactcatgatgttacaacgatgaccttggaaaagtttcagaaactgtctaatgcaaaatattacaacgaggcagttagaagcgcaaaaagagaagaattcactcagctgactcagaaggaaaacatgagtgttactgaatacacaactcaatttgaccgtttggcaagattgcctcaggaattgtcccatccgattttagcaagaaagagaagtacctagacgggttgaatgcgaaaaataagacacgacttaatgatcactactgatgacagcaccacctatgctgatatggtgggtaaggcactgcaagctgagggcacagtggagtgtaccttagactctcgagggactccggttgttggtggggttcctactcctcctacatcaggctttattaggggaggtagtgggtcgaccactgattagaagagaaaggcacctactgcatcttgtggctcacatcagaaaaaaggttccaagggaaccaaggtcgaggaaatcatcagggtagctctgaaacccaatacacttaccccgaatgccccagttgtaagaagcatcatctacggttgtgtaaagggcaggggtgcttcca

SEQ ID NO: 142578 - DNA, 737 bp, Cannabis sativa
  modified_base (30)..(41): a, c, t, g, unknown or other
gttattttgacttgtatatgttgtatgttnnnnnnnnnnnnttgtatgctaacgtctcaggtaaattgatggactatagtggggtattatacggggtaagaccgttgaatgtagagataccctaccctgtatttttttaggtcgtgtatgagattgttatggtgcggtatgatacgagataagaccattgaatgtagagataccctaccttatatttgtctgattcgtgtatgatattgttatggtaaggtatgatacaacgatattgttgttgttgaatgtagaaataccttattctatagcaatagtagggctaaatgttgatgtacccaggttattgtagggccaatataaccacatgttatgtatgtaatggccatgatatgataaatagtatgatatgattatttcatagtattatagttattctatgagtatgatataagagttatgatctctacgtgtggtattattattttggattagcatagaggcatgtattataattttccatgtataaaaattatttaattatagttatcagttaaaatatgatgttgaaatacttaatacattaggaatatgatggtattatatatagttgtgttgttgtgaatttaagacatagggtattgaatattaatgtgtgttaaagcattactttactgggcttttagcccacccccttatccccctacaggcaatagacagggaacattgaatataagtttgatgag

SEQ ID NO: 142579 - DNA, 685 bp, Cannabis sativa
  modified_base (598)..(603): a, c, t, g, unknown or other
tttttttttttttttgaaagtagcatctttcttttgttaattttaggaagtttttcaacagttgagataagattactttaaaccactttctatttgattttttgggtagaaattcttttagcccttaattttagggattaattaattgttttccaataaggtggctactaagctaatcaacccattaatatggtcaaaaagacattttctaatcatattttattactaagttgaattaagatggcatctttcaaagaatgtcaacgtatgatatgagctccttcaggtttataaatttttttatacagtggaaaatttattagtgtaagtgggaaaggttgtgtaaaaaggaagagaatctggaattgattaacaaggcaatattggcaaaacaggtgtggttgtttttgcagaatggtaattttttagtagctgaagctttgaaacattcttattttcagaatgatgtgttgagtaccaagttgggtattgtccgtcgatggtttggagaagtttactttgggggtgagagattatactcatggccggccctgaaacaaagtgggcgacaatagaaaaagggataatttcacaaatnnnnnnaaacaacaaaaaaaaaaaaataacaaaaatatgatttcatggaattttaaatatttttacgatttttgtaattttatttaca

SEQ ID NO: 142580 - DNA, 1055 bp, Cannabis sativa
tgattccaagttcgagtttgggttcgagttcgggttggggttcgagttctggtcggggttcgggtcctggtccgagtttgggttcgggttcgaatgtcggtctaggtcctgattgggctccaagtgtgggttagggtcctgggtgtgggttaaggtccttggtgtgggtccaggtttaggtccaggtcccaggtttcaatctcgaattgagttagggtttagttctgggtctaagtcctgggtttcgatcacagtttgggttcgtgttcgggtccgggtgcaggtctaggtttgggtccgattctgggtctaggtcttgagtttgggtcctgagttcaggttcgattttaaattcgagtttgggttcgggttttttcctggtatggattcgtgtccaggttcctgtcctggtttgggtcctgggaaggtttcgggtctaggtctaggttcgacttcagattctttggtctaggtcaagtcctagttcgggtttgagtccaggtttagatctgggtctgggttccggggcctaggtccttggtctaggtcccatccaagtccagttccttgctcatggtctaggtccaggttcgtgtttgagtcccgactctaagtccaggtcctagtctgggttcgggttcaggtctcggtcctagccttggtctaggttcaggtttgggtccttatcatggtctggatcctggtctgggtcgcgggtctcaggtcccggggagggtttaggacaaggtcaagtccaggtcctagtacgggtcccggtgtaggatcatgtcccaggtctcaggtcccagtcctaggcaaggtctcagtccaggttttgttctaagtttgggttatgttttgggttcggttctggtctcaagtccgggtcctagtcacagttccaattttgattttaggtctggattttgttttgggtccgggtctaggtccaagttggggtcagggtccgagtctcagtcctagtccgggtacgtgtttttcggatccctatctgggtccaagtctgagtacggatctaggttcgggtattgggt

SEQ ID NO: 142581 - DNA, 723 bp, Cannabis sativa
taagggcttaattctaaacgaaagaggttttaggatctatttgttaattgagagactttttatgatctaattaataaataagttaaatgacaattttatttgataattaatcataattattaaataaataattttgatatttataggattaaaattagaaaatatgacattagtgaaagaaaagatgcattatgaaataaagtggtaaatttgtaactagtgaggcccactactatggtcggccacttagtgtatttttgcctattattttatcttttttaattcatataattaaatcctaaaccctagaaaaaatactataaaaggaataagatgctctcattctcatccatctatctgaagctagttttcatttttcgtcagacaactaataaatgagagtctccttagtgatttcgaatcctcttctattattcttcattaaatttgagcctttagtgatagagtaccatgcccactcatagcaagtcaaatactcaatcatagtatgaaagactgtggtttaattaatacaattctttttaaaataatgagctttactttttaggatattcgatctccattgttgattctacatagttcttgttttaatgagcttcattcctaatagatgtttattaagtagcaatttaacgtcgttaaatctcgaaagataagtagtattgtaagtcttttattcttagtaaagatcacctcaatagt

SEQ ID NO: 142582 - DNA, 609 bp, Cannabis sativa
  modified_base (29)..(33): a, c, t, g, unknown or other
cacaattagtcacaaaaaaattatattgnnnnnaaaaagttgtcactaaaagtagctgtttttgtagcgatatcaactatttaatataattttataatatttaaataattaatattatttggatcaataaaaatatgccacatgtacataaaagggcaatcccaaatgttatttaatggtgaaaattaactgacatataaaatttgcaaataagtaaagttatagggttatggctaggggtgggcatcatccaatccaattgaagcgaaccgataaaatccaatctaattacaaaaagttagatatccaattacaattagattggattagatgctaaaagttggattctaattggattggatcgggtattgaatgtcaatctcaaaatccaattaaaaaccgatccaattcaattacatttatatattaaaaaaaatatttatataataaaaaatattaaaaaatataataaatatttattatatttttattagattttttgtatgttgaatttatgacactagattatttagtatatttattttcatgatgttttgttctattttattacttagaaatgttattgttttaattatttaaaacttttag

SEQ ID NO: 142583 - DNA, 1081 bp, Cannabis sativa
  modified_base (191)..(191): a, c, t, g, unknown or other
tgaagaaaagagattttggggtctattaattaattaagagattttgtatggtctaattaataaataacataaatgataattttatttgataattaattataattattaaggtggcgtgcaataacttttttaatcagttttctatttttaaaattagaaaaataaacatatttttcaaaaacatgttctanaaaattatttttactttttaatttctaattgaaaataaaaataaaaaaaataaaaaaaagtcactttcaatattgttttaaacagttttttttttcttaatcaatattttagactctgaccagccctgaatcgaaatgctccccacgaccctggcgttgaacccgacctctgactcgaacccgaatctgaccccgaacatagacccgacttaaataaaaaaataaataaaaataataatgaaatttacagaacacactttttttttttatatttttaaaattgaaaaacaaaagtagttacaaaatacatttttattttgtgattataaaattagaaaacaaaagtgttaccaaacggtacctaaataaatagttttggcattttataggattgaattagaaaatatgctattattaaaagaagaataagtggttgagataaagtggcaaaattgtaactagagattgacccctttatggctgaccattaagtgttttttgtgcaatattttttttgtaatccatataactcagccttaagtcctagttgaaacactataaaaggaacatgaagctctcatctcatcaacttgtcaacttgagttttcaacctgccaaaatctagttttcattctctgacaactaatagatgagagctatagtgatttttcatccttcattgttcttcatactccaacccttagtgatagagtgccatgcccacaaatagaaagtcaagtactcaatcatagtgagtaaggcggtggtaaccaatcccaatagagagaaagatatccagcttagatcttgataatactctgcgacagaaaggagcaaaggttagagatttaagcggaaggagtcattatattccactgcaaccaatgtaa

SEQ ID NO: 142584 - DNA, 919 bp, Cannabis sativa
caccactctcttttccagggccagaaatagggagagtagtggtcccaccgacactaggagtctctcaggtttcttgcaagaacttgaccgctccttcagctcgaagagatttatcaaccattttcggcataggttgtagtgtcataagtagtgataaccaaatcatgcttaatcttggcattcaaccctgccaagtacttttcctttttactgaaatccgttggtacaatcccataggccaatttagccaagcgatcaaacttggttgtatgttcagtcactgacatattctcaccttgtaccaattccacaaattccttccgctttgtactacggaccgcctcattgtaatatttagcattaaacaaatcccagaattccttccaagtcattctggcaacatccttggtgagggataccatctcccaccacaccagggcatcctcttggaattgaaatgtggcacatgccactctgtcatttccgaccactcccataaaattcaaaattctttcaataacagtcagccactgctcagccttaagaacatccgggcctcccagaaacactggaagtgcttgcttcccgaatctttcatataaaggctccatacggttaccaacaacgtgttgctcagctgacaccgcaggggctgcaggaaccgcatcaggcagttgcgagggaagctcaacaggggcatcccgctgcctaagtctttgaatctcctcttcttgttgctcaattctcgcttgcatctcaggaaacctttgctcccagtcaaccagagcctgaggtgggttctcctggccacctttcggggcacgactgcagcctctactgcgtccacgggggttttggggatttctaccaccccgaccacctcaggtctcaaccatttcaccctgccttctaacgtttc

SEQ ID NO: 142585 - DNA, 754 bp, Cannabis sativa
acctgctcgacattctggtcaatttgaattacatcagcatctttatgagcgggaatttgagtacgggttctgggatgcgagattgtcgtataattctgatcgtctactcccctccttctgttcagatcatttcttaagtcatgggttgcacccagccttttgagtacataggtgcctggttgcctcaacgattgatttgcttggttgacaggtggaatggcaccatttatctggttggaaccatcaggtttgacttctcccgatgaattactagacaaggtctgcccgccgattgcttggcccacgagtggaactcgtgaccggggattgggcggctaaacatttacggtatgagaagcattcatcgctagatctttgcctgtttcaccaaggggaatgatgttcggcggttgcaggcctacagtttggtaggcttttcgtatcagcacggtaagctgccgactactattttcaatcactgcatggtgagcccgtaatgcctccatctctctatctctccattggcgaacatatgcctttgttcgtccaacacgagattcactgcagtgcgtagttcgtcctaatcatgatgtagggtattgttatgaccctgcatgagtccgagagcgtcacgaagattttgtaatgcaatggcatctccgatggtcgtctgggcattggttcaaggcgaaacagttgtgttatgaataccctggttgggtgcggaactgttattccctgtctcttgcacacc

SEQ ID NO: 142586 - DNA, 895 bp, Cannabis sativa
  modified_base (26)..(29): a, c, t, g, unknown or other
aggatgttaataaaacatacttggtnnnnaatctagatcctggtaaaacattttccacagaagaacggaacatacttgtctgttgattttgaaacaaatctgctgagtgcgacaatctgacctgtcaaactttggacttccttggttctagttggcgatttcatatccaagagtggttgaatcttctctggattggcttcaattcctcgggcgttgacgatgaagcctagaaacttacctgagctaactccgaaggagacctttaggggattgagtttcatgttgtacttcctgaggactttgaagcatttgtccagatcatctatagtccccccaaccttcctagatttgacgagcatgtcatccacgtacacttcaatgtttcgtctgatctagtctttaaacatcttgtttgccaatctttggtatgtagctccggtgtttttgagaccaaatgggatgacttatagcaatacaaacccatatctgtctgaaaacttgtatgttcttggtctggatgatgaattttgatttgattgtaccctgaataggcgaccatgaagcttaatatttcatgccctacagttgcgtccacaagctgatttattcttggaagtggaaaataatcgttagggcacgccttgttgaggtcggtgaaattaacacaaactcaccatttcttattcggcttgggtaccagtacgggattagcaacccaagccgagtagaaagcttcgattatgaaattgttgttacgtagcttttctacctattcttttagagctaaggctcgctccttgtcgaacagtcttcatttttgttgaataggccagaaatttggattaatatttaggacatgtgaaattatagcaggatcaattccgaccatatcctc

SEQ ID NO: 142587 - DNA, 1094 bp, Cannabis sativa
  modified_base (26)..(33): a, c, t, g, unknown or other
  modified_base (1036)..(1038): a, c, t, g, unknown or other
tattctgttattaattgtagtttaannnnnnnncttcattgttggtctaactttgctttttgtttttaatgggaaaaatcctaatgaattgtcatccattagacaaacataatagtgttgaatctttatagataaatatttgtaaatgcaacatctagctgttcatcactatatgacacattagacaagtatttacaatatgaaacaatgaagaagtttataaattaagaataactttgactctcgccaatcgggacatcgttagattcttattttaaattcgaaattatcctttaatttttcctcttagcttattcatttcgaattagcttaaataatatatatatatcattggatgaatgatttataaatcatttgcttatgatgtcattctattttctctaaagaaattgaatggcacatatgattatattcccaacattctatcacaaaatgatataaatcctcggtcttaaatctcttattgtatatatgtttactatagtcaatttaaatttagagttagattagtagtggtggtccaagagagaataattactcatgtatatttgattaaatttaagactttgactttaaattttagattccaaatagaatttctatatttatatttcctacaacacattacacattacaatatgactttcacaagtattttttaatatccattttctgtcaatggattaaaactgtatgtttatgtgtgaatttgagtttagtattctgtgacaaggatccacttggactattctaagaactttattttgtaagtagacctaagtcatcaaaagaccacaaccacattcttatatatttatggtatttgcatcttgttcatagttgttttaacaagatcattctctgcaaagagtcaatatgcctatatccagtgaaagtgagatcatctatattcgaagagggatgtacattcaggggtggatattagtttttgttaaatttttaagacgatcactctagattttaccttaggcaaagaaatttgaaatgtttaaannntttcatgaatttctagcaattgtggaaaaccatttaggtaagtggttaaagatctt

SEQ ID NO: 142588 - DNA, 1090 bp, Cannabis sativa
  modified_base (178)..(178): a, c, t, g, unknown or other
  modified_base (663)..(679): a, c, t, g, unknown or other
  modified_base (973)..(975): a, c, t, g, unknown or other
attaccatggctttgaggccagttattggaatatgttttaccaggatctagatttactaacacgtatatttttaacatcctaaatatgaatttctaaaacgaagaaaataaacacataaaggtatgggaaaccttacattcgttgcagcggaatttaatgactccttccgctcagatntctaacccttgtatccttttcgtcacagagtatcaccaagatctgagctcgaaactccttcagttgtttggattcttcacagtcttacaaactatgattgaggagtcacttgctatgggtgggcatgcactcaatcactaaaggcttgaattttatttgtgaagaacactaaggatttagaaaattagagaagaaaagaagaagaagaagaagtctcatgaacctagatagaaagaaaactaggtttattgcctttgaagcattagttggataatgagacttttttatatactacttctcttaaggttaggcttaaattatttggaataaaaaaatgataaaaatggaacaaagatagcacctagtgtccagccatgaagtgggcccaacactagttagatttttgccatttttcttaaccatttatctatttttcacaaataccacttgttgcaatttttatcctataaatgccaaaactattnnnnnnnnnnnnnnnnnaattatcaaataaaaattttcatttataatatttatttattagactccacaaagtctcttaattaacaaataaaccctaaaattctatttttcacaatcaacccataacatagtgataattcataaactagacatagtctatttttagaattaaaattgattaactaaaatgaattaactgagtcttacaagcagtttgtctcgactagtatagggaccatgggcctatataaccgagctttcaataaccagatttagaatttaccaagtaaattgtaaagaccgcttagcttnnntttggaaattagcagataattaagttttacttatgaaaattacttatagatatttaaataattatttatgttgttatatttgaattctgaatacatttttatgtcatatagtgaa

SEQ ID NO: 142589 - DNA, 538 bp, Cannabis sativa
actcaaaagggtcaaaagggaaacatgagtgttactgaatacacgactcagtttaatcgtttggcaaggttggcctcaggaatcgtgccaactgatttcagtaagaaatagaagtacatagacgggttgaatgcgaagatcagacacgacttaatgatcactactgatgacaataccacctatgctaatatgttgcgtaaggcactactagctaagggcacagtagagtgtaccttagagtctcgagggactccggttgttggaggggctcctactcctcctacatcaggctttagtaggtgaggtagtggctcggccactgatcagaaaagaaaggcacatgttgcatctagtggctcaggttagaacaagaggttctgagggaaccagggttgaagtaattgtcagggtagctcacccagagttccccagttgtaaaaagcatcatctaggggagagtaaagggcagggatgtttccaatgtggtatgttggcgcattacaaaagggattgaccccaactcaagactgagacacag

SEQ ID NO: 142590 - DNA, 637 bp, Cannabis sativa
gaaagaaaacaaaactcaaattttatttcaaagctctctctcttactctctcttttcggccctccttgagcagcaaggaagtagatttttccttggtgtttcaagctcattttgatcagatttggtgatctctaattgttggtaaagtttcttcatctttcttttatgtttcttggaatttttgaagagaaatagtaggttgcatgcttagttttagagttagctgttgttgctgtgtttatatgttgttcagggatttaagcatgttggattgagtggattgaaactgttttgatgcatgtttggttggttttaaattggtttagagttttggtttaaaagctttggtttttcaaagtgaaattgtgaaattgattgttgtgtttgttgtttaagtttgagaatgatttctgcagtttttatatgcatgattatgtagtttgattctagttttgatgcttgtaggtgagctttagccaagtttgacttttgaactcaaagcttggagctcacatggcatttttagtatctgtatgttctgtgttgttttgatgctttggatatgttatttggggtatatagaacaggtctggaaggtttggtttggattggatttgatttgagggagttatgaatt

SEQ ID NO: 142591 - DNA, 640 bp, Cannabis sativa
agaaactttaactaactctctcaacagtagagtaaaaattaaaaaaagaaaatattaacaatgtggaaaaatgcaagtggtgggtactgggtaggtagtagagagaaaagaaaagttggtaaacatttaactataatttaaaacaaatagccatccgtgtacacattgctgataataaaatttttaaccaacgtatggtgtaagaatattgttcttagatactagaggtgttcaataccaccacgatgctgctgcaccttgcgaatgtacctagcaattttttgtaataattattaaataaaaatatgtggaatatattatttgattacatcagtaatcaaatgacgtattagatcatcttcaatagaagatgtaaaagttgagttatatttagcacaaaaagtgattttgtgatatttttatagcaatttttactattgtgttccaatacatataattgtaaatcttgatgtaaaatttaatatgtcatttaatgtccacttaataatttattgaaaaatataaaataatattaataatataaagataaatataaaatttaataatagtgcaagtcatttaatgtaaaggaacttgtaaacaaaaattaataataaaattttaaaaatggcataatggt

SEQ ID NO: 142592 - DNA, 762 bp, Cannabis sativa
agaagttgacattcaaatgatgctgactgctgaaggtcatcttgtcgccaagaactgtgatcgtcaaatggagcgttatgtcttcaagcgcaaaaatgacgaggtttacattatcaacctcagcaagaagtgggaaaagttctagttcgctgccagagttattattgttatgttctcagcgagacgtcctagaacgatacgagttgcaacgtatttaatacacgtttacattgacctagtaaaagcggaccaatcacagttgtttgatattctaatattaaccacatttattttacgtggtatgtaatcaaaccctatgatttcaggagataatcattgtaagatatcagtcaactatgtaattaactgcctgactatgtaattataaatataggcaagacatattgaaaaagggactgaaaaatcataagagaaaaaaccctagaactgtatcagaaatataataagattaactcgtggactatgcagaattttaactgtaaaaccacgtaaactttcgtgttcatacttttttttttctttactttgttttatttttatgtgcaagtttatccccatttaggctcaaatctagttaacgaaaatctgcattaacgattacatgttgtaatttagagaatcaaaattttaaataataggggtgttcatcaaaccgctcaaactgcctataccacaccgcatcgcaaaaaaagtgtggtttgaaattctttgcggtgcggtcgcggtttgaatttttcctaa

SEQ ID NO: 142593 - DNA, 592 bp, Cannabis sativa
tgtacctgtggccgaggcagatacagtaaaaggtttagaaaatgatatgcaactatggcatcaaaggctcagacatatgagtgaacaagacatgagggaattcacaagaagggagtcattaaaaagcttcagacatgtgcattaccattctatgagacttgtgtttatggcaagcaacacaagatcaagtttatagcagcaactcacaacacaaatggagttctagagtatgtgcatgctgacctttgggggctaagtagaatcccaacacattcaggtaaacactacttactatctattattgatgatttcagtagatgtgtttggacctatttacttaaaactaaaaatgagtgtctagaacaatttaagatacggaaagctcaggtagaaaacaaaacaaatttaaaggttaagacacttggaaccgataatggtctagaattcatcaacactgaatttgatagattgtgtaatgaacatgagataacaaggcataggacagttgtgaaaactccacaacagaatggagttgttgagcgtatgaatagaacccttttgaacaaagtgagatgtttacttcttagttcgg

SEQ ID NO: 142594 - DNA, 749 bp, Cannabis sativa
  modified_base (59)..(68): a, c, t, g, unknown or other
  modified_base (722)..(724): a, c, t, g, unknown or other
aaataagatcatttcaaatttaattataaaataagtaatatcagatcttataattaaannnnnnnnnntaaacaaaaataatcaaaaaatttaaaattaaccataatgctagtttgcgaaaaaaaaatcaaatttttaaattcaaatgctacgaatatctaaaactaattttattctgataattagattttcatttagaaatttggattctacacaaaattctaccaaaaattgaattttatttcgatgaaaaatgatttttaaatcaaaagatatcacaaaaacaagattgcgcgcacaaaagactgcaagtgggcgagggaaaggctgctggcagcctgcttggggggcaaatttcggtcaggaggggaaaaaattcagacatggccttgtctgaaggcctcaggtccgagcgagcctccccatccgcgcacgcgtgtgcatccctttgagatgtttttattcaaacttcaaaaaatcataactaattcataaaaaaaaatgcaaattaagttctgtaaaagcctaaatttattatttttcatcgacttggaaatattttcagaacgaaacaaaaaatatttatcatcgtaaattgcaattttcttacaatcatcaaatatgtacataaactaacatgaacgcatccaaatcaaaataaacaccgttttaaatccatatttcatgaaagtaaatcattaccttggctctgaggccagttnnngggaatattttaccaagatctagat

SEQ ID NO: 142595 - DNA, 1294 bp, Cannabis sativa
  modified_base (30)..(37): a, c, t, g, unknown or other
gtttaatttcatcgtattagagaattcatnnnnnnnntgttaatgaaacatacttgttaattaatctagatcttggtaaaataattccaacaaccatgtgtgtgttttataaactagtttagtactaataaaataataattataaaaatctttgataatattaaaaacttcactaaaataaaacactaaaaatgaacatcttaacgacactaaaactgtgtttcgggaatccctattgtaaaagtttcacaaaaaggctaaatacgacaacaagccaaaatactaaatcaaaatacatggcagatacagcccaaaaacaactcctggcaactcggtatgcaggccagtaaaatcaatatgtacaatgttggagaagactatcacctcatggctgaactagcttttctttgccttcacctgcaccatataacacttgtgagccacaaggactctgcaagaaaagtaatagcaacaatcatataatttattattcaaatattatcatttatactcagacaatcagaatcaaaagatcatgcattactcataagatgagatccaaaccactactgagatctgtcacaattaaatgtcagtatagatattcggtaatacaaaacaataatagaagtcatatatttatttaataatataaattatatacatgttacctcacaaagtaaccatctttattacatcacattgcctaatcaggcaagtcgatgctttaatctaataatcatgtattgcattgcctaattaggcaagtccgtgccatagcctggcacccatatatcacataactgcatcacctaatcaggtgagcccgtgccaatagctggcacacatgtatagcataaacgcatcaccaatcaggtgagcccgtgccaaacatggcacccatatatcgcataaccgcatcactgaatcaggtgagcccgtgtcaaaacttgacacccatacatcgcattaccgcatcacctaattaggtgagctcatgccaaaatctggcacccatatatcacataacggaattacctaatcaggtgagcttgtgccagaacttggcgcccatatatagcataaacacatcacctaatcaggtgatcccgtgccaaaacttgacacccatatatcgcataatcgcaacagttaatcaggtgagcatgtgccaaaacttggcaccaacatatcgcatcgccgtatcacataatcaggcgagcccatgtcaaaacctaacaccaatatatcgcattgtctaatcagacgagcccgtgccatagcctgacactca

SEQ ID NO: 142596 - DNA, 2490 bp, Cannabis sativa
attttgtgcatatattaaacatattaaaccataagcatgacaaattcatgcaaacataaatcacttcaaatttcttcgattgacatgggtgttattagggcacaaaacccaacactcaattaattgtgaattaagtcgtagaataccaggtaaagggtttaaaaatggaaaaatacttggagaagattcggaagaacttggaaaagtttgattattttaaaattaaacaaattcgaagagaacaaaactataatatcgatgccttggcaaaactggcctcgcaaaacgaacatgatgaattgaatttggtaccggtggaagtattggatgaaccgagtatatgtgaaaaggaagaagttgagatgattgatagctcgcctacttgggtgacacccatagttaactatctcctcaacgaccaacttctcgcagacaaaaatgaggcatgaaaacttttgtattcagtgcctctctacacgatagtagaaggaaaattataccagagaggttattcaatgtctctcctatggtgtgttctccccacagaagcaagcgagataatcaaagaaatccatgaaggattttgtggagaccatggaggttggcaaagcttgttaaagaaaataattcgacaaggatattactggccaactataaataaagacacacacgaatttgtcaaaaaatgcaataagtgtcaaagattttcacatatacctcgcataccaccaacgtaactaagaatgatgatctcgccatacccatttgtgatatggggaagtgatttgattggggcattgcccacatggcgaggaggagcaaagtatgcagtagtggtagtcgacttcttcacaaagtggacggaggctgaacctttagtttccataacccgtaagaaagttctcgactttgtcatcaagaacataatttatagatttggaatacccattaagatagtatctgataatggaactcaatttgatggtgagttattcactaagttctggaaaggaacaaaattattaagagcttctcttcagtttcaaggcctcaagcaaatgggcatgtagaagctgttaataaaaccttgaaggatactatcaaaaagaagttagacgttgtaccaggtagatgagtagatgaactatcacaagtactttgggctcacagtacgacggagaaaatagcaacagggcacactccattctcgctggcatttggctcaaaggcaatgctgccagtagaagtcaatattgtgacccacagacgagatttctataatcaagaagaaaaccaagaactcttgaaattttccttggatctactttaagaaaaatgtacagagtcacagattactaacgcagcataccaacaccgagttataagatatttcaataagaaagtaaagaaaaggctatttaacgtcggtgacttgttgctaagacaagtaattgcaaacacaagagatgcatctgctggagtatttacccaaactaggaggatccttatgtgatcgaggaaatagttggaaccggggtttataaatcggctcggcttaacaactcgctaataaagaaccaatggaatgttgagcatttgcgaccctatttccagtaaacacacattcacgctataatctatttttgtgatgtaatttttaaaattcaattattaataaagttgaagtattttccaagtaattaaaaagttttattctttaaaaatactttaggggcataaatatgtgtatgatcaactgtaatttttctagaaatacataatatattgcaagcccactccattttaaatttttgtaaagtttttcaagtaattgattgaagtcatatatgggtgataaaattccaaagtagcagttgtaaatgcgatttaactcataaagacaaccctaagttacatacgaagttgaacatctaacagctcgcattttataggaatgtattaaacgaggtaccaagatgccttgaaaaaaatacttaacctaaggtgtgaatagaaggcttaactattcatacagacaattaccaatatacaaagtaattcacagggtgaattattcaaagtatgtttaagtttgcttaaatcagattataactctttacacgaagtagaactgataaattacttgcaaatagaaagcatggtagacgataactgcttgtgtacatagtagattattaactacttaggaaatataaaagggaaaacaagagtagtggaagtgcttacttaaagtattttaaatttgatcaaagtataattgtttaagttgtgaataaaaacactaacaagcaaatatattaagttcaaacttaaagatgtgaggcaataaataaaagataaaataaaagcaaagttggccatcaatgaatgcaaatttgtctttataaaaagtgccacaaggggcaaactattgtctcggccatatggccattttcctaaataaacaaaaaaaaaaaacaaaaaaagaaa

SEQ ID NO: 142597 - DNA, 806 bp, Cannabis sativa
  modified_base (60)..(66): a, c, t, g, unknown or other
  modified_base (200)..(202): a, c, t, g, unknown or other
  modified_base (306)..(314): a, c, t, g, unknown or other
  modified_base (655)..(663): a, c, t, g, unknown or other
  modified_base (745)..(747): a, c, t, g, unknown or other
taaataaaataacaaaatttaagagttagcaaaatatcttgttacaatttaaaatttctnnnnnnnaataatcttattttaaatttcaaataacgtaattttattaaagaaaatgaaataatttaaaatattaaatatctgaccttaaatttaaaaataagataaaataacaaaattttaaaaataagataacaaactannnaaatagatagatttttacctattttcaagcttcaaatatcactaatatcttaaattaataaaaaaatattaattaatttaattttgataattagatttgaaatnnnnnnnnnaaaaatctaaatacaaaattacacaaaaaactcgaaattaattccatgaaaaatcatgaaaaaattaagaaaaataaaaaaaaaatggatttgatgtagatggtatgcactgcataccatccgcgcgcgcaggatgtagtgtctagccaagaaaactcggcgaaggaggctgaccttgtacgcacgcgcagaggacttcagacacggccctgaccatgtttcttcgaacatctcctttttcgaacgcacgtgtgatcgactgtcactcggttctgcgcgcgcacgtgggtgacaccaccccttagatttttttcaaacttcaaaaattcataactaattcnnnnnnnnncgaaattgagttctgtaaaaaattgagttgcttaattttttaagtccaaatttcgtacatacatcgttttaagtccaaattnnntgaaagtaaatcaattaccattgctctgataccagtggttggaatatattttaccagga

SEQ ID NO: 142598 - DNA, 605 bp, Cannabis sativa
ttaataccaaaaacataaattaaaatatttaaaaatgagaaaaatgagaaaaaaaatttgaaaaaaattaaaaaatcagaaaaaaaaaaattcttttccttttcttttttcttttttcctttcttcttctacccaataaccttcttcattctccttcttcttcttcatcatcttcttcttcaatctatgaacaccaaaaaactcacatctacaaccaccgaaaccaccactgccaaatattttctcaaatcaaaacacaacaaaatcaaacaaaaacctaaataaatttcaagtcccacaaaataaaataaaaatacatgtaaaacaaaaaaaaaaacatacaataaaaaaaatcatatgaagcaaggaaaaataataaatcagatcccaaaaaaatgaagccaccaatcccaaaattcaaactcaccatcatcagcacaaatcacatatttatatacacagagagagacagagacaaacaaatgaaaaatgttagggtcattaggcttgcttgggatggttggttcacgtagccatgtcgtggtggacattgaggaggcctccggggcgacacttgtagatgatttcctcgaacgagtacgaat

SEQ ID NO: 142599 - DNA, 578 bp, Cannabis sativa
ctttcaacttactcctctctttctttcttattttttattttttttatgaaaagataactaattcatcttaaagaagaatgattattatgttgggcacaaaaaatattatatttggctcaatcccttaccacttaaaaaaaaaaaaaatacaggaccagtcacgcatgcgtgacttcatccgtgtcctatatatatatatgtaatagtcagtgatgtcgcccaattagttacattgcggtcgcggtagtaaacgggctatgtcgtatccacagaggcaaattactactaaaaattagtataaatagaatatggtagaaattgaaatgaagtaaaaaataataaaatgagaaatgagaaagaggatgatcagataaagagtttgataaggtagaaatgtagttatgcaaaacctattctaataccgatattaattcaaaacacagttgcaattctacaccatcaattacagctggaagatgtatatagtaaaagcgcaaattgattaatctggtataaattgaatctcacctctaacttgacagcatatcatattatatatcataaatcgacaaaatacc

SEQ ID NO: 142600 - DNA, 980 bp, Cannabis sativa
  modified_base (213)..(218): a, c, t, g, unknown or other
  modified_base (442)..(443): a, c, t, g, unknown or other
agctgcaagcgggccgccatcatgggggcatccttgtgggaagttggctgtggaaggatacaagatggaaaccaacccatactatgagagactttcttgacagagctgatgagtttattaaattagaagaattcgagcgaaacgctctaaacttcaaccacactaagaataaaaagaacggaacaagttcaaatagtcaaagctctcaagggnnnnnngtaagaatggctccaacaatggcaagagatggaataacagtaatggcgttaacaacaatgataacaggagactaaagaatacccccaagccagccaggagagatccaaccccaaggttcactacctatagcctactcctggacacaagagaaaatatatgcaactcactcgatggtaccataccgtaaacctttttatcccatgagaaaggacattagcaaacnngacatgaacaagttttgtcgattccacaatgactacgaccatgacactgatcagtggaacaatctaaaggaggaaatagagttcctcattagacaaaacaaccccaacatgaaaagatatgtacgtcgggacaacgaccgacccccacgacaacaacaacaacaagcagttggggatgaccaacaattgttacctcccctcgttgctggtcatttggacgttatatctggaggaccccaccttgtcgggaactatgaaaaatcccgagagaaatacgcttagcctctgcgacatgaaccgggtgatgatgtgttggctgtccaggagcgagctcccaagcaacctcagtatgaacatgagtcaatcacgttctctaaagacgacaccaaacatgtacgatacccacacaacgacaccttggtagtagaagtacaaattgccaatatgattgtggcaaggacaatgattgataatgggtcgtcagccaatatcctcttcaagtcctcattggaaaggatgggtttgggagcaaaggat

SEQ ID NO: 142601 - DNA, 850 bp, Cannabis sativa
aaattaaaaagtataataattagtaaaatttaataatcaatccctatgggttcgacaacctttttagtattaaaactttgctataacaatacagtacgcttgaagtaaaaattgtgtatcaagtatgcagacgtaagagagagagatatatatatatatagagagagagagagatatatataaaaattattcaaatatatatataatatctactaataattgatgaatataaatatcatcaataatagatcttttattttaataatatccttttaattaaacaattatcatataattaatttaattaataattaaaaaataattaacttaatttaattttaattattttaaattaataaaataattaaatgaaattaattatgggtctttatatgtcaccctacacgtgtatatttggcctgcacgtgcgagctatattttaaggtccaaaattaatttcttaattttctataaataatatttattatcattttatcaataaataataattgattaatttcattaatcttttatttcacgaggattaaaaataaatattattgtctctaaagtaatatagttctctctttcatattatttaagaataatattatatctaactaattaatatagttttatttaataaaaataaatatttaaatgctattaattgtacaatgcataattactataatttttcaaaataataattttacaaattactattttgcccataagaatttatttcccaaagaaattaattctcactcgaaattcattcatcaaataaaatcttcccatgtacagtattgtatagaagtgactcagggaccatggacttatattttaa

SEQ ID NO: 142602 - DNA, 501 bp, Cannabis sativa
  modified_base (39)..(62): a, c, t, g, unknown or other
  modified_base (449)..(462): a, c, t, g, unknown or other
tgttatttctgatctttattagtaagtaaatctgattannnnnnnnnnnnnnnnnnnnnnnncataaaacccaacactttcttggtaaccctctctttataaaaggcaacagaaccagtgactttaatttcatcattaagaaggttagatgtaaaatggagggctagagggcaaagcttctgtctcaggcagcaagaactgtccttataaagaatgtaatatcctctatcacgatttacactatgtcggtgttccagcttgcagtgaaaaataccaaggttttggatgccatggttcatcgtttttggtggacatggagcatggaggggggcaaatgttggaatatattttactaggatctagatttactaccatgtatgtttttaacatcctaatatgaatttctaaaacaatgtcaataaaaacataaaagtttgagaaaccttacnnnnnnnnnnnnnnaattaaatgactccttccgctcggatctctaacccttgt

SEQ ID NO: 142603 - DNA, 542 bp, Cannabis sativa
  modified_base (27)..(55): a, c, t, g, unknown or other
  modified_base (292)..(304): a, c, t, g, unknown or other
  modified_base (410)..(423): a, c, t, g, unknown or other
  modified_base (495)..(515): a, c, t, g, unknown or other
tatagaatgccatctaggtttaggttnnnnnnnnnnnnnnnnnnnnnnnnnnnnnatataaatggtaaaccctatacaaagtggctggccctattaggataatgggactcactttgcaattttgccattttgtcatttcgcaatcccattttctcaaaaatacaaattttccaattcaaccatttaaatgccaactctaaatatttaataactaaaaattaattattaaataatattttcgtttaatatatttattaattagacatatagaatctcttaattaataaataannnnnnnnnnnnntttctttacaatttcgctcttgcttagtgaaaattcataaactagacagagtctagcttttagaattataattgattaatcaaaatcaataaactgagtcttacannnnnnnnnnnnnnaactagtatggggaccatgtgtctatgtaaccgaacgtccaataagtcgaaacgaatttaccaagtaaattnnnnnnnnnnnnnnnnnnnnnttgaatccacacttagaacttgtaatt

SEQ ID NO: 142604 - DNA, 786 bp, Cannabis sativa
acgagaccaatactcaatggtgtcttttttacaaccgacaccaataattgactttttgtcaatgtagaataggtgtcggttctatgaaccgacactaaaagtataagtatcagtttaaaattgacaccaaaagtgtgttttgtagtagtgagtataatggtaagaggagttattttgtggttaggtgatgtgcgaacacttagagcttcctcgtttgtaaatgtagagtgtatggcatgttatgaggacattgactactgtacattataaatataatttttcatttcagtgttaagagtagttgactctattgtgaatttactgaacttatttatcacagtcatatctttctctcgaaagttgaggagtattattgctccattaatggtgatgacatttcatatgtagtgagaaagttgtggaatcctctattagtatcataacacacacttacaaataacatttcaatgactacactgagacaacttacctaaacgtacgtactaagaagtcatttcttgtttggattattagaagccaaagatgtatttgattaatgggagtcattgttttcatatatgatagacatgttaaggattgctattatgggttgttgaatacatgcatattctagataactctttgatgttgtgtacacatttgttgatgcgagccaatgacatagtcttggtgctatgattgagtagatccaaatcagtagttattgctgtgttatatgaatctgagatgtctcattatgtattatatttgtatctcatcgataca

SEQ ID NO: 142605 - DNA, 980 bp, Cannabis sativa
gattagcaaaccctaactaattaactgtgtataattatagaattatatttttatataatttattatatgtgaattataatgatttatgacatgttaagaccccgttgtttaactagggatattttagtaattttgacctgagaagcgtaaaactatgaatttaaattaattacgtgcttctggactatattattatatagtatgtctgttttgtcatttttcaagtgtgttctgacaagttggcacggtatagtcacaactggtatttcgggcagaaccgggtttcggggccgaaatataattttgggatgtttgattggcattttatttttatatgagaaatctgaaatctattatttatatatgaaatgtgagaattatactttttcccttatatgcttgaaagtgagaatttggccctaagggcaatgtggtaattgtgcattttgtttataatttattaaagggaaaatttttaaggaaaagagggctttatttttctacattttccagccctagcagctgaacacccttctccctctttatctccatattttaaatttgcttatttttgaagaaattgctttggaagctttgattttgctgggttctttgtgcttgttaacggattagaggtagttctccgaccatttctaatttctaaattgttgctgaaatgagaatttaaaaagcatgtttttatgagtaggtgttcttgaaatgcagtggtatgaattgatatgagtttgtgaaattctagtttgaatcttttgttagtagctcagctttggatgtttggaagcttagatggagatttgaatgtgagaatttgaagtctatgttgatattttcttgctgaatattgcaagtaattttattagatttaagctctaaactcttgatgttgattagttcatgttgaattgttgataattgtgtttatgtgattgttgttataatctgaatttttatgcatggat

SEQ ID NO: 142606 - DNA, 581 bp, Cannabis sativa
  modified_base (539)..(539): a, c, t, g, unknown or other
tccaccaacgcatgttgaatagtttcagtactagagttgcacaaagggcagtcagcattgacaggaacatgacgcttttgaagttaaaaataagttagaagcacacccgaagcagctcgccataaaaaattactaatcttaggaggaatttttaatgactaaagccgcttccaaaaatcaatattggcatcccggcacctagcacccttagattcttacaagaacttatatgcacttttaaccggataattcccacaagtctcaagttgccaacgccaaccatcattagcggccgaatcactgagctgaatggacaaaataaggtcctgatcacgggcaacaaataggtccctcacaacatcctcatcctacgcgcgagtaccaacttgaaagaggcagcagaccgactgttcacaagagcagggtgccgtgagacaacatagttgtttgaattatgtggaagccaaggatcattaagaattgacatttccccattagcaattgttctttgagcacatgcgtggataagatcttttgcntcaagaatactacgccaaatgaaactagaattgtctcccaat

SEQ ID NO: 142607 - DNA, 723 bp, Cannabis sativa
  modified_base (685)..(692): a, c, t, g, unknown or other
tgtaacaatgttactatgaataaagatgatgttgttgatctgtctacttactctcctactgttaataatgttagtcataaatccaatattacaaattggcataacaagctagggcatcctttgaatgccattttaaataaagccttacatactgtaccccacacaggcaccataaaccagctttcattttgcaaagcatgccaattaggcaaaagtcacaaacaaccctttcccatatcgatttcccatgcctcacagccccttgaactcatacacactgacttatggggtccctcacacatcaaatccaaagatggttatagttattatatccattttcttgatgatttcagtaggtttatttggatctatccccttacacttaagtcccaagctcttgatgtgttcttaaagtttaaggctatggtggaaaaacaatttaacttgccaataaaaagagttcagaagagttcaggccgaatggggggagagtacataccattttctaagtttccgagtgatcaagggatctctttcacacatccttgtcctaaaaccagtgaacaaaatgggaaggttgaacgtaaacatagacatgttacagaaatgggattaactcttctagcacaatcagggttagacttcacctattggtggcatgctttttgtaaagcccgcttagttnnnnnnnnaattagcagttgtttatgtttaaattatgaa

SEQ ID NO: 142608 - DNA, 533 bp, Cannabis sativa
tataaattagtgaagtgatttaattaatgacataagtgtaataaaatgataatattatgactaaatattaagtaaaaatgaacattgtttaataattaacacttgtcgtaaaaataaaaagagagtgtaaaatagagtcttcttagcactacttattgaattatttttttgaataagaccgaaaaaattcaatcaattctagttcaaatatgtttcattcaagactatgatattgcaatgcaattgtctaattagaacaaattattaaaagtcctaaaaataggatattttttaaattccccaccttaaaaaaatctatatatatttatatatgcttaacaatagaattaaacagatagatatatgattttttaaataaaattttaataattaaaaatatgttttaaatgacaaaaccttaatttatttaagggattattttataaatacataaaaaaaattacaaaaaatacgattgtacggaattttaaatatttttacgatttttataattttatttactgaaaatacgg

SEQ ID NO: 142609 - DNA, 501 bp, Cannabis sativa
acttggactgaacattcaccaatttcagaataaaatctcgcactccttttaattcatcatacttaatggttgtcatttcatccataagatatctaagttagacattttcactaatgtcatatagttatttttttatagcattgaaaaactatttcgcatttgttgtgtctggaaagtcactaaataactgttaagaaatagaacttttcatagcaatgcactaagacgatttgacttttctcattgtgtatggatagtattctaggcaacagtgttgatatcagtaaaatcaacagttttttcttctcgaaggcataagtccaaatttattatgccaaaagtaattttcacatcttgtttctatgccttaaagttggacacatttcgatttcagatggaagcattattgttgttcacggaaagaagaccaaaaattcaaaaacttaaaacttgatcaagttatatgagaaatgcaattagaaaatattgtagagtcaatca

SEQ ID NO: 142610 - DNA, 1360 bp, Cannabis sativa
  modified_base (1095)..(1103): a, c, t, g, unknown or other
taacgtgttacataaaaattcaacatgactcttgcatgcacgttgtttttcgtgctagaaagatcactggaggtatgaaacgtcttcaaccctccttcctggacacagatggactgcttgaagtctatcttactcctcgtgatgctttccctttgatcttttgaagaaaagtttaagcttgaatttttatacaacttcagctttccttcccggcagtcaaagcttgttacataaaagttcaacatgactctcgcatgcacgttgtttcttgttcaagtaagatcactgggggtacgatacgtcttcaaccctccttcccgcacacagaaggactcctttaagtctatcttactccttgtgatgatttccctttgatcttttcaagcaaattcaaagcttgaatttttatacaaatttagcattcttcccgaaagtcgaaacttgttacatcaaaattcaatatgactctcgcatgcatgaaagatcactgggggtacgatacgtcttcaaccctccttcttggacacagaaggactgctttaagtctatcttactccttgtgatgatttccctttgatattttcaagcaaagtctaagcatgaagttttatacaacttcagccttccttcccgaaagctaaagtttgttacataaaaattcaacatgactcttgcatgcacattttttctcgtgcgagaaagatcactaggggtacgatacatcttcaactctcctttacgagcacgaaaggactacttgaagtctatcttactcctcgtgttgctttccctttgatctttttcagcaaagtgtaagcttgaacttttatacaacttcagccttccttcccggaagtcgaagcttattacataaaaattcaacatgactctcgcatgcacattgttttttgtgcaggaaagatcagtggggggtacgatacatcttcaaccctccttcccagacgcggaaggactgcttgaagtctatcttactccttgtgatgctttccctttgatcttttcaagcaaagtctaggcttgaatttttatacaacttgagccttccttctcggaagccgaagcttgttacataannnnnnnnnatgactctcgcatgcacgttgtttctcgtgcaagaaagatcacagggggtacaatacgtcttccaccctccttcccggacatggaaggactgcttgaagtctatcttactcctcgtgatgctttccctttaatattttcaagggaagtctaagcttgaatttttatacaactttagccttccttcccggaagctgaagcttattgcataaaaattcatatgactcttgcatgcatgttgtttctgttgggttttatg

SEQ ID NO: 142611 - DNA, 1061 bp, Cannabis sativa
  modified_base (86)..(97): a, c, t, g, unknown or other
atttaaggtttcctaaactttatagtgtttattatcgttttagaagttcatatttaggatgataaacaacatacttgtgagtagannnnnnnnnnnngtaaaataaattccaacacaaatatatcacaaatcacttttttgccaaatacaatacattttttacataccccattaaagttgttcttacaagtttatatataataataataataaaaaaaaattaaattctaatcgaagtttataaagatatgtacatattaataacgaaaatatgaaagatacattaaggtgtcaagcatcacaaaagataacatcgttgttgatgtatttcagtattagttcccacaatttttaatttagtatgatttaaaaaactgctaactagttattgtgtatgtaaatcggtatggtattgagcaccttaaggggccacatagtaataataatacaaaaaatcattttaaaaaatagtacaaatatcattcataataaatattaaaaaaattaaataaaaaattactaactaattagtaggtaccacattcatatgacattgaatactttactaacaataaataaaaaaaaatatttactaaaaattaatatataaaaaaacaagaacaaaaaaaaaaaataaaaaaaatagtatataaaaaaacaaaaataaaaaaaagtaaaaaatttatattgtatataaaaaaacaacaaacgacaataacaagtcattttgttttgttttattctaacatctatttatatacgggtgactacttaatggttactgttgatcgaggtttttggcaaccaattgaataatgtaataatgagagcttagggataattaacgcatgtagtttttacgctgttcaggcattaatgagtcatagtctacgagtctttgttattaatgagagagtatttcttataaagaatgtttcaatgtcctttttctgatccccccccccccaactagttcttgtgagggggtatttatagcgattggtgggaagaagaaaatgagtaacttgtctttaagtgccaactatgggcatgcacaagtt

SEQ ID NO: 142612 - DNA, 1258 bp, Cannabis sativa
  modified_base (39)..(48): a, c, t, g, unknown or other
  modified_base (636)..(642): a, c, t, g, unknown or other
  modified_base (695)..(728): a, c, t, g, unknown or other
  modified_base (919)..(924): a, c, t, g, unknown or other
aaataaatattatcaatttaaaattgatatttaagtttnnnnnnnnnnaaaataatattttattttgaaatagggaaaattcaaaatttgtgaaaaaaaatccacaaaaatcgaatttttgtgcaagatgcacctgctgcccagataggctacttgcagccatatgggagcgcgcagagaggggttgcagcagggtccattgtgtgggaaacgctagcgggtgcagcatctcacatgggtggatgtagggtcttgacatgggatcgtgtctgaacgtgcccgtgcaaccgtgcttcagacaggggattgtcctagcacatgcatcgcagatcctccttgtccgagggtctggtgtgtatagtgctcgaccctcgacaccccttggactcagaatttcaaatggccatatctctttagtttttcatcagaattgagttccgtaaaaacgaaaattgctcaatttttcacaaataatccaaataaaatattttcagaataaaaaataaattattttcatggaaaaattttgtaattcacatacattcattaaataagcacataaaccaacatgaacacaactaaatcaacaaaataacaatattcatcgttttaaattcatattacatgaaagtaaannnnnnncatggctctgaggccagttattgagaagattttactaggatctagatttactnnnnnnnnnnnnnnnnnnnnnnnnnnnnnnnnnntatctctaaaacaataaaattaaaaatataagggtttaagaaaaccttacattgattgcagaggattataatgactccttgcactcagatctttaatccttgttcctttctgtcgcagagtattatcaatatttgagcctggatctctttctctccttcgcgtttcgttaccgtcttactcactatgattnnnnnnttgacttgctatgtgtgggcatggaactctatcactaaggcttcgaatatgatgaagaacaatgaaggaggctaaaatcactataaaaggaactctctcatctaggttgaaacaatagttaagttgtcaaaagtggatgagtgagagcatcatgttccttttatagtatttcaactaaggctgagggctgaattatatggattaatatagaataagatattggacaaaaatcacttaaggccggccacttaaaaggacccctttctagttacaattttgccactttatttcaaccagttattcttctttaaataatatcatattttctaattca

SEQ ID NO: 142613 - DNA, 679 bp, Cannabis sativa
tagctatcgcctcgaagggaaacttcgatgatgatgagtttgatgaagaatcccctttctcaagggagattcaaattgaaccacttcaacttaatttcgaggagtcgcgtatgacaccatatgatggtacaactaatttggagtaccatcttggagcttttaatgaactaatgaagacgaaaaaagtgtcatgcaagacaatgtcttagtgcttcatggtcacactgaaaggagttgcatataagtggttcaaaaggctaagattgggaacaatcacaacctagaagaaattttcaaaagaatgtctccaacaacatcaggctgcatgtgattatgttatgcctgccacaagtattactaatgtgaagcaagggaaacaagaaagcttgtgaagctacatccatcgcttcaactctaaagttaccaaagttgggaagtgtccaactcaagatcgtcgtagttgttggagtatgcaatggaaatggactatgggggaacatgctgaaaagagaattagatggcatagatgacttccacaagagagcagataagtacatccatgtggaggaggtaaccgagtcttgagaacaaatacaagtgagtgttcttaaggaatctcgttagactttgtaagggtctgctagatgatacccctaaatacttataagctgatacattc

SEQ ID NO: 142614 - DNA, 521 bp, Cannabis sativa
gttgtaatgagtaatgttatgtatctctccgagagtaaacagtcacacgagagtcgagagcaatgctattagcaccactaatgtcgagagcaatgctattagcaccactaatgtcgagatataatagttattagactcttacttagttacatcaattgaatttcttatagtagtgctagaaaccaatagttacttttagcatttttcttaatgttatgactatgagcaatgctatacatccatgagagtaagcaacctcccgacgactctatcctatcgatgaattccgtattgccacgtgactcaggaggatgttttcgtcagggatgcatgcagtgcatttttgcatagtttttttttaattcttttctttcaattcttagtgttaagttttggaacaattatactagcatgaaaaagaggacatttatgcttgttgtagaatgtgtgcaagttacttttaatgtgtaaatttcatgtttgctctgttttgatagacatagttccccattgaggcagtg

SEQ ID NO: 142615 - DNA, 521 bp, Cannabis sativa
gagagagagagagaagaagggtatcgagaaaatgaaaaagaaataataggaaaaaaattatgatttttgttattttaatttttttaaaattaattatttaaaatttgaataaaaactctaaattgctaacggtatcatgattttgggagttttgccgcaattaacccaaccaactttaaaatatttctaaattaaaactacgctacatcagatgctctacactctgtttattttaaaatttctttaaaattcactattcatattctatatttataaaatgttatttattgctctaaacatattttattatttatttgagatttttattattctttttatatagtaatatatgtaaatattaatattatatatttgatatgaataaaatatattaaaatttgaaaaaaaaaagtgaaatttttattgatatgttttaaagaagatggtgtatggtataatatataaagtttaaggtaaaatggaaaaaaatatgattttaataatgtattttaaagaataga

SEQ ID NO: 142616 - DNA, 731 bp, Cannabis sativa
  modified_base (69)..(78): a, c, t, g, unknown or other
atcgaataaaaagttgctaaaatggtgtctattttagattagctgacaattctattcaatgaatgatannnnnnnnnntcgcctaaacgggacactgtatcgattttttggaaaccttgaaaattatttaagatgtgcctattttgtattttcacatgtctttattacttgctaaatgcttgataatttctgaatgtgtatgaatttatattgaaccttcattatgttttatgttattgattattgtagtaccaatttcgagtcttcattgtaggtctaacttggtttgttgtttttaacaggacatcctaaagatttccatctgttaaataacataatagtgttaaatctcgacagataagtatttgtaaatacaatatctagttaactcatccttaaagatgacaactgagactagtgtttacaatttaaaacaatgaagaagtttataaaaataagaataactttgactctcgcctaaacaagacatcgttagatttttattttaatcaaaattatcctttgtttttcctcttatttgtttatttaaaaattgcttagaaagtatattattggatagaatatttataaatcatatgcttatgatgtcactttattttcttctataaaatgagtggcccagatgactatattccagatattctatctcaaaatgatataaattctcgatcttaaagaatctcctacttggatatgcttactaaaggcaa

SEQ ID NO: 142617 - DNA, 541 bp, Cannabis sativa
ttagatcaggtttcttgaggagaaaactggacttaaactttccttttctataaaaggaaagttgcacttactgctcacgattttgtaggtacaaaaatagaaattcctgggctgattgaagatttcttttcgggaattttctagtgggctgtcgtcttgttcagacagtgtgtaagctgtcaataaggtgtatattgattataaatacaccttgtagcagctaggtttagtatctctttagtatctttgatttttactcatatctttagaaaagagagtcttattttgtagataagagcttgttcgacttactctgtttatttgtattttgtattatcttgaatctatattcaagtctacaaagaagaagaccagcagtgctaccttcaggagaaggttttacaaagttttcggaagattgcttttcaagtcttggaccgggaggaagcaagcacttttcaaggagatcgaagggagttagagatcttgaagtttcaacaaggtttggttagaaggtggaatacatcaagcttgctgcata

SEQ ID NO: 142618 - DNA, 1240 bp, Cannabis sativa
gcatctgccgagacatgtctgtacggaacataaaacaacatggttagagaaaacagacattagaaacatgaggcataatagtcaagaagcttaaaaacaagacgaagtggcatgcaaagtgattgaccaagtaaggatcaaatgtccatcatcaccttacatcgctcttatttcagacataacagctttccctttttcgaacacgggaggggacggccgagcaggtgagatgggctcccttatgcaaatcgcatgttcaataggcctgggcgggaccgaaagtttcttcctcatcttgagcggagtcacctcttgagcggagtcacctgctcttcctcagcctcatcttcaagattcaagggctcttaagcatattgcttggcccttgcacctcccttcaacttagcctcgcgcttcatttgaatcagctcattctctagatgagctcgttcaacccgtccagcatcagatttcctcttcctccccttcactggtttgggaatgaagtcctttggatagagcccatacttcacaaagttatcctcaaaagttaactggatgatattccggtcttcccccggcagtcgagcaagcttttgagctctatcccagagagcaagagtgaggggagggcggtgatatgtcggaatctcctagaaccgagtgtgagtgatgcccgtgccatccaccatgaagtactcatcagcaaaatgcccaattttgctgatggtcgaatcatcggtgcccgtcaaccacttgaagtctggttgtgagaaatagaagtaccccaacatgccttgcttaggggtggacttcaaatcaaaaaaccagctgacttcgtgaggagaaggcataccccacttctgggaagcgtagaggacgaagagggcagatagatatttaatgcccttagaagtgaactaggccgggcaaaggccgaagaagtctgccacattcttgaaatattgatgcaaagacatcaatgccccttgctgggcatgggcacccgacaaggcgcacatccccctttcagggtttgtgtcacgattgttgtgggcgggaatgtagcaatccaattcgcccaggtatccgccctcgtcgagagtccgaaggcacacctcagtaaccttggacggatggcttacccacctggcgcccaaggcacctttccttctgtgaggaaccgcaacagtaagctcctcactgacgtagtccatgccctcaaccaggacgtctccgt

SEQ ID NO: 142619 - DNA, 1018 bp, Cannabis sativa
ttgggaggcaacccaagtgttttctttaatttttcagactttctggttatgtttttagtttatgctttagtatttttagtattttaaatttttagctgagtaccaaacattaaatttttctagttgaattgtgaaaaacgagaaaaaaaaaattatttttcgggaccgggaacccagtggtcgcgaccaccaggttcctgggtcgcgaccctttttggtagtcgcgaccctggtctcgacctggggttttaacagaaacacaaaaaaatttcattcccagtagtcgcgactagggtcagaggaagtcgcgacctattttccaagttgcgaccccagtctcgactaggccactttccagaaacgcctaaaatttgaatgtaagctagtcgcgaccagccttagggcaagtcacgactagctcacgatttttctataaaatcccaattttttcccccattcaaccctaaaccaatttcaaatttttcttctctcagccgaccctaacctctcccattcgaaaatttcaaaattttccttcccaaatcttcaattctttcatcttcaaaccaatttctcaatcccaatccatcctaaaacctaatttctctaatcaatttacactttccatcaaaaaccacccaaatactcatcaatttcaccccaaatccgaaaatacattagttcttcttcttcaacctcaaactttcaaggacattcaacaatggaggtggagtaaaggcgtcttcgggtttgtaagtattattctctattacatttgaaaaattgcatgaggattttgagtatttttgtgaaaatagtgattattcttggaatcattggttgacataggaattattaggtttatagtgtgattttggattgtgaatgtatttgtctgaattattttggttagttttgaatttttgggatatagaaaattaaggggaggtgctgcccaatttttcttagctttattttgaaaaaaaaaatcagaaaaaaaaaatccgaaaaaaaagaa

SEQ ID NO: 142620 - DNA, 713 bp, Cannabis sativa
  modified_base (136)..(136): a, c, t, g, unknown or other
ctgatgcccagcctttacttgctgtcagataagacacttagcaacatgctcagcaatgtcattcttcatgcatggccacaaaaacaaggctttcaggtcttgatacatctttgttgaccctggatgaactgagtanggagtcgtatgagactcatccataatctcccttttaataccatcatccataggcacacaaacacgatttctgaatcgtaacattcccattacatccactgagaaacactagccttctcagccgaaaccctttcttgggtttttaccaactctggatcttgcatttgtacttctttgattcgctctaaaagagtatattgtagggtagtattagccaattgacccacaactaactcaatcttacctcgggttatctcatttgctagttattgggatatttgcttcacagtacttaactgactctgaccctttctgctaaaggcatcagcaaccacgttggctttaccagggtgataaaggctttcacagtcataatccttcaccaactccagccagcttctctgtctcatattcaaatctctctgggtaaagaagtatttcagactcttgtgatagtgtatatatcacatttctctccatataggtaatgccgccaacttcttagcgcaaataccactgctgcgagttctaaatcgtgagtagggtacctctgctcgtactcctttaactgccgagaa

SEQ ID NO: 142621 - DNA, 548 bp, Cannabis sativa
ccaaagttatgtgggtaccaaaaataaagatataagtttgttttgtaggtatcaataaagaggaaccaaagttggctcttgggtgttgatgcttaaagaagaatgtcaagttccgacattaccaacaagtctcaaaaatcatagaaaaagaatgtgtcaattcttgaacacaacccaaatgaacaaatttgagaactggtaatatcgtttttattcattctacttattttgatgagactaagatgcctagatgaaaagaaattgaaatttgaagtgtttggctaattgacttgcttttgatccttcttgttcattctcttacacatacatgcttaattggtatgtcacatactatttctatgaataaaagttttgattagttgagttttgacattcttgaactatacattctgaaaaatttagattataggccattatgcaaatttttggtgaactttggacatacctttgaactagtgaatatgtgaatttttacatatttggctagtatatgtgtttatatgtttgaacatgtccaaatgagtgta

SEQ ID NO: 142622 - DNA, 519 bp, Cannabis sativa
actagaatatagggagggtctatcaacaagctaaccaacctaccccttcagggactaggacagatcttcccttgctagagggaggacagaccttgcatcaaaggtctaacgacaagaacagccaaatcccagtaaccaacgcatgggggccagggatctcaagttcagtaacagcccccgctatccctcctgtgaccggccagccaccagcaggagtccctatggccggccagccacctaaagaagtccccatggtcggctagacatctccagaagtcctcatggccggccagagaggagcactccctccctgaggggaacaaatcacccaaagaccaattttcaggtgacaaggaccaggagcaggtggaaacacccaaaacaataatttaaggagtgaaattaatcacttcagacagttggatccaccaaactccaacaatgggtgtgatctatcccatgttaatgcacaaactccaccagccaggcaaagaagtgtgggcggccaggccctaccca

SEQ ID NO: 142623 - DNA, 903 bp, Cannabis sativa
tgaaaataaggtgttgaccacctaatatctaatataaaaggtgaattattttaaaagaattaaaaagtagtatctaaggccaaaagttcccaggatattgatatggagatagtagtgtttattatataataataaaatattataatatacatggtgtctcaaggagaatattaaaaaagcattttgagtttatgaagtaagtctctcaatacacttaaagaggaaatgtcaatagtaagttggaatgttcgaggcttaaatggaaaagaggcaattcaacatttgaagttacttctaaaagaatacaagccagatgttatcttcttaatggaaacaaggttggtggaaggtaagagttatgaaataaagaggcaattgggtttcgataatgtttatgaagttcccagagttggtaggggtgggggtttaatgcttctatggaatgaggggattgtggtttcaagtatcatgtcaactattaattatataagttgtcttatgagtagggaaaataatccacaaacgtggcacttttgtggttcttatggggaacctaatatttctagaagaagattaacatgggatatgttggaacatttacggataatatataatggaccatggttggttatgggagattttaatgagatattaggccaacaagataaaaataaaggaggagttcgaaatgaaacacaaattgaggcgtttcgaaacactttagagttatgtgcactccatcctttgcaatgcgagggtgatcgttatacatgggcaaaaaatgcgagtaatgaaagtttaaaggaaagattagactgggcaatggtcaatgaggcgtgggaggactcattcccacaaacaattctggctcacctcgattattatcactctgatcatagagca

SEQ ID NO: 142624 - DNA, 1060 bp, Cannabis sativa
agaccaaaccagaacccagaccaaaacgcgggacccaaactaagacccagacccagaataagacccaaacctagtcctgcaccaagacccaaactcgaacacagactgagatcagaatcaggaattagacccgaaactaaacccgaactcaaaccgagataaaaccctgtgactcggactcgaacctggacccagacccagacccctaacccacacccagagctcgatctggacctagactgagattcggacccgaacccaaactcggaccaagactccaaccccgacctaacatcgaacccaaactcgaactcgaaatcgcaattggaactggaaccggactaagaataggacaacgaccacgacaaggacccaaacctgaacccaaacccaaatgaaaacccagacagagacccaaactcgaaccgcaacgaggacccaaaccgtaaactagacttggacccaaacccaaacaagaactaggagttggacccaaaatcaggatagggacttcggcaacggaactaggatcggaacccaagaccggatacaagactcagacatgaacctaggtacaaactcgtgactcggcacccaaaatggaaccagattgggacccgagataaggatccgaatttgaacccgaggcttggaccgaacccgcagtcggtgtctgaatttgagacccagccccagacctgaacctagaccaagaccctgactcgaacccagaccaggaccgaacctagtccctgacccaaacttggaacctaacccgtaccatatgacccgaaattggaaccgaaacccgacgtagatcgggatccaggaacaggactgaaccaggacttggacctggacctggaagcgtaaccagacctcgacctagacctagaaccataacctgactaggactcggactcaaatccagacgtagacccaaactgggacccagacccggattccaacccagacctagactcgagaccaaaacctagacccgaactcagacccaaaaattgaaccagactcgagacacagaactggggccgcgacccaa

SEQ ID NO: 142625 - DNA, 1062 bp, Cannabis sativa
tcagaatagtgaatgtagtgtatttggcatgattctcctggggagtctgtccggatttgtcagtgaactttcctttcttcccgtttccttgcttgcggttggttcttgaacgcttgccagttaagcttggattattttagttgttgggaagttgggcggatgtcccagtggaaggggcctttgacttgcgcggcttttgttcaccttccgctcgttgaatggcttcttcgagcttgacgaagccttcggctcggtcatggaaatcactcattgagtctaccagaccgttcttccttatatctttccaaagttcactaaggacttcgatgccccccagtatcgcaaataactttccatcctcagttacccgtcaaactttggtcccctccgtcatgaatctgctaatgtatgcccggagtggctcacctggtcgttgcttaacctcgaccaagtctcccaaattcaatgggagttggcgtgaggaggagaattgcgcatggaatttcgaagagaaggttttccatgagctaaactttccaggagccaacttgaaataccattgttgagcagcttccgacagagtggtggggaagattctgaagcagacatccccccgtactccttgcaaatccatttgcatttcaaagtacttgagatggaaaagagggtcttctctccccgtatacatcttccacgtcggcattttgaacttatggggcagtggcaggagattgatctcaagtgagaaaggagttccgcgtgttcggtctaactcaagatcattattacattgtccaccaatgccgtgaaacatatttttatgttcgtcaagctgggcctgtacggctgggctaacctcctcggtattctggtcgacttggattacgtcagcatcttttggcgcggggatttgagtacgggctccaggctgcacgatcgttgtaatattctgttcgcctgttcccatccttctatttagatcgttccttaggtcatgggttgctcccaacctttcgaacacagaagagcctggttgccttagcgattaattcgcttggttga

SEQ ID NO: 142626 - DNA, 571 bp, Cannabis sativa
attgctctcatcggtgaaaatgccctgtttgtattgactgaagaggctcctaagcagccaggtgagaatgcgaccaaggcagccaaggaaaagttcgagcgttcgcagaatgctaacaacaaagtccgatactttatgctgtctagcatggtcgacaccttgaaaacaaggtttgctaacactctcacgactgcagatatcatgaaacagttgactgaactgtttgggatggcgtcaattcaagctcgctttgaggcaaccatgaattttatcaatgcacagatgaaacctcatcagaatgtgcgtgatcacctgctccaaatgactagttacttccaagaggatgagaatcatggagctattatagatcagacaactcaagtgagtttgattttgaatagtttgactccagcttttctgccttttacatcaaattatgtcatgaacaagttggagttttccttccacgagttgatcaacaaccttcagacatttgaaaatttgattggaggaccacaaaaaggaggaactaaagctcctagttcttgcactgctaatggtacgaccaagg

SEQ ID NO: 142627 - DNA, 575 bp, Cannabis sativa
  modified_base (547)..(547): a, c, t, g, unknown or other
actaattgagcttgatctagttcaagcttggacactgtcaccattgtccctttcccccttaatcctctatcaacctcatctaggtcagttgttggtttgctaattcatatttcctcaactgcagccatgtactctaaaaaaaattccatagcctcttcagatatgtagcactcaactatagatgcttctggtcgatagttgtgacgcacataacttttaagtaccttcatatttctttcaaatggatatatccatctcgcctaaactggcccacacaaccttgcttctttcactagattaaccattaaatgtatcatggtgtcaaaaaaagatggcaaaaaatacttttccaggttgcacaatgttttgactacatgttcatgtaatgcatctaacttatcgagttctaattccttcccatacaaattattaaaaaatgcaaacatgtatcaaacactctcgaacatttttcgagaagaatgatcttatggcaattggaagcagatgttgcattaacgcatggcaattgtaaagcccgcttagttantttggaaattagcagttgtttatgatta

SEQ ID NO: 142628 - DNA, 672 bp, Cannabis sativa
  modified_base (43)..(67): a, c, t, g, unknown or other
tcataacttgttattacccattgaacctatttcttggaatctnnnnnnnnnnnnnnnnnnnnnnnnnatgagtgattcatcaatctaagggaaacattctcattcctttcgatattttaaggactttctctctagctaaacctttcgtcaaaggatcagccaagttatcatcagtgcgtacatgatcgactctaacagctcctgttgagagaaactctctaacagtgctgtgcttacaacgtatttgttgtctcttaccatcgttataacagttttgaacttttgcaatagccgcagtactatcgcaatggatcaacacagctggaataggtttttcccataaaggaatctcagctagcaggcttctcggccaacctccttcttcactagcagtagctagtgcaatcatttcagactccattgtagattgagccaaaatattttgtttcttagacttccatgaaacagctccaccagctatgctaaaaatatagccactagttgccttggagtcatttgataaagtgttccaattagcatcactgtacccctcaacccctcaagtacagctgaaaacttttgataatgtaatccaagagtcaatgttcttttgaggtatctcatgaccctctctatagcattccaatgctctacactaggtctactagtaaa

SEQ ID NO: 142629 - DNA, 1114 bp, Cannabis sativa
tcgcctttccaactttggctttaactctcctggatttagataatcccaagtttcaagtagctgaaatgaagaataaacatagttagtagatccagaatcaacaattcaaatggatttgtcattctctaaaagacatgattccaaaacaaaagtattaccttcgttccaattgtctagaagtctgggacatctttcttcctgatgtccctctcatcacaatacaaacattgaagagtaggactatccattgtttcaatatttgaacttgaagaagaagcattgttagaagcatcatacttaattcttttcttcttactcgtgtctgcaaaactgcagggtagcctccttgcaggaaaactccgtttgtaagcacgcaattctacgtctagcttatctacgtcggatgagttaaaattattgaccatgtaggatacaataaatctattatactcaggtagaagactattaagaattaattgaagccattgttctcttgataaatcaattcccagtaaattttctttctagaaattcattttcatcgtcatcaggtgtgaattaatgctcttacaaggagacattttcacattatagagttcatttgcaaaagcatgtaaaaggtgaggtgaggggtgtgtgttatcattttgacactacaaatatcaataaacagaaacaaaacatttggttctcttaaattcatacacaagttcagaaaaataacaattaagtaaacatgtttgcaaaaataccaaaataaaacatattcaattattttctaaggttttcaacaaactgatacagtgcttcgttttagtcgagagtcaaagatatcatccatagaatagagtagtcaactcatctaaaatggaaaccatcctagcaacattttattcgatcaataagagaatctaacgttgcttcattttagttgagagtcaaggtcattcttatttcatgagcttccaccattgtttcatactttgtgattcctattcttagcaggaactagtcggatggtcgttactaagaataaaatacttacaataatacatagctttcgagattctatggtgttaaattgctaattaacgtccatctattagggatgaat

SEQ ID NO: 142630 - DNA, 655 bp, Cannabis sativa
  modified_base (339)..(339): a, c, t, g, unknown or other
aaaagtatgtttcgaaccctgcttatgtgttgagttatgaaaatcttgggctaaaatcagacttatcttacaaagaacaactagttcagatcttagacagtatagataatgtccttcggaacaagaccatagctttggttaaggtactctggagaaacagtaaggtggaggaagccacctgggagttagagtcagacatgaggacttagtatccagagttgttcaggttagatttcgaggacaaaatccttttaacgggggataattgtaaagaccggtctaccaattggggcagttttgggaaccctagttttttccatttttgcgatatttagggtnttgccatgttatttatcgataggaaaacttttagtttcaagttcaagtcctcagaaagtgatttagcatctcactcatcagttttgcgaataatgttatttaggggcctgtaattcgccgagcaactgttccactcaagttggccagcacacctgaattcggtaacgaggtaagattagtataatgatatgcatatgcatttacatatttagtgtgcatgttagttaagcctgttagattacgttagaaatgtatgttggctttgttgggttttatgtcctaaataaaactctgtttcaatgtaatgcagattatt

SEQ ID NO: 142631 - DNA, 656 bp, Cannabis sativa
  modified_base (44)..(48): a, c, t, g, unknown or other
  modified_base (146)..(147): a, c, t, g, unknown or other
  modified_base (204)..(204): a, c, t, g, unknown or other
  modified_base (587)..(620): a, c, t, g, unknown or other
tacaaaattttgagaaattccgaataatttacaatatagaaaannnnnttcaaacagtctattttacacgcttataaaataaaacaatcacccgtgcaatacactgtttgaacgtagttttcggcgtgttaaacttttctaaattnnttaaaattttgtaagatgtcttaaataactataacatatatgaccatgagaaaaaanttgactaaaaaattatttcgagtgctaaaacagatgagggtgcatcaatgtatccattttaagggggtgcattgtagaatttctctaaactatatattgataaattgtaacaatagtcctaattaaaaaataagaaaacttatcttatcaaatgtaattaatgtcagttatagatcctagaacaatatacttcaaataatttaataacttgaataacttaataattttacaattctaataatcaataaattataatttttccaataaactaaaaccattaaaaaaaaattgaaaataaggagaattcttttttaaagtgaatattttatctaaatattggaaataattttcttttcacaatatatataaggctaattagtaannnnnnnnnnnnnnnnnnnnnnnnnnnnnnnnnntgccccctgaactttttgggccgttaaaaattcccc

SEQ ID NO: 142632 - DNA, 578 bp, Cannabis sativa
  modified_base (469)..(486): a, c, t, g, unknown or other
attttaaaaatattattaaaaaataactttagaaattataatacattattgggtaaattgcggcataaatacctaatgaaattaaattttctaaatgttttgtgaagagagtattccctgattcagaatatttcaatgttaaaaatttgtattttcgctgagtcgtataattcgttactccatattccttctcagaaatagttttggtaaaactaagataactttctcaattttaatttatttttaatgatcttcatatcattggaaagataattgaattccctataatttttatgaaggctattttcattaaattcatatagttgttggtcaaaaatagtgttctttctgctatactgtaagagtacaaattttaatgttagggccttggccggtatcttattataggtagtagtgacgagataacaagtcttttagtgtaaaatccccgcttcaagcctccattggnnnnnnnnnnnnnnnnnntgaatggctcttatacatgagtacgtcactctggttgtttcctggattaatgactgaccctacaaacgaacacgagtgtttctagcgtgctt

SEQ ID NO: 142633 - DNA, 1295 bp, Cannabis sativa
gtgttttaaagttagttgttattgtaataaaattaaattagttgttttattttaatttaggtaaaattataaactaatgcaggaaaaaaataaaggaaaatacaaatctgtatttttttccctttttttatgttcccgacggtttaaaatcgtcgccaataataatgtataggcgacgattttaaaccgtcgggaagtccacgttagcgacggtttttaactgtcgcctattttgcccgttttacgacggtcgtatatgcgacggttatagaaactgacaggattactttaaacgactgtttaaaaacgccaagaaaaactatttttatagtagtgcacattaaaatatcctttaacacttctttattgattgaatatgagaaatatgtcaaattaataataaaaaagtgtaaaatttacaaaataaccacatccaaatcattttaagatgacacaatgtaattgcaattttagagtggctgttaggggtgttcataaaatagtcgatccattccgtaaaatgtgaatatctgtacttgtgcatattagattggattggaaaattcaaaatctatacttgtgcggattgaatgttgattgaaatataaaaaccgatctaattcaatctacacatatttataaaaaataaaataaaaaattatatataaaatgaacattttaatgtaataaaaatagtaatttaaaagtctaatacatataatacaattatattttaaaatttaatagatcaaatgtatattctattcttatatataatattttttgtacatacaatttaaagcaaaattacatttctttaaacatataaattttttttcttcctttgaatttgttatttgtttgttattttatttatcttaatttgttgtaggagacattaaataatttaatattaaaaaataacatatccaattcgtacttttgcggattgaattagattggatttgagctattgtttgaattgtattggatccaaaatataaaatatacacttagtgtgaatcagatgcactactacgagtaaaataatagggattgaattgaatgaacactcgtgccatgtatttattttgtaaatattgttataaaaataaaaacataaagtctattttcgagaatactcaataaatgtagtgcatagggaattaacagtcaacaagagagtagggtaatactaagagcatctccaaagagataccaaatttggtgttacactatcactaaatttggtgtcaaaaattatttctactccaaccacaacaccaaaaattaca

SEQ ID NO: 142634 - DNA, 500 bp, Cannabis sativa
gtcagtaaagatggaatcaaggtaaatccaagaaagattgaatgtatcaaggattggctgagatcgaaaaatagttacaaaggttagaagtttcttgggtctggctggttattatcgtcgatttttagagggattttctaaaatttctacgcctttaaccgagctcactaaaaagaatcagcggtttgtgtggatagacaagtgtgaagcaagctttcaagagctgaaatagagattgattatcgctccggtattagccctactgtcagataaagaaaagtttgtagtttactgttatgcatccaaacagggtctgggtctgtactagtgtaggctgattgggttattgcctatgcatcccgtcatttgaaagagtatgaatagcgatacccgactcatgatttagaactcgtcgcagtggtgtttgctttaaatatttggtgacattatctctacggagagaaatgtgaaatatgtactgaccataagagcctcaaata

SEQ ID NO: 142635 - DNA, 718 bp, Cannabis sativa
attgagagcaaaaatttaagtttgctctttgctttaagttttagcagacacacagaatggtggtacaaactcgcaaaggtgtggttgaccagggtgactcactacagacagatcctaccttgtaaactcctgaaaatacaaggtcccaccaggaaccaatcctgaacaaccaaacacgcagccacctactgtgggccaaggtgtgacgtcccctctggctgggatcacacccggtgtgcaagagactgggaacactagttcagcagccgatctgagcattcccaccactagaatcccgtccacaaccaatgctcagacgacaataagagatgctactgagattcaaaacctccacaatgctcttgggctcatgcatggtcacactaatactttgcatcatgacaggaagagctttgtgctgtaatgaaccttgcgttcgaagagcataggtgtcagttcattgaatggggggatagggagatggaaacattaaaggctcagcaggcagccaacgatgaccgaacaagacaagccaccgtactgatacagaaagcctaccaagttgttaatcagcaactagttgctacgtccagtatcccactgggcagcacagaagaaattcatgctgggcatgccacccaaacacataatggtcagccgtccaatccctggtcacaggttccacttgtgggccaagtggtaggcggccagaccttat

SEQ ID NO: 142636 - DNA, 547 bp, Cannabis sativa
catggtgattgatttactttcaagaaatttggacttaaaacgatgtatgtatggtttggatgtgattcatgtttatctatgtgtttttgatgattgtttgatgtttggaaattttttacgaaacataattggaattttattctgtaattatttttgttggataatatagaaaaaattaagcaattcacttttttacagaacttaattttgatttcatttgagttagttaagaatttttgaaaattggaaaatgtctaggggtggtgacaccccatgcgcgcgcggattaggtgacacacgggtgtgtcacccgtgttcagacaaagggatgttcgaacatgcatgcccagggtgtctaaaatcaccctctacgcgcacggacaggctgcatgcagcccccttggtcgagttttctcggctgtgtatctccacctgcgacgcgcggatggtatgcactgcataccatccccaccaaagtgatatttgaaccttgaaaataggtaaaaatctattttttttttacttagttggttatcttatttttaaa

SEQ ID NO: 142637 - DNA, 525 bp, Cannabis sativa
gcactgtctcgacaagtaccgtctagacgaaggctgacaatccaggagactctaaaaggaaagatgactctaaggaatcaaccaagaacaagaaaaaacagaagaagcacgacaagtacgtgccaatctacacaatttatactgagcttaatgaaactcgagaaaatatctatctcgcacatgagcacagggttgcattccataaacctgagcccatgaggcatgcgagacacaaaagagatgcaacaaaactttgtaagtatcacaaggaaattgggcatatgacagaagaatatcgtcaattgaaggacgagatagaaagtcttatctcgtgaggttacttccggcagtatgtgaaaagataaggtgatggacataactagccaaatccgcccaataacccagacaactagggactacaaactcctcctcttgaaggagaggacattctggttatctcgggagggccatatctcgctggagaaagtaacaatgcccaaaagagatatgtaagggaagttaaga

SEQ ID NO: 142638 - DNA, 1022 bp, Cannabis sativa
tactattttgaaaaatatagggttcattttgtcatttaacaaaacagatggtccaattgataacttttgtaaaacacagggtccaaaatagtatttatcctaaactaaatgtgaagatgagatatttctaatttattaagaggttaaattagaaatactaaaattaataatctattaggttatataatggtagtggtccccacaaaacaagaacaactttattcttatcttctcccgtcaagaaattagagaatcttatgtcttgtattctcctgtcaagaaattagagaatcttatgtcttgtattcttggaagatcattactcaaagatccagtctatctatcactgaattaattattaagggctttagatctatgattatatacttaataatatgtaatattttgtgtatggaatttaatcttgatattgtatattttatgagtgttaaaaaattctaaacaggtggtatatattaagatccacttttgattgattctttgaggatttaggtttatattaaaaaagtttggaaattttgaaaagtaggattttgattttccatgattatgagttgtgcttctgacacaattttttatttggatcgatttaaatttactaatgattattttagttttttactattcagattaatattgttgtgaattttttggtgattaatatatgatatgcatttatgtatacaattatttcatattgagataaaattatttattacatccaaactataaatattttttggagtgttgctattataaatgattatggattaacatatatataatcaatattattttcattacatatatgtgattgcctttattggttgaatctcatgcatgttttggttttcttgagtaaagcaatttcttttagccattacgttggcataagcagggacggaataagattgtgggggctatagcccccactaaaaaaaaaagttagtgtgaaaaaaaattaaatatcttctatttagttaaataattatacaacaaaa

SEQ ID NO: 142639 - DNA, 553 bp, Cannabis sativa
agttctggtccaggtttaagtacaaagtagaatgagttcatgtcatagtatggtgtagactattaaatttttttagtaaaaaaaatctaaaaatagttttaataaaacttgagtcaaacactattaaatttttaaaataacaaaaaacagttttttattctcacttttaaaaatataattatgaaaactaaaaactgaaaatacaatcaaacaactttttttttttttttttgcaaaacctttctcacaaagtcatttgtgttagaacattgtaaattcttaatcctaattaattcaagagaatcaaagaataaaatatagattagtggaagcgtaccggtgtccgtagaatcgacctttaattggtatgatctttcaatttgcatcaaaaacctttgaagcccttattttcctaatgatggggattcaggaagtctgaaaaatatgatagatgcaaatggggaccattacctgttatattaccaactgttaaaacagttagtaatatttattaactacttctaatttgtcccctcatcaaattagaaattat

SEQ ID NO: 142640 - DNA, 1466 bp, Cannabis sativa
ttttttacccaatcttttggtatgtcgctccaacatttttgagaccaaatggcatgactttatagaagtatagaccgagatctgtttcgaaacttgtatgttcttggtctagtggatgcatttttatttggttgtatttggttgtactggttgtaccctgtgtaccctgaatataccctgaataggcctgaataggcgaataggcgtccatgcgtccatgaagcttaatatttcatgccctgctgttccgtccacacactcgttttggttcggtactagtacgggatttgtaacccaagctgggtagagagcttcaattatgaaattattgttgcgtagcttctctacctcttcctttagggctagatctcgctccttgtccaacaatcttcgcttttgttgaactggtcagaagtttggatcaatatttaggacttgtgaaattatagaaggatcaatcccgaccatatccccatgtgacctggcaaaaatgtccaggtttgctctcagaaattttatcaatgatgactttacttcaagcaagaaaccttttccaatcttaagctttttggctgaaatatctgggtcgatctcaatctcttctagttcttccacaggtccaacattgttgcatgggtcccaaagtcgaggatccacatctttatccctgccttgggaagtttcccatttagaaatgttttttcccttgtccgaactctggcaagaggatacttcctttttagccttggctggcaaggttataatattcctgagaaacttgcgggtttcctcttagacaccctaccccattctttgttggaaacttagggcatgagtgaaatatcgacgtaatagtttatcatgcttcggcctagcatgacgttaaaggcgaacggaacatccaataccaaaaattgtgccattatagttatacttgtcggagcttgaccgacagtgaggggtaagccaattttccctagaggtgcgactccttggtaggagaaaccatacaagggctggagacagggggttaaatctttgagttggagtcccattttcatacgtggtcttgaataagatgttggaagaggctccattgtctatcatggttcgggccaccatcttgttggctatctggacttccacgaccaacgtgttgttgtcaggaaatctgatcttgacagcatcttcatcattaaatgttatggtgggctcccctacccatgggaccttcgacttccttttttctacggccaggactacttcttcttgctcgtgctgtactatttagacatacctctcccgggctttgcctaaatctctagctatgtgcggacctccaataatgacttgcagatgtccatctactggtggtggtagcaagtctcggttgttatcgcgcctctgatttttattggccttgacatacttctacacgtgcagattatttttccttatcagaaatt

SEQ ID NO: 142641 - DNA, 535 bp, Cannabis sativa
tttttgtgcatttgtgacattaaccctttcaaaatctcattagtgtaattatgctggaaagagtatatacagttctgctatgagaccaactcaaggaatcctaaaggtaaagctagaccatttccaagcccaaatcccaaccgtaatggtgtacgtgttaagcccatactagcttcagcccaatacaacggacaaattgctcttattatttgatacatttacaagattatataagtttgaactttttatttgaaataacccaatttaaaaatattatccaaaaatattggataatattttcaagatacaaatatatatatttgggattattttaaaaaatacgaaaaataataaaaaacaaattacaaaaaattgttgtacagaattttaattattttatggtttttaggattttatttacataaaatacgttcttttgatgttttttatgtcgttcttttgttattttgttattgattttttgttatttgcatattatttttttggattaagatgcaaaatggtcttaaatttg

SEQ ID NO: 142642 - DNA, 585 bp, Cannabis sativa
aaactaacatgttaaggaaggatttttctcacctgtgaattgagtgatttcattggctaatgtgggactttaataatcactataaactataaaatcaaaatacttaagttttcttacttttacaagcattaattatgtgccaaataaatatataagtggaagctttagtatacatttttttttttatataaaatcacacaaaatataatatttatctatactacaaatatattttgttataaaaaaaattataactaaaagtaaaaaaattataactaattgtaaaatattattattatgttgtaactaaaaagtttatgactaaagtattagtcacaaaaattacaatttgctgtgactaaatatacttttagtcacaatacttgtgactaatactaatattatgctgtaactaaaaggttcgtgactaaaggtattaatcacaaaaatcacaatttgctgtgactaaatatgcgtttaatcacaatacttgtgactaaaactaaattagtgacatgtatgtaaatactatattttagttacaagtaactttttgttgtaactaaaactcacatttagttgcaa

SEQ ID NO: 142643 - DNA, 2669 bp, Cannabis sativa
  modified_base (198)..(198): a, c, t, g, unknown or other
  modified_base (376)..(380): a, c, t, g, unknown or other
  modified_base (2586)..(2586): a, c, t, g, unknown or other
gcctatttggggtataatcaaattaaaatgcatctaccagaccaagaacatacaagtttccgaatagatatgggtctgtattgctataaggtcacgccatttggtctcaaaaatgcaggagcaacataccaaagattggtaaataagatgtttaaagacctgattggactgaacatggaagtgtacgtggatgacatnctcgtcaaatccaggaaggctgggctcacatagatgacatgtacgaatgctagaaagtcctcaagaagtataacatgaaactcaatcccttaaagtgctccttttgagttagctcaggtaagtttctaggctttatcgacaatgcccgaggaatcgaagccaatccagagaagattcnnnnnctcctggatatgaaatcgccaacaaaaaccaaggaagttcaaagttttactggtcaaattgctgcactcagtaggtttgtttcaaactcaatagaaaagtgtgttccattcttcaacattctgcgaggaaataaacaatttgagtggacggaggaatgtgaaaaagctttttaggagctaaaaacacaactcgcaaaacctcttgtactctcaaaacctctggacagagaagaacttgggatatacctggctgtcatggagcatgatgtgagtgccgtattgatcagagaggaaaacaacattcaacattcggtctattacatcagtaaaagactcattgaggctgaaagccaatacccattgatacaaaagctcacttactgcctgattctagcaacaagaaagctaaggccctactttcaggatcaccctatttaggtatacactgaccaaccgttacgccaaatattacaaaaaccggacgcatctggacggttactcaagtgggcggtagaattgggtcagtatgaaattacctttcaacccggacagcgattaaaggtcaggccttgtcagactttgtagtagaatgcacgggcaaggaagaaatcatatcagaatataaccctgagccagtacaaatacctcagccaagtaatagtgaagacaagctgacttagaaactacatgtggacgggtcggctacggatcaactatccggtgcaagaatcacccttgtcacacctgggggacaacatgtgcacgctgcagtcaaatttggatttaaggaatctaataatgaggctgaatatgaagctcttattgtcggtctaatactagcccaggaaatgaaggccgaacatattgagatctgcagcgattcacaactggtggttaatcatgtatctagagaatacaagctcgggtggaaaagatgatagcgtatctgagcaaaatacacgatctgctcgcacagttcaaaagctatgcactcaggcaaattccaagggaagaaaacacgattgctgatgcattagctcggcttgcgagtagtaatgtaagtgatagagcgaatctgattcctattcagtttctcgaagaacctagcgtcactgacacgaaagagattgaaatgattgatacatccccaaactggatgacgataatagcaacctacctcaacattggggaactcccagataatcgaaatgaagctcaaaagatgagaaggaaggttgcacggtacatcatagtagagggagttatgtatagacgaggattctccatgccattgctcggatgtgttacccaagaagaagctgcacaacttttgtctgaagtacatgatagattttatggaaaccatgctttcgggcagagtttatctaagaaaattctaaggcaaggttatttctagccgacgatgattgaagattccaaggcctatcttaaaaaatgtgataaatgccagagacttttgaagatacctcgagcaacgcccaatgagttaactcagatgcaaagtccttgggctttcgtcatttggggaattgacctgatcggacaattacccaaggacaaaggtggcgtgcagtatgcagtggttgcgattgattacttcaccaagtgaacagaagccgaaccattagcaaccattacgtccaaaaaagtgcaagactttattgtgaagaagataatctgccggtttggatcgccatacaaaatagtttcggacaatggcaaacagtttgacagccagtcctttactgatttctgtacgagccatggtatcatcaaaagtttctccgcagtggcgcatccccaagcgaatggtcaagttgaagcagtcaacaagacattgaatgatatactaaagataagacttgaggatgctaaagaaaactggccgaaggaacttcctaaagttttatggtcgtaccgaacaactgagaaaacagcaatcggacagactccatttgccatggcatatggatatgaagctatgttgcccgtagaactcgagccaccatcccacaaaatattgacatatagccaagaagccaatcgtgtactccttgctgaatcacttgatgaaattgaagagaagcgaaccacaacaaacttaatactgatggcccatcaccaaaaagtagctcagtatttcaacaaaaacgtgaaggattggaaattctttgtgggagatatngtcctaagaagagtatttttaaacaccaaagacagtaagacaggtgtgctcggacctaactgggaaggaccatatcaggtagt

SEQ ID NO: 142644 - DNA, 608 bp, Cannabis sativa
tcatcgtctacaaataaatctctctcagtggtggaaccagacaatggattgagaaggggccgaagaaagtgtatttttacctattttttttaaaatagttaataattcatgaacttttaataatattaattatgctcttaaaatatacactttattaaagattttctctggacttttatatttagttcttctgaccttcaattccattatttcatttaaatactgacgtgtctttgtaaattagcaattttgcctgtaaactttgacaactattaaatggtacccctcaaaatttaaatgagaaaaattcaatactgattttaataaatcttataaaattaatttagatcctaaaaaaatattttgaataattaaaaaaattaaaattttaaaactaattaagtgatttaaaaaattatttattaattttggtgttattttttaagatacgtgtttttaaataaaataaaatttgaaaatatttttttttaagaataatttaagtttttaagtaaatttaatattttttaattaatttaatatttatatcaagtttattaataacattttattaattttttttgagaattaatagaatattataattt

SEQ ID NO: 142645 - DNA, 547 bp, Cannabis sativa
gcttttggactacacccaagaaaagttgtgtgtggtacatcgttagagatagagttcaagactacgagtcactctagtatattctaagttacattcacaacacaaaggttcaaattgaaatatacatccgtttatgctcaatcttattgcttaggatattgctcaagaaaatattttttaaaaaatttaaggtgggggattgttggaattttgtgaaatcttattaaaaaaataaaatatgaagtgtgtaagtaaatggagtcagcataggatagaaacactttattagaagtgtatataatgtccaagtttggaacttgggttggtgccccaaggggtacccaattttgtgcgcatgggtgaggactcacacaccgaaccaccacacgcatgcgcgtgctgccgctgtctgtccatgtcgtaccgtaccaagctggcgggtgggtgggtgtcactttatttttttagagaaaatttatgtgacagtcagtagtcccgtgagccgtaaggggaaatatcgggtaagctgtgcaatcccacaccgcct

SEQ ID NO: 142646 - DNA, 771 bp, Cannabis sativa
attacaggtaaaaaaaaaatgtaatcatcatggttacagtaaaaatgtaaccattgagtagtcatccatatatatatataaataatttaattgggaatgatacaagaaataatcatatatatatattaatttattattatggtctaattaaattttttaatatagagtgattaattattattataaaacacatattactactcgatctataaatggggactactgcaaaattagttttttctcattggtttataactgtcttatatattatatcccttcgatttttaaaaccagtggctatgtgtcataaaaatgcagaactttaaataatggtttataactattgggaaaatcactttaaatgactgtttataactgttgggaaagactttcatcagattgtaactgacagtaaaagttactttaaatgacagtttataactgtcggtaaaagtcactctatttatattgccttaatataataattcatattcatgagagaacaaataaaagtaacaaatcagttggcacagatgccaaattgaaagtacaactaggatagagtaaggaggctctagcaaaactatgagctatcttattcgttgattgcttaacaaaataaacacaaatatctctaagcttcaaaagtaaagctttacactcattgataactgtaaagtcattttttggcaagttaaatgccaaaatattttttcttttatggtaagatttatttgcattcataatcgattttcttaccttgtatattca

SEQ ID NO: 142647 - DNA, 1126 bp, Cannabis sativa
atatttttgaatttttgatatagagtaaaaaaaaatatttttttaattaagtaataaaattaagcatgtaaattctatttttttagggataagctgaaaactattattttttttttttttgaaaactattattttttattacacattaactaaatataactccaaaataatattaattgataaatactatcttttataatcaaaataccaaatataacctcacataacttatcaaaattaaagttcctataatgtgcataatgggaatatataacctaaaattaggtaaaaattaaagaataataaaataaaagtaacaattaaaatacaaaatgaaatgtaaatagactgtaatttctttttattattattattattatcattcatttgattaaaattttatttttaaaaattaatattttaaaaaataatatttaattattattatcttttaaaaatgtcaaggtattactcattaaaaaataagtaatttgtggtataaatacttaagtttaactctgaattgtaaataaatatctaagtttaatttttggtagtaataatacctaaattataattatgaaacttctataggtacttgactattaagtgttaagtaaatttccacttggcaattgatttgtccaaattattaaattttttttttttaaacaaaattagtttaaatatactaataaaaaaatgacacatagataatgacttaacattaaatggttacgtactttcagataggggtaggcatccgatccaatctaaccttttttttttcctcattcaatccaatccaatcaggatttggaaaatcatcatccgatccaatctaagacttcaaaatccaatccaatttaatccaattacttattagattgaatcggtttttaattagctagatatccaattacacacctaaattttaatattaacttaaaaaaatatgaagaaaaatctataaaaactaagtatcaccctttatttaagtcttatacttcataaacatactatcttacaagtataatgtagccaaaagttttaaataattaaaataacaatatttttaagtaatacaattgaacaaaacatcgtgaaaataaatacacaaaacaac

SEQ ID NO: 142648 - DNA, 585 bp, Cannabis sativa
  modified_base (137)..(138): a, c, t, g, unknown or other
  modified_base (213)..(216): a, c, t, g, unknown or other
  modified_base (422)..(422): a, c, t, g, unknown or other
  modified_base (549)..(555): a, c, t, g, unknown or other
ataaattaaatattacaaaattaactatttgaaaaataagatattttatggttagaatattaaaaattttattaaaaataataaaataagtttgaagaattttatggttagaaacccttaaaatttctattcaaacnnaaactaaccaatttttcaaaatttcatgtaattttatactagaattaattttaattaaaaaaaatatctaataannnnaaatgttaaaactaacatttatcaaatcttataattttaattattaaaatatatttcaaaaaataacaaatttgaaaaaaatatgatatggttagcaaatttttgaaatttaaacaagattattttaaaaaaatattttaatatcaaaataagatcattcaaatttaataataaaaaaaatgtaatatctaatcttataattaaantaaataaaataatctaaaattttaaaattaatcataaggctattttctgtgaaaaatcaaattttttaaaatcaaagcctactaaaatctaaaactaatttcaattaattaaaaaaattaataaaannnnnnnttattctgataattagatttttaattgaaa

SEQ ID NO: 142649 - DNA, 539 bp, Cannabis sativa
gccaaccagggactaatagctttctggaagagcttcctaagaagctataaacagaagcagaagcctagccaaatgactaatgttttctatatgacacttagctagatatgatattcaaagattttatcaaagagaggagtcatttagaaaaatacatacccattggcacatgctacagttcttgagatcttcattttcctagttgagccagaatatagttcctcaaggctacaaggcaatttgctctccacagctggtggtttctttggaacaaaaccttcactatacgaccggaaaatattttcaccaccaccgaatccaccaaaatttcctcctcctacatctgactgaaacctcatagatctccctggtcctgatgaaccaaaactaaaatgactacttccaaagaactctgcaaagatgtcctctgcattcctttgattaaacccatttgagcaacctccatttccaaatggagatccagaagttcctggtggtggcatgtcctttaatccttcttcaccatattgatcataaat

SEQ ID NO: 142650 - DNA, 848 bp, Cannabis sativa
attcggatggatttgagcatggcgaccggactaaaagtttcctcatagtccacgccttctctttgggtgtaacccttggcgatcatgatgaatcccgattgcaaccccaacttctgggcttggtgatcatgatgaatcccattcatctgatcactcattgtcgaagtcttcttcttcgaatggtgctccaaatgtcgagaaagctattatgcccttgcctacggtgagctcacaaaccatgtccaaggtgtccataccagagaaacccgaagtggttctgcccaaaggagcctccaaaggaaagaaagtggtgacttcatcctcaaagggaaaaaaacctcaaggagaatcctccttctgtttcatcatcggattctgaaccagaagaagagactgaagatgttaatcaagaatcagagggtgtgtctaattctagtgaaaaatttgttcccaaagaacaaccctctgttgatgattctgggtctgaaagtgaagtgcctaaagttgatcttgtcaatgcagaactagttgttgtccctgttgcagttccaaagaaggacaaaggaaatcgacccattgttactccaagccctattttgcctcagaaaaggaagaggtcctctagtattactcttgaaaacttcaatccccattctcattatttttgttacaatgataatgctagagatatgcaattttatgagaatagtaattttactgctgagaaaaatttcaatgtcattgctatgtggatggctatgtggtggatactttgatctattttgatggctatgtggatcaaattttcaaggagttttatgctaatatcactgatgagtgcctcgatg

SEQ ID NO: 142651 - DNA, 603 bp, Cannabis sativa
  modified_base (42)..(49): a, c, t, g, unknown or other
ttttgtcatttaacaaaacacatggtccaattggtaactttnnnnnnnnacaaggtccaaaatggtatttaccattttttaaatctctcaaaatcttatgaaatttcttcaaatttgtaaaaaaataaatttataatacacttacatataaataagatcaatatattattgtcaagagagcgattacattcaaggtaagtgaatgaaccctaattttttaattttttattttgaatgtaaaaaacaataaaaattgtattttttttagcttgattcttatttttttttcatatatatgtgatagaaacaataataaatcttatactagccatattattactattttatagtttttgagttgaaaatcttatttttgcaaagtgagctcgaggttgaagatgaatctcagggagctcaactatgtcagttgagatagtgattttagtagagctcgactatgttagttgagattacagttttagtagagctcgactgttgtcgatcggtcgagatgacagacgttagggtagagctcaactagatttgagcccaatttatatttttaattgttaaacttttttcatcgatgtttgctaaaagagt

SEQ ID NO: 142652 - DNA, 536 bp, Cannabis sativa
ataaataaacaaatgaatgacaaagttataattatgtatttgagtaaaaataaattgtgaacaattcgttttatgaatttggcaaatcattttgtgtatttaatacaataattatattgtatttaatttttatattattttatcaaagcactatgttttgtaacactataaataaagcaaaataaatgtatgagctgagctgtttcaatgatttgtttctacttcttttttcttttttctttttctttaagtttaagataacatctttcctttttcttttttttttttcttttaaacaaaaataacgtatgtacatcttgatggaggttacaatataaaaagatggaaaatacaataaagtagaaatataatgtgttataattaagtgggatcctctcaacactcaattattactaaatttttacattttaaattttgacatatattaaattatatcttttaaatttttttagctattaaaaattttatatcaaccaaggacggacccattcacaataatgtgggggctatagccc

SEQ ID NO: 142653 - DNA, 912 bp, Cannabis sativa
tgtagtgtattgaattaaaattagatttgaattagtcaaaatgggataaaacactttattattattatttagttgatttggtcaatatagaagcattcatttatacccttaattattattccatcgctccacctggctaaacataatgtattaaaaaaattataaatgattaaaatggaaaattagttcagagaaaaagaaaacgagaagtcattcttttcagttccgcccagaccatcttctccggtgaaggtgaagttagtgcatgttgtttttttttttttttttgtaatttcattttaattcattcttattttaatttattcaaagtttactacatttatataacttatagattatagaaatatcaaccatgaatacaattgcataatatcattgcagaatacattaatctttagaaaaatatttcaagaaaacaaaaagaaattttaaaatccagatttgaagaacctaaaaaaaaaatggaacaaaaactaaaagataagaaatataaaacccaaatttctgagccgaaagattgagttccttgcggagagtactcgtcctcctcttattcttcttccttgtcgttgctctcttctaagtctattttctccgagtcagaaatcaacgcagtcgagacactcatccaactcaatggcgactcagaaagcagcaaccgaaacgatgtcgtagtatcggtgaaagtactcgaatttggagcagctcgtcatgatgacgatcaataggcgatgagcgacgacgtttgatcttattagtactgctcccaaggatgatgaggatgaaaacataaataaaatatgtaagtaattttgtggacataagaaaacatgaatctgggataaatcctcatatctagaatggtttttaatgatcttcggacgaccacac

SEQ ID NO: 142654 - DNA, 740 bp, Cannabis sativa
tggaataaaaattgtaataaaaatggtattatgctattgcttcaactctataatgaacattgtaattaaataaataagttgtatattgacaaaaatacctttatttttattatttttaatatttaattttttaaaaataaaataataaaaaagggcaaaagagataatttctaataatgtaattatcattatattggttttatgatgtaatggggattgcaataagtaaataagtagtgtaatgaccattacaatataaagtcattacaaaggtttaaaaatcaaagcaaacaatgtaaaataatgattccattacaattcctattacagtaaaccaaacatgccataagttcatcatctttcccttctccttctttcttcactccctcctctcttacatcttctctatttattcttaaccaaatcacactaaaaatttgcataaagtatactgttgatcacgcttttagccaatgacagtgagtcaaattaaaacaattgagaataattaaaaaacaaaaagtaaagtgaataaagtaaaggaaatactgaatttatagagattcggtcccttatggttggtattagcctacttcccgttttgttgtattgacttgtgagaaaataaataagaatgacttattctctctcgaaagctcttacaatgatctctctaagtctcaaactctaagtcttatgctctaagtctaataactcatctaatctctctctctctctct

SEQ ID NO: 142655 - DNA, 1151 bp, Cannabis sativa
cccgttggatacaaatgggtatgtgtacgtaaaagaaatgagaaaaatgaagttgtgagatacaaagcaagacttgtagcacaaggtttttctcaaagatcaggtattgattatgaaaagacatagtctccttggtggatgcaataacactaagatatttagttagctggctgtgagtgaaaaactcgatatgcgattaatggatgtagtcacaacttatttatatggatcactagatagtgatatttacatgaagatccttgaaggatttaagttgcctgatacatataattcaagcaatcgagaaatgtactcaattaaattacaaagatcattgtatggattaaaaaatcaggaggcatgtggtacaatagacttagtgaatatttattaaaagaatgatataaaaataatcatatttgcccatgtgtttttataaaagttcaagttctgagtttgttatcattgttgtttatgttgatgatttgaatattattggaactcctaaaaaactttcagaagctgtggaatatctaaagaaagagttcgaaatgaaagatttaggaaaaataaaattttgtcttggtctacaaattgagcatttaaaatgtagaattttcattcatcagtataagttgatgtgaaaatttgagacggttttatatggataaatcacacccattgagtagcccaatggtagttagatcacttgatgtgaaaaaagattatttttgacctagaaaagaacatgaagagctccttggtccagaagtaccatatcttagtgcaataggagcattgaatgtatcttgttaactgtacaagacctgatatagctttctctgtcaatttgttagcaagatttaattctactccaacatataaacattggaaagggattaagcacatacttcgctatctccagggtactattgattaagaattgttctattctaatagttgtgggccacaacttattggctacacagatgtaggataattatctgatccacataaagccagatctcaaactagctatttgttcacttctggtgacactgctatatcctggcggtcaacaaagcaaactctggtggctacttcctcaaatcatgttgagatacttgcaattcatgaggcaagtcgagaat

SEQ ID NO: 142656 - DNA, 616 bp, Cannabis sativa
cgggccgcggcatgcccagaccatgtcgcgacacctgggacaaattcccaggtccattcagaggagcgggccgcggcatgctgtggagcatgccgcggcatctgggtgcagaacccagaaaaccagcaagctcaactcgaattttcagcctaaaagtcaatcttttcaatccaaaaactcaaccaaacattcaattaaccaaatattgatgctaacaattaacaaggaaataaaactcatgtttcaaacatcaatttccatcaataaacccaagatttcagaatgcatgacacacaaactcatgctttaaacttgcaatattcaaactcaagaactttgagctaaaacccaatactcacacctaatttccagcagcaactaaccacaaacagcaaatgaataagcaatttcaagcttgacaagcattcaagaattactctctaagctcaattcaacaaaaatcaagaaattaacaagattaagcatccaattcattaagcatgcaaaaatcaagatcaacaacctcaaacatgcttctaccatattatttcagcaaggaaacacaatctaaaaccataaaaactacctcaatcacttgcacaattaagcctcaagc

SEQ ID NO: 142657 - DNA, 824 bp, Cannabis sativa
cagttgttgaatgttattttaccaggatctagatttactaacatgtatgtttaattatgttatccgcatttttgtaaagatgacacatggattttaatcaaggaaggctgatgtgttgcgagctgcctaacttcctcaaattgatgctacgggaagataaggacctcaacctcgcgggaagaggttccgtgataaggagttccctgattgccagcaacgcagaaggtatccacgaaccacggtctccattcgttccaagaacaaaagacatctagtactgcaacaccctactagtttaggagtgttaacgtgattttaatttaattgtgtagctcgctgctaatcaacgagtttattgaaaaacgtgattaattaaaactttatttcattacttataaatactaaaataatatacatatataaattcgagatcccttttacaaaatatttataaaagtttcatagcgcatagtacaaaagttgttgcccagcgactagacaatatacaacaagctatctcaaagaccgtacgctctaagcctaactgtcctgacatgtacaatcttcatctgctcgctctcacagctgctcaaccttagccttgcccttacctacacatgaaaacaatatctgtgaatcaatagactcagtaagaaaaacataatcaataacataactacaacccagattataatcaggtgcccatacatcaaaccataaccctatccccgtatctcacatagtactgagtccagaatgttcgtacaacagtactattgaccataatattagcctatactcggtactctagtcataccgatgtg

SEQ ID NO: 142658 - DNA, 1004 bp, Cannabis sativa
aacacattattattagtgtttttaagaggttttgagagctccaaaaaaaaaattaaaaacacgtaattagaaaaggaccctagagctaccaaatagagatagaaacttagagagagagcaaggaagagatggagatcgcagcttcgaagtgttcttcattctagttcttttcttctccttcaactcttattaaatattatgattttcgttataatgtctagtttagagtagttttcttttagttaagggttatttcaaaatccgtaatatgaattcttagtttcattattgaatgttaatttttagtttccattatatcaaattatttattttcttctatgttcaatttcatgattattgttttaatcttgtttaaacgaccgatacattaggttttactttaatctaacgtcatcttaggattactattcacctaatagtctaggattctaagtgtttgtgacaaattacaatttttaattatgatgaagaatagaacctaggttaaatgaattatatgtttcattgatttgttgcctaaattagtctatctccataaatcacaaagctttatctaagttaaataaattgcatgcttcgtggatttactgcttaaataaaagagttatttattgaacgcttcgccttgattacatacaataggaaaattgagataattgactgcttcagctttatctgcgggattaatagtttgattagaaacttaaattacattcattaataggaattaagaatgattgtcaagggaataacctttaactagtttctcatatcgtagtctcaattttaatttgtttttattttctttttatgctatttaattacaactcaaaaccccccctttaatttatatttgatagtgaataataacttaatcatagtccttgtgggatcgacccgtacttgcttttatactgaaataattaaaagtattaaaattaaaaaaaaatagtaaattttatacggcatacgacacgcatcaa

SEQ ID NO: 142659 - DNA, 2464 bp, Cannabis sativa
  modified_base (771)..(771): a, c, t, g, unknown or other
  modified_base (1339)..(1344): a, c, t, g, unknown or other
  modified_base (1877)..(1882): a, c, t, g, unknown or other
tcacaattctgatagtggtacccctttgtgaaatgtagcccagatccatcccggaatattttttggtactagtcacattgagttcgtgctattaagacgtgaatatgaagattagttttgcgttaaatttggttagaaattccccctaaatcaaaaattgaaaatattcttcttttgagggtaaattttaacaagttttttccttactcttacactctttagtgttctgttaaaatttcacccaacacagctccaaaaatcatgaaatatcatggggacaaagccaagaccgttgtgcatcacttttctattggacgcgttgagagaaaaaatagttttcatgcactaacaatcattttaatcgaaatattgaaaatctcacatttctcatagtggaacccctttgtgaaatgtggcccggacccatcttagaataattttttgcactagtcacattgaatttgtgctactaagatatgaatatgaagaattatttcccattaaatttacttaaaatgctcccctaatttaaaaattgaatatattcttcttgtcagggtaaattttaacaagtttttttcttagtcttgcactcgttagtgttctattaaaatctcgccctacacatctctaataatcgttaaatttcacggagaaaagctaagaccgttgtgtatcacttttctattggatgcgttgagagaaaaaatagtttccatacactaatagtcattttaatcgaaatggtgaaaatctcacatttctcatagnggtacccctttgtgaaatgtgatccggaccaatctctgaatatattttgccagtagtcacattgaattcgtgctacaaagacgtcaatatgaagattggttttgcgttaaattttgttaaaatgaccccctaattaaaaaattgaaaatattcttctttttagagtaaattttaacaaaatttttccttaatcttacactcgttagtgttctattaaaatcttaccctacacagctcaaataatcgtgaaatttcacaaggacgaagccaagaccattgtgcatcacttttcaaagggagacgttgagattaaaagaagttttcatgcactaacaatcattttaatcaaaatagtaaaaatctcatcacttttctaataatggtacccctttgtgaaatgtggctcagaccctgctcgaaatatttttcaccactagtcacaatgaatttgtactactaaaatgtgaatatgaagattagtttcgctttaaatttggttaaaatagcccctaattcaaaaattgaaaatattcttcttttcaaagtaaattttaacaagttttttccnnnnnnttacactcgttagtgttctgttaaaatctcaccctacacatctccaaaaactgtgaaatttcacggggacaaagctaagaccgttgtagatcacttttctattagacacgttgagagaaaaactagtcttcatcctctaacaatcattttgatctaaatagtaaaatcgcacaattctgataatggtacccctttgtgaaatgtggcctagacccatcctggaatattttttgtaactagtcacattgaattcatgctactaagacgtgaatatgaagattagttttgtattaaatttggttaaaaataccccgtaattcaaaaattgaaaatattcttctctttagggtaaattttaacaagtttttttcttactcttacactcattagtgttctaataatatctcaccctacacagctccaaaaatcatgaaatttcatggggaaaaagccaagatccttgtgcatcacttttctattgaacgcattgcgagaaaaaatagttttgatgcactaacaatcattttaatcgnnnnnntgaaaatctcacatttctcatagtagaacccctttgtgaaatgtggctcggacccatcttagaatattttttggcactagtcacattgaattcgtgctactaatatatgaatatgaagattgattttgcattaaattttgttaaaatggccccctaatttaaaaattaaaaatattcttctttttagggtaaatttttataagtttttttcttactcttgcactcgctagtgttctattaaaatctcaccctatacatctctaatagtcgttaaatttcatggagacaaagtcaagaccgttgtgcatcacttttcaattggacacgttgagagaaaaactagtcttcatcctctaacaatcattttgatcgaaatagtgaaaatctcacaattctggtagtggtacccctttgttaaatgtcggacccatctcagaatatttttttggcactagtcacattgaactcttgctactaagacgtgaatatgaagattggttttgcgttgaatttcgttaaaaatgccccctaattcaaaaattgaaaatattcttcattttagggtaaattttaacaagtttt

SEQ ID NO: 142660 - DNA, 606 bp, Cannabis sativa
  modified_base (27)..(30): a, c, t, g, unknown or other
actaatcagattgtaaagagttttatnnnnggcataaaacccaacactatattgtttcgggtttgggattagctcacccgattcagtgctgagttttaagttgggctccattggtgtggaagtttgctttgagccaaggtagcccgtgtcctgaagtagttgcattgtgaagggtcgtcgtgtgacagagatacctctgttgcatcgagcaatctcgagaccgagaaagaaatgtaaaggtccaagatctttaagtttaaactttgagtcaagggttgtaataaatgtttgtaaagtagtagtgttattagttgccacaataatgtcatcgacatatataagtagagcaagaaatgattctggagagatcttaatgaataaggaatgatcattttgagattgggaaaaaccttgtgaaatgagtgtggagcttaatttggcataccattgtcgggatgcttgttttaaaccatataggctttttgttaattcgcaaactgcatttggaggtaacactcctttgggagtgtaaccttgtggaagtttcatataaacatcctcatttagatcgccatggagaaaagcattgtctatgtccatgtggtg

SEQ ID NO: 142661 - DNA, 2166 bp, Cannabis sativa
aactttaagtttgatgtggttcgcttctcttcgatttcattaagtgattcggccaggagtacgtgattgatatcatggttgtacgtcaatctcatgtggatgttggctcgacttctacagtcaaagccatggcaaatggagtttgtccagttgctgttttctcagttgttcgatatgaccataaaacttcaggaagttcttccggccaatttcctttggcatcttcgagtatattctttagtgtatccttcaaggtcttgttgactacttcaacttgaccattcgcttgaggatgtgccactgcagagaaacttttgattataccatggttcgcacaaaaatcagtgaaggattggctgtaaaactgcgtgacattatccgaaactatttggtacggcaatccgaaccggcagattatgttcttcacaataaagtcttgaactttccttgatgtaattgttgtaagtggttcggcttccgtccacctagtgaaataatcaacagctaccactgcatactgcactcctccttttcctttgggtaattttccgatcaggtcaattccccaaatggcgaagggccacggactttgcatttgagttaacttgttgggcggagcctgaggtatcttcaaaaatctctagcatttgtcacatttcttaacataggcctttgaatcttcaatcattgttggccagaaccttgccttagaattttcttagataaactctactcgacagcatgatttccacagaatccgtcgtgcacctcagataggagtcgtgcaacacatctgagcaacgacatagagaatcctcttatgtacataattccctctactagatttaccgtgcagccttccatctcatctttcgagcttcattccgattatcgtggagttccccaatgttgaggtaggcggttatcgctgtcatccagttttgggaagtatcaatcacttcgatctcttccgtgtcagtgacgctaggcttttcgaggaacttgataggaaccaagttcgccttatcacttacattactacttgtcaatcgagccaacgcgtctgcggttgtgttttgttcccttggaatttgcctgagaccttagcttttgaactgtgcgatcagggtcatgtattttcctcagatacgctatcatcttttctccccgagctttgtattatccggatacatgatttaccaccagctgtgaatcactgcagattttaatgtgctcgactctcatttctggggctaactttatgccagcgattagagcttcatactcgacttcgttgttagatgctttgaatccaagcttgattacagcgtgcaggtgttgccccccaggcgtgacaagggcaattcctgcaccagatagctgatctgtagctgacccatctacgtttagtttccaagttggattatcttcactgttacttggctgaggtgtttgtaccgactcggggttgctttgtgctacgctttcttctttgcttgtgcattctaccacaaagtctgctaaggccgggcctttgattgatgttcagggttggaaagtaatctcgtattgacccaactccaccacccacttgagtagccgtccagaggcgtctagcttttgcaatattttgcataatggttggtcagtatacacccgaacaggatgagcttgaaaatagggccttaactttctcgttgctagaataaggcaataagcaagtttctctatcaatgggtatcgaccttcggcctcaatgagtcttttactgatgtaatagaccgggtgtcgtatgttgttctattctctgaatagcacgacactcatagcatgctccgtgatagctaagtatattccaagttcttctccgaccagaggttttgagagtacgggaggttttgcgagttgtgcttttagctcatgaaaagctttttcacattcctccatccactcaaattgcttgtttcctcgcaggatattgaagaatgggacacacttgtctgtttattttgaaacaaatctgctgagtgcggtgatctaacaagtcaaactttgcacttccctggttttagttggcaacttcatatccaggagggcttgaatcttctttggattggcttcaattcctcgggcattgacaatgaagcccagaaactttcccgagct

SEQ ID NO: 142662 - DNA, 907 bp, Cannabis sativa
gaaaatatgtccaagatcacaactactcattggatattgtaatgggagatcacaagcaggcaaactgcaacatgattgcaaaaatgataaaaaaaaatttctgtcaatcaaaagggatcatagaccaaatgacattatgatagacatgattgatgattttgaagtttcaatgagctatcaaaaagcatggagagcaagagaaaaaactttggagttaggaagaggaaggcaagatgaatcttatcagcaactaccaaaatacctaaacatgctaaaagaaccaaatcctggaacaattgcacaattggaaatggataagaaggatcgtttcaaatatttgtatctagcattttcaaactcaatagaaggttagaaacattgcaggttagtcattgtaatcgacggaacgtttttaaaaacatcatttggaggaactttattcactgcttctaccatggatgcaaacaacaacacattcattctagcatttgggataggagactcagaaaatgactgctcttgggaatggttcttcacaaaactaagagaaaacattcagagatagagaagttatactattaaaaaaactaatttcgtttcatctaaattcaagctaaaattttaaatttatacataaagcatataataaatttcatgcattttgctacaattacaaacaacaatgataaaaaataggtgttatctaataataaataaaaaaaaaatagaaactggtttccacaaaataaaaataaatgattatgctttgaaaaaaaattatttatcatacgcttacttactgatctcattaaaaggggtttccatgagcagggttgacaatcatatcaaacaggcataaaagtattgaaaaggcggtgagcaatgtctacccaaaccacttccacgg

SEQ ID NO: 142663 - DNA, 645 bp, Cannabis sativa
atgcgttcttgactttgctgtagaagataggtagaaatctaggtttaaaactttgtgatttcctttgtagtaatctataacactttgtggttcatgacgttggtccttgatcgtacattgtctgtgtttcaccttgcttgttcaaagcttcgtgaaactttgccctaaaccaaaaaatttcaaacttctaggttttgagttatttttgaatatttccttctgttaatctgttgagtactcttggtcggcatatttgcctgtttattgttcgatatcccgaccaaatactcatctcgtgtgttatcttttgttgatgaaccctgttgagttttggggaagtgaacaccgaatagaccaggacttgctttaacttctgtacgaggatcaccctcatcttcgtgccaatcagtcctcttccatcgacggattttctcattcagcttttcgtccagtcataggatgatggctcgaacaaagtagacaatgcttaaggtcaacgcatctgatcctcacgtggcccagctcaccacattacctaggcccgaacaggatccgcctgtcgaggaggagggggatcatgaaggggacattgaagtctaggagattgaggaataggacaatgtttgtcctggcagcccttccgag

SEQ ID NO: 142664 - DNA, 550 bp, Cannabis sativa
acaaatattgtgactaaaaagttgtcaccaaaagtaataatttttgtagtgttgtggtggtttgtattaatataaaaaatgttcatttaagatttgttttgtttatgttaatatcttttaaactatagtatttttatattttttctcttggctaacgcagagttcctctctacatatatattcattattctcatattgaactaaatgaaaaaatggacctaaagtttcgattattagcaaataaccaaaaataattaggggctatatggttctgtttttgctaataatcgaaactataagagttgtgaattcgtatataagctcctatggtttcaattattagcaaataactgaagccacaagaggccatttgccttctgttttcttcgacccctttcacctagaatgccttgtttcaaattttctaaaaattgtagctaaaccatactcaaaaaaaattgaagctaattagaggagatttttatgtagtatatgatattataataaaatcattttgagttaatacaatatagatataatattatatata

SEQ ID NO: 142665 - DNA, 1157 bp, Cannabis sativa
aaaattaaaacaagtttaaaacaagtaaagtaagtaaagtaaagtgggtatacaatgtaatttcctcaattttcatttaggaaagggctatttacaatatgaaaaaaaagggttattttcaataatatcggaaaaattattaagattatgataaatatgacataaaaagtaaatgtcactaaatatgacattatctaaccaatcaaactaaaaatatagtttttttttaaaaaaaaaaccatataaaacattgaaaagagaatctgaatttaagattcataaaaaataaaaacttaattgaattaccataaaaaatattaaaattcccttcatatattttttttttaaataaaacaagtgaaactacagtaatcaccgtagttgtcacttgtgctggaaaagtcaccggagtttgctgacggtactggaaaagtcgtcggagtatttgtcagtgccggaaaagtcaccagaattgtcgtcagcaccgaaaaagtcattggaattagcattgtcgctgaaaaaatcacaggaaaaatcaccaaggtcaataatgactattgtgttgagttataaatatctcgggcaagtggtactcagcttccactcttgcccaaaactgatctttggattggtttattcctataattgaattttgagaatgtcatatatacacgacataaatgtacatcttcttcaagtgtgtatatgacaaagttctagttgaagatattttgaaagataaattagaagaagggagagaaatatactgaagatgtgtattcattcaaagagtaatatgctcttatataggggtgtaaaatggcttgataatattatatttcttatcttcaaatttttgaaagagttaaattttggatatgatttgactataccatccaatggttgagatgatgatcaaataaatccagtggcccaaattcatttgtcaagtatctttactttaaattttgggaagagtaaaattttgggaagagtaaaattttgggaagagtaaaattttggatatgatttgactataccatccaatggttgagatgatgatcaaataaatctagtggcccaaattcatttgtcaagtatcttttttttcaaattttgggaagagtaaaattttggatatgatttgactataccat

SEQ ID NO: 142666 - DNA, 642 bp, Cannabis sativa
ttctatgtaataattctttttttatatagcggttaattaggcattccatctatttttgaaaaattatgaataatttatgatatcaaaaatacgagttcaaaatagtcaattgcacttgttcaaaagtaaaagtgcatgctattgaatgtttgaaccatactttcagcactgtaaattattataaattctttaaaaataggtggaatgtgctctacaaataacagtacaaccaaaagtgtcaaccaacgactattataactgagcccatgatgttccaaaaatctgaacccttcaggtctaattgtcctgattgtacaatcttcatggagctccaaactcactgcttatgcattttttgactttcctttacctacacataaagcatatatctgtgagtcgattaactcggtaaaaaaagcataaaacatagcataaaaatatgctttcgtaatttaggctcccatacaccctattacaaagtattagcaagcggccaacgtgtgagtctcgaacattcttgacaagagtataaatagtttgtaccccttgaagttctactaacctctttaccacatgcactcagtacctcaacatactagtgttggtagggttagttcaaatctcctaaccttgttaccacat

SEQ ID NO: 142667 - DNA, 572 bp, Cannabis sativa
caattcttctaatcaaatttctgatgtaccgagaccttaaactcccttcaattcgtagcacttgcacacttcatcccgaagagtgtctcgcatgcaatcttcctcccgaagagtgtataacttacaatcttttttctgaagagtgactaacttgcaatcttcctccctaagagtgactaacttgcaatcttcctccaggaaaggtgactcatgaacaagacctctcccgaagcttgattaacaatatccaaggtgttcaacctgcacaatttcaacaagaaacaatacagagtaatacaataataaaatactaagaacttgttggactcaagttcttcacacaacaaagaaaaacactctctaactttgaaaagtaatatagaattgatacaccaagagagctaaccaatactagcgacttaagggtgaatttatacactttagaaaccctctagatcgtggtcaagcaaccgagaaacgatcatgtgacagtcagtagtcccgtgatccgtaagggaaaacaccgggtaagttgtgcaatcccacaccgcctggggaaggtcaagtgggat

SEQ ID NO: 142668 - DNA, 800 bp, Cannabis sativa
gtaaaatactaaataaacattaaacaagtcaatctccaaaacatgagtaatttcaagtagcttcaatgacatgattatgaaaaaatatacttatacatataatcctgaatttcagttctattacacccttgacagatttcaatttatttttatttagctcatgaaattatagaatgcaattaactaacaattgaaccactttatgcatgccaattacaaccatcaatccactaacacaaaattccatatgcttgcaatactcactattctccactaatatagagtaatgcacaaccaagaatcagaaggtctttctaggcttgtaatgttaggcttagggtaaaggtagttgaaattgtcatttaggctttcctataccataagtttctccaatcatgtcacccacaatacttttcatacaatctcaatatccctttttctaattacatgagagatattttttcaacaaggttgcaaaaactttatatttatcttttttttatctagatttgacacaggttgtcagatttttcttctttttttttttcaagttgttgccaatcaacttttttatattctctcaattttcacatttttttccacacacatacaataaacttcccatcaaaattcccccaaactaaagatctacttatggtataattagggttaaatatcatggatatttatgggtttatctttttaggctcaatatgtgtagaacaaagcataggttaaggctcaaaaagggtagctaggataaatttacaggaatggcttgaaaggcacaatcgatccaa

SEQ ID NO: 142669 - DNA, 806 bp, Cannabis sativa
cttgttcctgtattgcaactttgtatcatctttggaagaataggaatagatgcatatttgagttgtcttgtgcttccactagatgtctctaagcttggaagttaagaaaattgttcattttagaattatgagcaagggtccttttaaagcttgccaaaaaaacttgtatttatttaatgtaattaaaagttggtagtggtggtggtttgtggctgctgtctgtagcagcttgtgccgtggggttttgttgtggctttgtgccttttgcttgtccttgcttgtttttgaattaaatttcctcttttttttttaaaaaaaaaataataataaaataaaatatttaacaaaataaaaataaattttgtaataatttttatatttttaaaataataatattaagtgtaccaatatgtatttgatacatgaacaaaagtgtacacataagtaatttatattgaaaattaattgtaaaaaataaataacactttaaatttacaaacagttcagtagtttggagagtcttactatcaaaatttgagcttagaaaattaagtgcaagtggaataataattcaaaggatttagccgcaaaaaaaaactctattttgtaactgagacttaaaagtttttatttacaatgcagttacattttttttttcaaaaaaaaaaaaaaagaaaaaaggtcgacttcatctaatatagccacaattttgaaaatgataataaaaaatagggctatttacaaaaatatggaaaaataaagataagttttgatatatatggcataaaaacttaattacactaaat

SEQ ID NO: 142670 - DNA, 569 bp, Cannabis sativa
tatatatctagctagtaacaattaacaataatgaaattaagaaggcaaaattaacataattaaatatgtgcagggacataattggatgagtaaacttagataccaatctcaaataaagtagtatggaaaagaaaaccattataattttttaatgtatattcatgggtcatcagtaaaaggaattaagtcagctaaacgtttggaccaaactaaagaaaagttagaattaatatttacactgtttagttaatttattattattttacaaactaattaattaactctgtatattcatagaaaagctcagtgcctataaatataaatataaacaaggataaaccaatagcacacacacacatatatatatattgcttaatatctgcttctcttccacattgatatatgatgggtctgtttccatgcctctattctctaatcttcattcttacttcttcttcttctctttccatgccttcttctccattgtgccatacccatgaaacctctgctttgctccactttaaaaactctttcactaacatcagtgacactacctactgtagtcgtta

SEQ ID NO: 142671 - DNA, 959 bp, Cannabis sativa
ggttctttggcacgttctccctttccagagaaagaacattttgtcattttaccttctaagcaagattcacaaactggtaattcacctaaggtgatatttttcaatgtaccacctctggttaacctatgaagcctatcatagcctatatgtccaagacgtaagtgccatagatatgtttcgtcttcattttcgatcttttactttttgtggtttctaggtttagctaccttaaacagttggttattaagcgcaaatggttcatctggtctaagaactaaagcccttgttccatagatgcaacacaaatttgaatgtcatttcgagaaatgatagaatcggaactcgaaaatttcaatttgtattgttgcaactgtaaacatgaaacagaaatcaagtttttactgaaatttggaataaacaaaacattgtctgaattaaaaattctgttctaaaacttgagttttgctttttctctagctctaactgataccatttaatcattaccaaccttaagtttcaactctccaaattttgaataattccaatttttaagtaattgcattgaagaatagacatggttagtagatgttgtgaccgaaagcggtacattttacatttattaacccgtaagcgcacgaatctttattgtagtatggagattgtgaagaacgaggtcgaactcatgggaattgtgcgaaatcaaagaaaatacttatttaatctaagttattacaactctaacctagttctgaaaatggtaaagtttttggtaataaaataaaataaaataaagtattttaacggtaaaaatgacagtaatagatattttcagtaatatttggggatatcattaagtgttcaaaatccacttaagtgtatacaaaaatattcatgtttatattgattctcataatttaatcagtaatcaaaccaattattttctaacaaaaatagatttt

SEQ ID NO: 142672 - DNA, 653 bp, Cannabis sativa
aaacgatggtgcaaactcgtagaggcctgactgatccagcaaattcacagacagtggatcctgcagaacccaggtaaggcaagggttccactagctgttaatcctggacagccggtgaacgtggggaatggtgtaacaactcatgtagatgaaatcgcgcctggtgtgcaagagactaggaataacagttccataccaaactagggcattcataacacacctgttccgcctggaaccaacacccagacgaccatcggagattccaatgagttacaaaatctctgcgacgctcttggactcatgcacggtcacaacaataccctacatcatgataaggacgaattccacactacaataaatctcgcgttcgaagaataaagacgtatgtttatcgagtagagggatagagagatggaggcattaaaggctcaccatgcagagattgaaaatcgtagtcggcaggctaccgtggtaatacaaaaagcctaccaaagtgtaggtcagcaactccaaatgtcgttcccctaggtgaggtagacgaagatctagcgatgaatacttcttagattgcaaatgttcagccgcccaatccccagtcacgagttccactcgtgggcctagctgtaggcgggcagactttgtctagtaattca

SEQ ID NO: 142673 - DNA, 547 bp, Cannabis sativa
  modified_base (447)..(455): a, c, t, g, unknown or other
  modified_base (517)..(521): a, c, t, g, unknown or other
aagtttaatatagtattatataaaaatatgacatataatccaattcaatataatacaatacaatacgacctaatacagcattcaaacgagcccttaatgggtaaaattagaaaaatctcagtttttatgtttaatttttctatccattataagaaatctttcatttttccatcatatggactgagattgttctaccagttgaaaaaaaaattaaaaatattttttagcaaaaaaaaagataagtaaaagttgagtttgacttatatatatttatatgaacatattgtttttttgaatgaacatattgttaatataatgtgaaaagaaatatttttttaattttttttttaattaagtagttaaattaagggtagaaattcaaatttctcaattaatattcgttattagattaaaatttgatcgtttaatatttttaaaattaatatnnnnnnnnnaatttgtttagtaactattcatggataatacgaagtgttccatatatatatctattctatannnnntgtgcctatataactgaaattcttgg

SEQ ID NO: 142674 - DNA, 796 bp, Cannabis sativa
ccacgtattttgggcgaattcaggggcaacagacataaatcaaggaaatgaattgttcggggaatctaccaaaccggttttacaggccctagcaaaccggttaaccagtttgcaccaggtttccccaatcaattccaaatttgctcaaaacatgtccaaatcccaccaagctctctagaatacctataatgaccttccacgatatattccaatcatccataaaaattaacatacaaaattaaaacatgccattgatgacccaagtttgagttttcaaactcaaacttggtcatccaccacaacaaacctcaaatacagcaacaagaacctatttccaactaaaattaaacttagaaattgacttccaacacaaacaaaccctaatagcccctatacttcaaaattgcataatcaaaccaaacttcaagttaagaaactaaagaactagggtgctagagcttacctccacttggaaacactaagatcttttgctgaatttccaaaaaaaatgaagaatcaaggtgttgttctcctggttttggtggtgcatgagtaaagagagagaaagagaaaggatttttctcaaattttgtttttctttatttttttcttacttttcctaaatgagtaaagggtttgtggttacttcttgctgaaattaaaatgactaggtgtcaaatccctaagcagccacctatttcccccacttgccaaattaccaatttgcccatggcgcttaaacttaagctaattcaagcctagggataaaatagtcaaaaaccataaccccgctcaa

SEQ ID NO: 142675 - DNA, 555 bp, Cannabis sativa
ccactgggcgaggaggagctaagtatgtggtggtagcagtcgacttcacaaaatgaacggaggaacatatcgactaacaaaagagagttttataatcaagaagaataccaggaactttgaaaattgtcgttggatcaacttgtggaaaaacgaactgagttgcaaatcaccaacgctggataccaacacagagttacaagatacttcaacaaaaaaagtcaagaaaagactattcaatgttggagatttggtgttaagacgagtcttttgcaaatatgagagatgcattagcatgagtgttcaacccgaattgggagggtccatatgtcatcgaagcagtagttcgactcagagtttctaaattggctcgactccatggctcgctaataaagaacgactggaatttagaacatttgtgaccctactaccaataaacaaatgatgtaatgtagaacattttttctttaaaaattacttaaggggcatttatgtatgattaaccggaataaatctggaaatacattgtataatgaaaaccagtcatttcaatttttt

SEQ ID NO: 142676 - DNA, 612 bp, Cannabis sativa
gagtaataaatatagtcaatacactgattaacattggtcaaacttctattgtgtaccttatcatttcgcgtccgccaaattgtattgacaacattcgaagcataaagaaagacttcacctgtattaatgccttgttttcctagtccccagatgaatttgaccgaatcccacaaatgaatgccagaatcaaaaatggaaaagatcccccatggggacgaccgccacaaatgaaacgcccgattacaagtgagaaataagtgctccaaagtttcctcactacccccacataatgggcaggtcacatcctttatatggaatctcttaaaaagaatagcgcgaacagggagggccttagaaagtatgcaccaccatcatcttatggcgttctaatatgttactattccacagtttgtgctagagggatggagctacatcataatgaggagccctttctaaagcttagatgagccaagcagatttacacgagaaccgcccattactctctttcgtccgaatccatgcctatccgtaccctggccagagggtctaccccttttaggatggatgaaacagattctttatcaaaaagataatttaaattctgaatatccc

SEQ ID NO: 142677 - DNA, 623 bp, Cannabis sativa
gaatttaattatttcttttcctttttatatataattagttacttaaaaatattaacgggtaaattaaaataaaaacattagagtcggtcaatgatattttttgaataaaaaattaaaaaaaaaaaagtcacccaataatttttcataaaccgagaattcagttatatagccacaagaatagatatatatatatatttacataaatagtatttttgttataataatactatacttttgattttatttagttaatatttaattttttgctaaataggttttttgtattcctttcctcggtgtttggcaaaaattacttctcgttatattggaaggttagtatattatttataatattaaaaaaaaatttacttgaaaatgcatattagtagagtttgaatatcttatatattcatccatagtgaagtaggttctgtgaaaaatatactgcggtcggatgggtggcaaaaatcaatatgtatgtaaattgttttggtattgtgtctgtgacttttgtgtaggtcttataaatttgggaatgattaattgtaaagtgttatgctgtcgaattttcggtagcataacattttcaatttgataatagtttttatttaaaaaaataatta

SEQ ID NO: 142678 - DNA, 781 bp, Cannabis sativa
cctcgttatttgtattgacttaagaacaaggagaatggttccttttcgtagagctcttacaatagtatgtcttaatatgaattcttagacaaatcttttgaccctttgctcagtgaatatgaatccttatttatagggctataagcttgggagggaagtatttcccttcacattacaatcgatataagtagaaagattgcatagtaaatacacttatcgtgggattcagacagcttgccatatctctgtaatatgatcccaattagctaattgttgtcatgttgcgtggcttgcccactgctcggctaagaggacctcttccgagcgaatgtttgtgttgttctgtctggtatatttcttgcgagcaaggacatagagttgattctacgtgttaccattgtgtgatgccacgtcagagtgcgaaaattgggatatctgcttattttaccagataaaagagtttaagctctcctatataaagtgccttatctaaaccctaaaatcctaagtgaagtgaacctaagctgaattctaagtcataagtggcaatccctaagcttaaagtttgaactctctctctctctctcacacacccaccattgcatctctcttaacttaagatttgccatctccgattcctatattgtaaccttaagagagcttcttcagattccacctacagtgatatgagtagtattatctctcaggatcaatacaactaaaaggatagtatgtcattacccgctaactaagagagtcgatgtaaagaccgcttagttta

SEQ ID NO: 142679 - DNA, 642 bp, Cannabis sativa
  modified_base (573)..(575): a, c, t, g, unknown or other
taatggatcttacttttaatctcacaatttaattatctaaatgagcttttctttgtaaataaagtagctagaatgaaatagagggctataaaaatagtgtattgttatattttaatttaaaaaaaaaaacttgaatggtggtgtaaaaggtgtatcaaattcgacacttgctaaaaattagaccaaatttgacacaaaatatacctcgggcaaaatttacaccagaattaatattatattttttatttactcatttgccactaattagaatatttttatattcatctaaataatttttttttatatatatagtttcaataaaaaaataataactatgttgactttgagatgagttaatctaaatcttgtccattaaagtataattgtaaaatttgagctaaatataatgatattcaataatggatgtagcttctcatctttcatagtgatggaagagaaaaagaggaagaaatataatgataggagaaaaggaataaagagtgggatattataattaggtctctaattaatcaattaagcacaaattataagggaaatttcatttttaatgcnnnaaaaaataccttctaacaaaatttagactcataattaatttatacaatttaatgctattgttttcaa

SEQ ID NO: 142680 - DNA, 970 bp, Cannabis sativa
  modified_base (587)..(595): a, c, t, g, unknown or other
attttaccaatttaccaacaaccaacatatcaacatatcatatatcatcgatcgatgtaaacatgtaaacctccatgtttcgccctatttggtttgcgaacctttcttttactaaccgctaatacgttgccccagcgttctttagtccgaacgacatgactttataacaatagagtcccatgttggctatgaagcttgtatgttcttgatctgggatgtacatttttatctggttatatcaagaatatgcgtccataaatgacatgagctcatgcccagcagttgcatccactaactagtcgattcggggaagtgggaagcaatcctttggacacgccttattcatatcatagaagtcaatacaagttctccaagttctgttaggtttcgggatgagaacaggattggcgatccatgagggataaaacacatcgcgtataatttgttgactaacaacctgtcaacttcctattttagtgccccttgcctctcggaatctaggggcctccttttttgtctcttcgctgggtagtttggatcaacatctaagtgatggcagataatcttgttggaatatgttttaccannnnnnnnntttactaacaagtatgtttttaagatcctaaatatgaatctctaaaatgatgaaaataaacacataaaaggtatgagaaatcttacattggttgcagcagaattaaatgactccttccgctcagatatctaacccttgtatcctttcagtcgcaaagtatcaccaagatctgagcccaaaactccttcagttgtttggattcttcccaatcttacatactatgattgaggactcacttgttatgtgcgggcatgcactcaatcactaatggcagaattttgttttgtggagaacactaaggattcaaaatttagagaagaaaggaagaagtctcataaacctagagagaaaactaggtttttaactttagaggca

SEQ ID NO: 142681 - DNA, 513 bp, Cannabis sativa
gagagagagagagagagatggatgtttggtttttatttgtttagggataaaattgggtgagaaaaatactataagtatattttgcatgatgcaaaatattctagcatatttttagtagaattaattttatgcatataatatcaaatttccttttgataaaaactattatatattattttctataatattcattaattattatttatttaaacaaagaaaaaaaaacattactaatactatatttatattaatataatatacacttttatgcaaatttgtatggttaaatatttaattatgtatactttaatttatttattttttatattacactacgtggttattgacttaaaaaatatttgaagaaaaaataaaacaataaaattttactacattctcaataatgaaaatatatagcttggtgtgtgtccaagcgattcagagcgatattttatgccttcacaatttgtgttttgtaaaatgatctgtaaataagttggctcattacttggc

SEQ ID NO: 142682 - DNA, 504 bp, Cannabis sativa
attttattttatatgcatgtaaaacagatttttcaaacactggttttggtattgtaaattattatgaattttataaaattttccaagatgtcttgttagagagtctcacattgctaatgtgggaaaaaatagaatgtattagaccatcttcaatggaagatattaaaattgtactatatttggcacaaaaattagttttgtagtaaatttacatcaaattttagcattatcctccaatgcacaattacaaaattttgatgtaaaatattttaattaatgtttttattaaaaaaataaaactaataactttattatcaattttattattactttaatatgtaagacaataaaataataataatataaatacttcataatttaatgctatagttaattatactaataaaataatacaaatgacataattgtaaataaataagtagtgcatatattgtgatgtaaattttacatcatagcaaatattgtgccaaatttggcacaaaa

SEQ ID NO: 142683 - DNA, 1281 bp, Cannabis sativa
gctggaggtatttcgatcctatattcatatagtgtatatgttcatttattccgtatgttatatacacatacatatgtttcagtttatacaaataaatgtctatcatgttcttcatcaatctttaagatttagcgatagagtaccttgcccacacaatacaagtcaagttctcaatcataatgcagaagacgatgattaaccaaactgaaggagagaagattcaagtttagatcttgataatgctctgcgacagaaaggaacaagggctagagatctgaatggaaagagtcatattatttcgctgccatcaatgtaaagttttctaaactttatatgtatttatttcatcgtattagaaaaatcatatttagggtgttagattatagaattataattaacatacatgatagtaaatctagatcctggtaaaacaagttccaacaactagcgttagagcaatggtaatgacttactttcatgaaatatggatttaaaatgataattttgttgatttagatgagttcgtgttgctttatgtgtgaattgatgaatgtttatgaattacaaaattttccatgaaaaataatttgttctgtaaataatttattttgattccttgtgaaaaattaaaaaattttggttttcgcaaaactcgattctgatgaaaaacgaagaagatatgaaggttcaaaaatcgggatccattgggtgttgagggtggtgctcatgcgcaccaaaccctcggacaaggtgggctacgcgcgcatatcctcatacaaaaccgtgtctgaagacacggtgctgcttattcagacacaagacgcctagcacgctaaccctacaagcgccgagtttcctcagccaaggatcctgttgatccttctatccacgcgcggacagggctgcatgcagcctgtcccttggccaagggtgaattttcacctaaaaattcaatttttgtgaattttttcactattttttggattttttcatttcaaatccctaaatatctatagaaaatattatttttaacatttaaacctaaatattaatgtttcaaattaattatatttaattttttaatagattattattaattttgatattttaaagtttaaatttaaaaattagttattttatattttgaattatggatagattttaaaaagggaaatttgatctttcatgcttcaaaataacacatggtgttattttgaaccaaaaaattacacattgtgtaaatatgcctattttgtcattagtaaccccaaaatgccctcc

SEQ ID NO: 142684 - DNA, 583 bp, Cannabis sativa
aggtaagattcttatacgcttgaataaaaaaaagaggccatcaattcatcttaaatgtttactttgtgcccaacatgaaaaataatattttgagtttgggtcaattactagagaaaggttatggtattcacttaaaataaaataatattttcttaagagatgataaaagtaatttgatcgccaaagttcccatgacaaagaatagaatgttcctcttgaatattcaacatgatgttccgaagtatttaaaggcctgctacaatgagtcatcatgactttggcatctacgcattggacatctcaattttggcgggcttaaactcttagagaagaaggagatggtgagaggccttccatgcatcaaccaaccagatcaactttgtgaaggatgtttggttggaaagtaatctcgaagaatttttccaaaggagtcaccagaaagagtcacaaagccgcttgagctcatacacactgatgtctatggcccaattaaaccaaactcatttggtaagagtaaatattttctcctctttattgataacttttcaagaaaagtacaggcttatttcttgaaggagaaatc

SEQ ID NO: 142685 - DNA, 1094 bp, Cannabis sativa
  modified_base (1006)..(1008): a, c, t, g, unknown or other
ttgtctttgagtggctcgcggatttactggttcccatactttcttgatcattagctctttgagtaatttctcctctttgagttgatcgacaatgggttcttgaccgcctctaagtcacacttgcttcttcacgctttgttctttcctctcgagaacagtttatcgtatttcccccattagggtctgtaaaagtcctcgctctatgggtttgggaagaatgctggtaatttatagcaggtgacctccgttcccacggttgcgtcccaaaatcctcctcattctcatgagagatttctcgttcatcagtttccggttgtctcccatctggctggtcgttctgattttcagggggtgtctcactttccctggattgttcttcctaggccttttcttgtctcctggttcgtgagccacgaggtttgcctcgcggtcttctcaccccaggttcaggttgattttgagcatttatcccctgtgcggccctagccgggctgcatcacgctctaactcagtgtttcgactctgtgcctcttctagacgacgtctcaagcagcagttttctatttcataagctcattctcccacaaattgggcacctccacgattgagctcttcatccctcatcccagggttatgaccattcccatgctgagttctcctcgagcgtgttgtccgcgtactaggaccaatgttaggtcgaattctttgagaacgtgtggttcgtgcactggggccaccctaattggcccctggaaacgggtggtccttctggattgcgggctggtagatcttctagagcacatgggctcttccctagaacgatgattggtttcctcatttgggttgttaacattttctggattttcagccatgaaggaggttgtttttcttcaaaagaagggaggttttttttctgagcattttcacagaggctctcaatgaaagcacgaaactgttaacgcaggttttcgttaacttaatttgagcctcacagtagtaatttcannnagaaaaataaaagctatagaaataaagatatgaatacagggtttttacatggttttgtagttaaaattctgcattagtccacgagt

SEQ ID NO: 142686 - DNA, 780 bp, Cannabis sativa
tccaacaaaaacggatcctgagctggggtagcaatgatatctccgaacagactccgactctaggaggccctacgcttcgaattcatagcttccaacaatgaggttgagtatgaagccctgattggaggactgagattagcaaaagccgtgggggccacgagagtagaagtcttcagtgattcacagttggtggtaaaccaagtgatgggagaatattaaacgcgtggagaaaaatggcggcgtatgtagcaattttccgggagctactccatgagttcacgaattataaagtggaaagaatccccgagaaaagaatgcccacacagactgtttggctaagttagcatcagacagtgagattgaaaaacttggggtggtgctcgttgaacgcctcatggaaccaagcattaaagccaaaaatattgtggcagtagttgagctagagcccaattggatgatccccatcattgaatacataaccaaaggcgggttgcctcaagaaagggcactatccagaaggatacagtaccaagcgcatcgatatgtgatgatggataacattctctaccgaagaggactcagcatgccgtacctaaagtgtgtatcggaccctgaagctaagcaaattatgctagaggtccatgaggggttctgcggagatcatacaggaggcttgagtctctcaaagaaaatattgaggcaaggatacttctggccaaccatgaagaaagactgtcccgaaatgtgatttgcgaacataccgagagccccccccccccc

SEQ ID NO: 142687 - DNA, 571 bp, Cannabis sativa
ttttgtcataacacatttatatcagattataattaaattttattttgacaaaaatcaatttagggttcttgtattattttgaaaaatacagggtctattttgtcatttaacagaataagggtccaattggtaacttttacaaaacacaaggttcaaaataatatttacccttaatactaggggtgttcaacaaaatttataaaccgtccaaactaaattctgaataaaccaacaaaaaatacaactcgaaataatataatgaaaatccaaatcgctcaatgaatatatttggtggtttaaaaattattctaaatcgcccaattaacccgaataaatcgaattaaaccgatttatatcttttttaataaaagtttatatattatattacataaattatacttattaattaaactattttatatttaaagtttggacatttgtatgtttaacttaaaacttatactttatagttaataacttttattgtatttgaaaattaaagttaaagtttaaaatctatatcatattattactattttttattattttatttaattattttatgtttact

SEQ ID NO: 142688 - DNA, 521 bp, Cannabis sativa
  modified_base (267)..(276): a, c, t, g, unknown or other
  modified_base (478)..(478): a, c, t, g, unknown or other
gagggctgggttcagtatgtcatacccactacaatgggggataagttgaggaatacctctttttttgtagcaattaatcaaaaatacattcatattatatttcactaaaatttaaccacttttatgagtggattccctaatataccactaccctacacttaagtgtagcacatgatttatattaatctaaggggtataatagggacatcatttataaaagtgtgtatattttaaaaaatatgaaaaatgaaggtaaaaatgaaaacnnnnnnnnnnaagtgggtatacaatgtaatttccacctacaatggccccctaactctcacacaaggcctaaaggagagaaattcaatcattaaataaataattgttattaattgaataagcccaattctaattgggcctaaataaaattgcctaagtggaattttattttagcaacctagtccatttaattaataaacttaaatgggcttcntatatgcatctaagcccacaagcaaacatataggctcacatag

SEQ ID NO: 142689 - DNA, 734 bp, Cannabis sativa
  modified_base (247)..(247): a, c, t, g, unknown or other
atctgatctaaagttgttatgatataattgaatacattttatgtatctgttggtgtgctagaaattttcttcaagttgaatatattaaaaaaaatattgaaaattgagttcaagatattattttgttccattttgaaaatacaagatcaaatttgttattaacaaaatagaaaatctaatcggtaattttcgcaaaaaacaagtccaaaatattattaattttatatagggtaaatagcggcataantacccaaagttttaagtttgtaattggcataaacccaatatttatttttagcggcataagtattcaatttttgtaaaactgtaattttttttttctaatttcgtcagtacaaactttgttattttcttaaacagaccgcatataagatccaaattctagatcattaggcctagacagaatcatgtagtattagttactttcaaatgttcgtttaataaattaaaaacggagtatacactgacaaaactggagaaaaattaaagctttacaaatattgtgtacttctgctgctaaaaataaacattgagtttatgtcgtttacaaactttaaactttaagcacttatgccgctatttatagctagacagactttgttgctcctttcaaccatctcttttcaggtgtttgctgtaagaatttcatttggtgagtagggacaaactcacttgcaagcttatgggtttgtagctcccactaaaaagaaaaa

SEQ ID NO: 142690 - DNA, 573 bp, Cannabis sativa
ataaaatttaaataaaaaaaatattaaataaatattataaataatatatattataattaaaattattaaaacataacaaattatatattaattcatttattggatgtaatataaaaatttaagtatttataagtaaatattcaattcgttaacaattttttttatataattatctataaaatattgttaaaaagttatataaatataactagagctataaaatatacatatatattagtaagagtaatttacaatcatatatatatattataaaatttcattatatatttttttaaacaaactagttgttatattcgatttttaaaaaattgaaaaaagtcaaccttgcgactttgaccaaaactcataaatgttaagtaaatcaagacatccttttttagggccccatgacacttctagagggctcgaaaacgtcaactaaccatttggcgccaggactcacacacccaagtctgcccaaactagggttcatgggcacgcgcgagcgttttcaccctaaaaacctcaatccgctaaggaaaccaacatggacttgacttgtttgggcatgaa

SEQ ID NO: 142691 - DNA, 919 bp, Cannabis sativa
  modified_base (342)..(343): a, c, t, g, unknown or other
ctatcatacttcgatacaaagtttgatctacctttactccttgttcatctttggttaatttcaatattctgctcatgggagtattggtatgtttggcattctcaagaccaaactttttcaccaagttctttgcatacttgctttaagagacaaatgtacccttatctgattgcttcacttggagaccgagaaaataagtgagttcacctaccatgctcatttaaagctcctcttgcatttgagaaacaaaaaacttcacttcagagttagaagtagaaccaaacacaatatcatcaacatatatttgagcaacaattacatcaatattaatgtttttgatgnnaagtgttttatcaacatttccccttttgtaatcatgagaaatcaaaaattcagttagatgctcataccaagcacgtggtgcttgtttcaaaccatacaaggctttgtctaatttataaacatgatcaggaaaatgatgatcctcaaaccctttaggttgttcaacatacacttcttccttcaaaaagccattcaaaaatgcaaatttgacatccatttgatacaatttaaaactaataatgcaagctatggaaagaagtaacctgatagattccagtcttgctactggagaaaatgtttcatcaaagtcaatacccttaacttgactgtatccttgggcaacaaaccttgccttgtttcgaatgatagtcccaaactcatcactcttatttttgaagatccacttggttccaatgatgttcataaatggtggtcttggaatcattttccaaactttgtttcgaacaaagtgatgtagctcatccgacattgtaagaaacaaatcttcatccattagtgcttcttttacagatttaggttctaaagaagaaacaaaacataagaattgaattatatt

SEQ ID NO: 142692 - DNA, 760 bp, Cannabis sativa
  modified_base (622)..(622): a, c, t, g, unknown or other
aaattatttatatttaattaatatataaaattatttaattaattaatatatgaaatcatttaactaaaagtaaaaaaaaaaagtaaatattatttaaagtcacaaaaattacaataaaaagtgagttataaacattacaatactgtttatttaaatataaattaagtgttaaaatattaataaacataaaaccgatagttcaaaaaattaaaattaaaattctaaaagaagtttgtagtagcatcgtcctcatcactagcatctccaagaacatccgacatctgtgggtagtatgacagcatttgcgaacttgtcatcatctgagatgtctgcttcccatgtggtgtcgatatcatttgagatgtttgctgtccttggagaccttcccagtaagctggatcctaacgatttcttatgatcacccaagttttatcgattctcatctaccaaaaaatttactttgaatgaatcaaatttactaatgtgaccaaaattttataattttaagtactaattgaactaacggtaatcttatgtcattttatgaaacttttttaacttttattttaaggaaaattttatttacaccctaaaatttttataaaatttatatctttaattntactaagtttttttaactttttttcttgttcataaaaatttataaaccaaaacttcccatgaccagaccgaatttttgattccacatcatcaccgaatttggcggtcggtttcgatttcggtttttttgacatggcgg

SEQ ID NO: 142693 - DNA, 576 bp, Cannabis sativa
  modified_base (279)..(283): a, c, t, g, unknown or other
acatatcatataacttttgacttgtaactaggcacccatacacctatttacaaggcttaacagatgagtaagaacgttctaactagctgtgctattgaccatgataacatccactattagcactatcatcgcactgcgggaccggcactatgttcgtaccgctatgacagcataaatagcacccaagagtacaattagccatgatatcactcttaaccagtactgtgcccgtactgacgaaccgacacaattgctgtgccgctatgatagcgccaattnnnnntctctggggtgaatatcactcttaaccaatacgatgcctgtagtgccgaaccgacacaattgttgttccgttatgatatcacctaaaacatatacaatcatagttacaaaatgcatatatctcatataacatgctatgtacagttcttacctgatttctgaattcaagtgtgctggccgacgtgaacgaaaattgtcgcgctagatggatgccctaatcacattaattgtaacacagataagtgactcgctaaatcactttctggggatttaaacttaaaactaaaagttccc

SEQ ID NO: 142694 - DNA, 897 bp, Cannabis sativa
aattaattatatttagatttatctaaattaataattttaagtaaataatatattaatattaaaataatagatagaaaataatacttaagcagtaaaataattcttaattaattttagaaccacttacgttagtaatttttccatacatttattttggtacaaattaatacttaggtattggaaattaatttagataattaattttcaagatagtaaggtgttaattttattaaaaattctattatttgggtagaaaattaatttattaattttggacctacctaaattaagtaattttcatagaaatttattttaaattgaaaatttatgcttaagattggaaaataaatttatttattttcagagctacctaagttaataaatttcattaatatagattaaaatttatactttggatataaaattaattttataattattttattcctaagttattaattttaataaatataataatataaattattaaaataaataaaaaaaaactactttcttcaaaatgttgagctttattttataagacattcgatctccattgttggtcttgtaatgttgttgtttttcatggtatccatcccaatagatggtcatccattagacaatttaacaccgtaatctcgaaagataaatattttttataaattttatattcttagtaacgctcaccccaatagtgactgcttagaatatggtttacaaatataaaaaaaatactagtagctcaataaaataagattaaccttaccatccagtccattactggagaaacgtagattcttattttgatcaaatgaaaggttgttaaaatgatgcccattttagaagagctcactactcaatttaactggtgatatctttgcatcccgttaaaaacgt

SEQ ID NO: 142695 - DNA, 501 bp, Cannabis sativa
aaaaaaaacattattgacatttatttgaaggaggctctaacccatccattggaggggaaggaacgacaaagtattgtagatcccatattggatatatgaaactcaataatagacaactgacaaatgacttgatagagctagaaatgaaggatcatgacatcgcacacgatatggattggctatccattcatcaattgctaaaagtatttagtcgcttttggcaacaaaggccagagacaagtatacattcataggagttaagatagccttatgaacttctttaatctcatccttaaagactacctagataagaaaggcatggtgtcaagcattgttggccaatctaatgaaccaagtagtggagacacggttaataaacatccacgcagtctgataatcccaaaggtctttctaaaagatctaccaggattaccctcagacagtgatgtggagttcataatcaagttagctctaagagtgcttaaattttgaaggctccat

SEQ ID NO: 142696 - DNA, 1461 bp, Cannabis sativa
aggtgcatcttatttttcggtagccgatatcgagaaaactccacaattaagtgtgcttgacctggagcaatttgagggtgggtgacctcctgggaagttttcccaagaagtgtgcgagtgagggcaaagcatggtggagacactcgtgttggtctatagggtcattcatcagtccatgaagcagctagagtggcatactcgtgcataagagccattatttaatgggtgtgatggcccaatggaggcttgaagcgtggacgttacattttatttgtccaaagcctatatagacctacataggtttcatttaaatatatcccaaaacaaaaaataagaatagctttatttaaaagtttagagggagaaaagtttttttttgagaatttttatgagaaaaattcttgagtataattgggttgtgggttgtgaggagtgttgtaaaacactgtgtatttttttttcttagtttccctaaaagatttgcagtagatttagagtcatacaaaaatttgttatcaaatttgtgtgtgtgtgtctgtgtgttattcccgctgttattttattctcactaatttcattcaaaagaaaatttgcgtaattttcttaacatgtggtatcagagctgtggttataaattttatccagaagttagatttgagttgtagcaatggccgcagacgtaggaaaggtgaaacttgagaaatttgatggtgcagattttggattttgtaagatgtagatcgaagccagagggtatgaaagatgaagaatggaatcttctcaatagacaagccctcagagttattcgattgactttgtctcataatgttgcttttaatatcgaaaaagaaaagaacacggctgatattatggcagcactctctaatatgtatgagaagcaatcagccttaaacaaagttcttttgatgaggtgattattcaatttgggtatgacggaaggtgcattggtagctcaacatctaaatgaactcaatactatcacaacctagttgagttcagctggaattgagttcgacaaagaagtacaagcattaatacttttgtcttctctaccagacaactagaatgctacagccacagttttaagtagctcatcgggaagcaataagttaaaatttgacgatgttcatgatctagttctcagtgaagagattcgacgtagggagttggttgaatcatcaacctcttcagtattacatacagagtcaagaggaagaaattcaactagagggcttggccatggaagatcgaattatcgaagtaaatctaaagataggaggtccaaatctaggaatccaaataattaccagagctgaaaaccattgagtgtttgaattgcggtaagattggacactacaaaaatcagtgcaagagtgcaccaaaaagtcaagattggaaggcagaagcaaatgttacttctacatcagaaggtgatgatgc

SEQ ID NO: 142697 - DNA, 942 bp, Cannabis sativa
  modified_base (63)..(65): a, c, t, g, unknown or other
ggacatagacacattcttccctgaatacaatttctcttgacccttgacttgaaccaaattcannntcaaaatagacagctcggtttgattccatcaccctggtggtgtgaaagagacaatagaacctagaacgtcttgaaccgatagtgtagcctacaaaactcccactaatagtattcagatccaacttcttatatttagggttataaggccttacctcatctttgcatccccaaacgtgaaaataactcaaactcggtttcttgcttgaccacagctcgtatggcgtctttggaaccgacttgctaggcacttgattcaagatataagcaacagtccttaatgcctcaccctataaaaactctggtaagccagaatgaattaacatacaacgtaccatattaagaagtgtgcgattccttctttcagaaattccatttcagctagggtgtacctggcaatatatatcttgtatcaatgccacgttcctacaagaatctggcaaatggcccggggattcttccagtttcatcataatgcccataacactctccacctctatcataattgatagctttaatcttctttcccttttggagctcaacatttgtcttgaaaatcttaaaggcatctaaagattcagacttctcactaatgagctcaatataaccatatcagggaaaatcatcaatgaaggtaatgaagtatttataaccgcccatagtagatggaacaaaggacccacaaatgttagtgtgaatatgctccaatacatctgtgcacttatctaacttactctttctaaccttagcagttaactttcattttatacaattcacacaggcagtgatttcagagaaatcgagatcttgaagtacaccatctttcaccaatctctcaattctatctttagaaatttggcccaaacatttatgccaaagc

SEQ ID NO: 142698 - DNA, 647 bp, Cannabis sativa
aaaaaaaaaaaaaaactagaaaagatcactccatttcctctcactctccctttctctctttccgccatcctagaaccagctagggttcttgtgtttgcttcctcaattccttgttttcagcagcttattgtataatccaagacaatgtatgatttataggaacctcctcttttagtttcttgagttttaagaaaaagaaattttgcatgctttgagtttatgcttgctatggtttttgtggttaattgttgttgtgttcagaggttaatgcatgtttgtttgagtggattcaagttggttttgttgctagttagttggatttaaccttatgtaaagctttgaactcaaaatcttgaatttcaatggtgaaatgttgaattagctattgtggttgttgtttgtgtttgggtttgttttctagagttatattatggttatatatggtgaattgagcaggttttaatagctagtttgtgggatgagcaagctttgagtttttaaactcaagcttgactcatcaatggtgatttttgttatggtgcatgaagctgtgttttatcgctttgttttttacctataggatgtttagatcaggtctggaaagtttggagtggattggggttgaattgattgagatatggaatttt

SEQ ID NO: 142699 - DNA, 690 bp, Cannabis sativa
  modified_base (651)..(665): a, c, t, g, unknown or other
ttcactcttaagggcattaaatatctgtttgtcgtcttcgtcctctacgcttcccagaagtggggtatgccttctcttgacgaagtcagctactttttgatttgaagtccacccctaagcaaggcaggtcggggtacttctatttctctcaaccagaattcaagtggttgacgggcatcgatgattcgaccattagtaaaattgggcgttttgctgatgagtacttcatggtggatggcacgggtatcactcacactcggatccagcaaattctgacatatgaccgccctcccctcactcttgctctctaggatagggcccaatggcttgctcgactgcagggggaagacttaaatatcatctagttgacctccgaggataactttgtgaagtaagggctctatccaaaggactttatttccaaaccactgaagtttaggaagaggaaatctgatgctggacgggttcaacgagctcatccggagaatgagctaattcaactgaagcgcgaggctaagttgaagggaagtgcaagggccaagcaacatgctcaggagcccttgaatcctgaagatgaggttgaggaagagcaggcgactccgctaaagaggaggaagaaactgttggaaatatattttaccaggaacttannnnnnnnnnnnnnnatgttgatttaacaacctaatattg

SEQ ID NO: 142700 - DNA, 881 bp, Cannabis sativa
ccaccacactagatcagaaaacactataaccactaaatcctatcgaggacttgtcgagaacccatcgataatcagtatacactcatcaaacatgataaataaagactaattattactatcgagaatccatcgacaatatgtcgataatcaaactttcataaattaaaagaaattatcatcaaaatgaaatgtatttcaacacaaataatatataatcgatctaactaaaaaaatcaaaaacaaactttttttaacaacatattttcgataacctatcagaatcttgttgtaaataatcgagaacatacataaccaccaccaccacactagatcggaaaacaccatagctaccatataaaatcggccataaattaagaaaaaattatcaaaatataatatatttcaacacaaataatatataatctctctaaattaaccacataaaaaaactaaaaacaaactttttttaacaacatcttgtcgataacctatcgagaatctgtcgataaataatcgagaacatacataaccaccaccaccacactagattagaaaacactataaccactaaatcctatcgagaacctttcgagaacccatcgataatcagtatacgctcatcaagcatgacaactaaaagactaattactactatcgataacctattgagaatccatcgacaatatgtcgataatcaaacttacataaattaaaagaaattatcatcaaaatgaaatgtatttcaacacaaataatatataatcgatctaactaaaaaaacaaaaacaattttttttaacaacatcttgtcgataatctgtcgataaatgatcgagaacatacataaccaccaccaccacactagatcggaaaacaccata

SEQ ID NO: 142701 - DNA, 676 bp, Cannabis sativa
aatcatcctccaaagatctctggtccaaagcaggcatatgccaaacgtgaatacccctgaagctacagacagaacacctggtaaagagacctttttcgtacttatcctaattgttggttcaatttatgcatggcgaaaaggatcattggaatagtcttagctcttgaatatgacaataaaaaaaaataagatagaaaacagaaaagagatttataaatttatttatttatttattagttaattaaatacacacacaagataatgatagttgtaattatttgtctataactgtatttactatttctttttatctcaaacgcattattaaataaaaatattatttcttaaaataaatataattttaaaaatatcatatatatatatgctacacaaagcgaggtctgcgatcaagaagctggtgggaggtctttatgtttcgggattcttgagatttttaggctggtgaaccctgttctggggttggttttcatcatcgatgacgagagccttctacaacaattacttgatgaaatcagagggacctattgttggatcttgggtgaattctatcatcaaagtctgaagtcgtggtttgaacactaaaacattatcgtatgagattaatttttaaatgaattaacatatcaattagaaacattactaatataatttcaaa

SEQ ID NO: 142702 - DNA, 705 bp, Cannabis sativa
ctatattattgtactaagtattgtactaagtagggtttactaagtagggttgggtttaagtagggttgggttgtactagggttgggttgtacaagttgggttgtacaataaaaaaaaattgaatggtttatagtttatccaaactacaatcattgtgttggcctattaaaatacctctaacccagccaacccagcccagcccatgtgtgtacccctagctgtgatagagatctgcttttaccgagtcaatgtaaacgtgtactaaatacattgtaaatcaaatcattctgagacatctcgctgggaacatagaaacaataatcttgttatcgagatgaagcttttgccatgtcttttcgaggttgataatagaagcctcgtcgctcctgcgcttgaagaaaaaatgctccatctgaaaatcgcagttcttggtgacaaggtgaacctcagcagtcaacatcattagtatgtcagcttctatctgagaaagctgacacgatggagctgtggaccccattgaaaggtgtttggagctgattaatgaaggtaccattagtgcgccttcaagtcaccatgtgtcgtctcctgatgcgtagcgaggttgatgcctcgccttgtaaatctgaagtcgttgttaggctatttttagcctacgttttgggtccctttttatagttgttttccttctttattattatatttgga

SEQ ID NO: 142703 - DNA, 552 bp, Cannabis sativa
  modified_base (357)..(359): a, c, t, g, unknown or other
aatcactaatggctgaattttggtttgtgaagaaagctatggatttcaaaattaagagaagaaaggaagaggtcttataaacatagagagaaaactaggtctttcgctttggaggcattagttggataatgagaccatagtctcccttttatactaatttccaatagagttagggttgaattatttggaataaaaaaattaataaaaatagagtaaaataggcacctaatggccggccatataatgggccctacattagtttggtttttgccatttttctcaactattttatctatttttttacaaatatcacttttttacactttcaaccttataaatgcaaaaactatttatttnnnaattaaaataattatcaaataaatttatcatttataatatttattaattagactccacaaagtcgcttaattaataaattaaccctaaaataccatttgttgacaatcaagccataacatagtgaaaattcacaaactagacatagcctaattttaaaattataattgattaattataatcaattaactgagt

SEQ ID NO: 142704 - DNA, 587 bp, Cannabis sativa
gtaacgtccccgcttcaagcctccattgggcccttacacccacgaaatgattgctcttatacacgagtacgtcattttggctgcttctgtaaagaccgcttagtctgaatttggaaatttgcagatacttagggtttaattatgaaaattagctactaattctaaattatttatttatgataatttattttaattcagaatgcattttataagtgatatataaaaattgcataattttgtatgttcagtgtcgggcaacattggaacgcggtgtatggcttagttgaatcacatcttagtattttagtatagcggggtgatatagttagacattgggaatgtcgggattggttgggattttagaatttcccaaattacccctcagtggcttttagtgattttagtgtttaagggacaaaatggtcaatttcctaagttgtattttatctttttgtgggatgtattaaatcaggtttttaattaatttcttagctggataaaaccaatgtaatttctttattttgcagaaaaaaaagagaaaataatcaaaataagtcacattttctctcaattctctctctctctct

SEQ ID NO: 142705 - DNA, 613 bp, Cannabis sativa
aaatttaaaacatgctcttattcagctatcaggctactaacatgcttcctatcaggcttttcttaaatcatactatttagataaactactaaagtattaaaatcttgctgaactatgagatgagctgatcactgatgacgattgtacatgttgtgacgatcttcggaagacaacccgacggatcttataccaaattgtaataccctactagtttaggtatgttaacataatttttaactagctgtgcagctcgttgctaatcaacgagtttattgaaaatcgtgattaattataattttgcttaattaattgtaaatattaaaatataatatttataataaatcgggatgccgttttacaaaatatttacaaaagtttcactatgcatatacaaaagtttgtcgcctagcgactatagaaaataagccctgatgtcctaaagatcgtacgctcgaagcctaaccgcctcaacatgtacaatctccatctgctcgcactcacggctgttaaccctaactgtgagtcaacaaattcagtaagaaaaggataaataatatcataacaataacccagattataatctggtgcccatacacccaaccataaccctaac

SEQ ID NO: 142706 - DNA, 596 bp, Cannabis sativa
gttcattctgatgtttggggtccttctattttgtctcaacttggattcaggtattttgttacttttgtggataactatttttgtgtaatttggttatatttaatgaaaaatcgttctgagttattttttatattttgtgctgaggttcaaaaacaatttaattagtgtgttcgtactttgcgaagtgatgatgccaaagagtacacctctgttcaattttaatcctacatgacatctaatggcatgcttcatgaaacttcttatgttgatactgcacctcttgaaactgcaaaacgtaaaaacaaacatcttgaaactgcacatgccctcttgtttcaaatgaaagttcctaaacctttttgggttgatgcagttctacaacatttttttttattaatcgcatgtcatcctctgtacttaaaggtgagaccccatttaaaattctttttcctagtaagttattgttttcaagttgctcctcgggtatttaatactgtttgttttggtcgcgatgttcgtccacatgtcaccaaattagaccctaagacattaaagtgtctttcttggttattctcatcttcaaaaagggtataggt

SEQ ID NO: 142707 - DNA, 654 bp, Cannabis sativa
aactcagattataatcacgcacccatacacccaaccatatccctaactgagttgggaacgttctcgacaaagtatgactaactgagaatccaacctatactcagtactctaatcgtactgatgtggtagcagataactcataatatctgatagcctagcatatctgttggcatctcggtgcaactctatgtacacctcaccgatgccctaatatgctaatctgatggctataaatttccctattttgacggcaactaccatgtaagctaaataagtatacatatatgcaaccattatactaatcttaccccgtttccgaatttaggtgtgccagccaacttgagtggagcagctgcttgacgtattacaggaccctaaatcacattattcgtaaaactggtaagcgacacgctaaatcacaatctggggacttaaacttgaaactaaaagtttccctatttctatcgataagaaacatggaaataccctaaaaatcaaggaaaatcaacgaaccaaagctctaaaactaacacgaatcgacaacacgaaaaattcaggaaacttgttttagattcggttaaccaattttatagggcctgtggaaccggttaaccggtttgcaccaggtaatccaaaataattcgaaaccttgac

SEQ ID NO: 142708 - DNA, 619 bp, Cannabis sativa
tgtgaaacacgaggagctcctctgcaacacagcccgtcaaccaatttttcctctcatagtgcttcaacaaagacgaaagcccctcagcacagaccaagaaaagatatggagataacggatctccctgcctaattcctctcccaggattaataggccccataacttttcccccataagtcacattatatgtaaccgtagtcaaacaactcataatgagagaaacaaaatgattattaaatcccatccgaactagcatagcctccaagaacgtccaacccactcgatcgtaggctttactcatgtccaacttgagagccatgaatccttcctttcccatccttttcctctttaagtaatgcattatctcataagaaaccatgatattatcagatatcaaacgaccaggaagaaaagcactttgagtgttggatataacatccggcaaagcacctttcaatctattggcaataactttagagataactttatacaacacattacaaagagagataggacggagatcactcatagtttctggcaacttctttttaggaatcaaaacaatattagtttcattaagattagaaggaaacgttccaaaagtgaagaagttccttac

SEQ ID NO: 142709 - DNA, 565 bp, Cannabis sativa
gtacatgttaaagttcagggagaaaaattactaattagccttaattttatatctaaaaattttaaatacattgaatatatattataatctagaaaaataaaattaattatgtaatatgatagaattttaaaactattaaattaattgaaatcttaaattaaatataagtaaagacaagaaaatattacttctaaagtattaaactcatgacattttaattattttaagattgattattataaaattattataagttgaatatgttataattttttataagtataattattgtttaaaaaataaatttaattaaaatattattttaggtaaatttgaaatagaaaaaaatattaaattaaaactaaattttaaataaaaataaaacaaaaaaataaaaaatagatttggagtttgttagttgaacctacaattaataatattcaagattaattataaataaaaaaaatatattaattatgatttagttttcaagagttagtttgagccattggattaaatcaagggctataaattactatccctattgataggtaaaatactcaat

SEQ ID NO: 142710 - DNA, 620 bp, Cannabis sativa
cagcagggtgctcctgcagtgcctgttccagaagttccagtggcacctgcccctattgtccaggtcgaaccagtgttagcgatgaatagaatggagcctctgtatgaaaggtccggacgtcatgaaagccgagcagtggctaactgtgatcactaagatattgaatttcatgggcgtcaccgggaatgacagcgtggcgtgtgccacatttcagtttcaagaggacacattggtatggtgggacatggtgtctacgatacacgatgtcaccacgatgacctgggaaaagttccaggaacttttcaatgcaaagtactataatgaggccgttagaagtgccaagagaaaagaatttactcacctgacccagaaagagaacatgagcattactgagtacacaacgcagtttgatcagtttgcaagggtggcctcaggaattgtgccaaccgatttcagtaaaaaggaaaagtatttggatggacttaatgcgaagattcggcatgacttgatgattattacggacgacaaaaccacctatgctgaaatggtggaaaaagcactgcgagctcagggcgcaattgggtgtatgactgagtcagctaggactccagtgggtggcg

SEQ ID NO: 142711 - DNA, 832 bp, Cannabis sativa
  modified_base (504)..(505): a, c, t, g, unknown or other
gcattcggaatttaaatcaactcagataaagctcaatattcgaaccatacacaaatcaaaccctaacagcccctataactcaaaattgcaaactcaaccaaagtaaaagcttcaaaaacacaagtctatggattctagggttactttaacttgaattccacttgaattccttgctggaaacaacaaagatcagcagcaaaaccccctagttattgctggttggaagagagagaagggaaagagaggttttcttgatttttggcttttgtattaattccattattttctaaaatgaataaactaattcgtttggcttaaaacagctaagtggcaagcttccaccttctaaaatcagccacctaaccctcactttgaaattactaaaataccccttaagcttaaactaaggcattttaaagtctaggggtaaaatgctcaaaaagcataacctcgctcaaactcggtatcctattttctcaaatatacatcccactaagaaataannttctagacttacccatgtgataaaactagccatccatcacatttttcgttgtcgccgagcaaaaattgtaaaatttgcataattcaaatataatacaaataatacacctagagtttaataaaatctctggaattgagaaattataactctaatgccaatttctgataatgggacccacaattaagtaaattcacaaatgactattaaaatatcaataattattgttaattgcctttactgatccatattataaatgcggtcattacaattatccccctgtcaaaaggatatcgtcctcgaaatctaacctgaatatctctggatatt

SEQ ID NO: 142712 - DNA, 1134 bp, Cannabis sativa
tttggccgcggcaaccataaattcggccgcggccactgggttcaaaaaatccaaaaatcccatttttaaggtctaaaaatgccaactttttcatatctttgaagttcaactaaaacatacccaaaactcaaacaaaaccatacaaaatcaaaattttcaactaaaaccaaaccaatctaacattgttgttcatttgagcatcacaccaagctcaaaaatcaaaacaacaaacaaaaataaagcatacatcaaccaccaaggttgcacacataggcttaagcttgaagttcaaagcttcaagaaaaaacccagaacttcaaagccttacaccagaatttgaacaaaatataccaaccctaaaatcaaccaaaaccatctagatgcaatatacacaatcctaatagctcaaaactcacaacaaacaccaaaatcaccctcagtccatataatgaaaaaatgagagatttttttaattaaatagaaaaattaagcataaaattcaaattgttttaatattacccattcatgggtaatactcattaagagtgcacctatataaatatatattttgtgttttattgaatatgtatttatgtatatatatgtattgtgtatattatttatataaattgtattgtatatattctaagtaatatatatatatatattgtgaataaaaatgagataggtgagatttaattagtttagagataaaatttttaaaattgtgttagtgtgagatataattgattatatatatatatatgtatatattatttattttcaaaaactaatctatatatataatttagtaactagtaacttgttactactttttataactagtaagtaattaaataattaaaattttaatttgttgtattttattatattgtaggttgtgagctaatttttaaggttcgacataatttggtgttgatcagattttgacttcctataggtatatacattcactaactttttttttgttattataattaattatcaatacatgcttagtagagtttgaatgtattaaataatcatccgtagtgaagtaggttctgtgatatattgtactgcggtcggatgagtgtaataatatgcatgttagttgagtttgaatgtcttaaa

SEQ ID NO: 142713 - DNA, 1005 bp, Cannabis sativa
ttgtttgtatatcatacgatatattaataaaaaattaattatatggttaaataacatattagacaacaacaacagcaacaaaatctaaaagaataagatatatattaccttttatataatgaaaaaatagttgataaaaattcagtagagatgttttgatttattatttttcataatttctattaaaggaataaaacatataatactttttatataataaagggtattttaggtatttaaaagtaaaaaaaaaagatatttactttattattttaaatggacattaactatctatagagctaaaaatggatcatttacttacatttctctaaataaatatatatggaaaatttgtatagacataccattttacggcctttagataaaactcatctaatggtccatattaaattacatatatatgtgtattttttagaataagttgaaaaatatcacttttttgttttcattaatcaaaactattctcatattatattttattaaaatatacccacttttttgagtgggttgtccagtatacactcactctctacttaaatatagcatataattgacattaacttaaggggtctaatgagaacaccatctataaaagtaaatatatctgaaaggatataaatatggaggtaagaatcaaaacaagttaagtgaaatggatatacaatgtaatttcctctattttttttgtagggatattaaattacatatcttactatattaaaagtattttatcagtgtctatattaaatttggactattttacccttgttatctaattttatgacaaagtctatatttaattttgactattttatccttatcatctaatttgatgacaaaaattttattttatctttattatcataatttttatcttatcttactattataaaaatctcttaattgtaaagaaaaaattttatcttattattataaaaatctcttaattgtaaagacaaattttatcttattattataaaaatc

SEQ ID NO: 142714 - DNA, 698 bp, Cannabis sativa
tttaggaatatgtttagatctgtgatttatatatttcttaagtgttttataaatcctaacattaagaagtttgtaactagttttattctggtattgtatctaatttgtacgattccatacaatatctagaatacaagcatgtaaaatttatgtataatttttggtatatgtaactggttttttttcattaagataacaaccctagcgaatatactcttattctattttctacttcttttgcggctaatattatgctttagtagatagtgatgttttgatagtgggtcgatggtctagtattagaatttctgagaagtttgtaactagttttaatattagtattatgatggtattaattttggtaatgaattgatgatcaagtttttaaacttataagacatatgtaaaatttatatgagttttagtatttgcattgctgaatttttcattaagaaaatcgttttgattatatggaagaaattgtttgattaatttattgccttaccaaaattatattgctattattttagcttttggatttgttttttaaaataaacttttatagttacagtttttgtgtaaataactagttgaaaaaccgtgtttttgcaaatatcagttgtatataagaaaatataaaaactgtaagcgtttgcagaagcagaaagtaattctgctacaacaaaacagaacaggca

SEQ ID NO: 142715 - DNA, 622 bp, Cannabis sativa
  modified_base (470)..(470): a, c, t, g, unknown or other
ttatggttggagcaccaaacaagcttcttgagttaccaatttttccattattgttgggtatgtatatttctcacctttgctctaggcaaatttaatatagcataaaagatgacatataatgtgaattaattgtgtaaattatagtgcaaagttaattattatagtgcaagttttttttgagatttatattcaagagagaccattttgaatatttaattgttacaatgacattaattttagaaattatgaaatgtacgtatattttaagttttataatgatagagtattgacattgtttttcagtcttttcttaatttttaaagatatagagtatatattttcttttaatttttagaattagaaacaattttttcttttaattttcaaagtgtgattatttttaacttattttataaacattttgcatctaatttactatttttaaaactttatgtattttcaattaactntttcaaattaagcatataactaagtacacgtgcattacacgtattttctgactagtatataattaatatatagggcattttttatttttatacttcaaaatattttttttttttgcatttttacgaaattttatatagaaatctctattgca

SEQ ID NO: 142716 - DNA, 689 bp, Cannabis sativa
gtacgtacgatgtaacatttcatgatcatggctatgatcactactactattctatccatagaattgtcaaatcaagacacaatataatattcatttataattagcagccacccacaacttgatcaagtgtcaagtgtgtgtgtgtgtgtgttcatacataggattaggatttaggtgtctacctcttcaccactttattccttgcttttctattatataaatatataatatatatacacacttaaaaagattcctcatcatattcattcctatctagtttctccaattcagattagttttttagtttaattattttttaaaatttttactaaaattttaaaatgaatatactttctaaatttttgttgcccttaaaattttttcataagttatttaaattgttaaatttaaaaatttttgtttaatttcttttaattttattaattcagtaattatttatatattaaattatatccttcaaactttaataaatactagttaattcccataaatttttaaattcaacgatctcaataatccaaacagaattttcaataatattaaaagtaaaaaatataatttcattgttcacatataaatctactgaaatatatattatgctctaaatgaattataatttgttcccatatattaatacatgtgcataggggtgttcatgaaaccgctca

SEQ ID NO: 142717 - DNA, 1163 bp, Cannabis sativa
atattatttcgtgtgtaattactattagagttcccgctcaaatgattttaagatcattattagaagtttttacaagtttgttattcagatttcaaggagtgtacctaatctgtgttgttcaaggattaattgtgcatgctcttcatatgaattattaacttgtttggctagatatgaatatctttatattttgttgggtatatactatatagtattattttgatcatcctagcaagaatagtatttatttgatgaacataagatgtatagtattcataactagcttgtataatgttattatatttttaatgaatttattcattgcaaaaaaaaaaggtagtgtaattaataaggtggtaattatacattttagtaattatactattttaaaatacaatgtgtgtttggatatgagttgctaattacatttgaattctttatatcttgtttgaaaaaatatttagtaattacacaagaaaataatattttttagtagttaatatttaaaaaataaaataaaaagtttgtagcaattacactaaattctcatgggagccatgagaatggagagtataattggaaagaacttttacaccacatactgacatttctaactttttttatttttattgtgggtagaattttttcaaaaataatgggtaagttttatactgtgtattgtgttaagttcttactgctattctaaaattgttttttagttattctattgttgtttttaattgttctgttttgttattttgtggttgttttatgttattttaggttgttttataaaaatacagtatttttataaaaaaaaattcatatgacagtaaaattataaacttttacctaaaatctaataattttgtaaaaatccctaattggaacccctaaattatctcagagcacacagatacaatgtaattacatacaaaattaaacaaacataccaaattataaaatcacctctaataacatacaaatctgattacataactttccaaacctgcccttagtaattacacacgaaaaataagtaactagtagagaatttcacttataatacttaaatgttaatctcataacaaaaaaataccccaaataatattaattctctaacaacaaacacccaattaattctctctctctctctcgctctc

SEQ ID NO: 142718 - DNA, 1185 bp, Cannabis sativa
actcctctaaggactttaacttggcagccatctcgtccatagcctctctggcctcccgaagctcgtgtctggccctggctgtggcctcgccctccaccttcaatgcctcctggtgcctcgcctccacttcagcctccctttgcttggcctcatctcagaactttgcctctgcaagggcctcccttcgttgagcctcctcttagaatgcccacctttcggcagacaaatcccgcaggatcctcacggcctcgtcaatgctcctaaattcggacatgacgaagccatggtcgatcagggtcttggaaaggcgactggtctcaacagtaatctaaaaaaagaaataggaatgaggtcagatgccttagacaaaatatcaaaggaaggaataaattacaagtactcaccgcggccatggcagagctaatgtcttgaacctggtaaacggagttctaacaggcacaagccgcatatattttagctaggaactgagttaggtgggagaaaaactggctggtcatctccgaggcaaagggagctaaggtgggcccgacaaagcggttggaccaatccgtcagagggtccatgttcaggtcccacggatttcgaaaggcgtcctcgtgaagagtgttttgctgctcctctcgtaaaattttctttaatgcctccacctcagcatgcccccggctgtactcatcaagggcgtagttgtacttggccactcaaagattttgcctctcctcatccgcgggaaccggggtcagcacaatgccgtgcgacaccgtgtactcctccgcatcggaaggaatcccagagtcattgctcaccgccggagtgtcccccctccaagtccgcttggaaggttcagcctcaaccatcttgccctttcgcttgcgctcaagggtggccgcatcctccacctcgccttcctcgacttccccctccttgtctatcaagacgatcgtgcctaaaggggcactagaggaggacctcccgggagtcaccaactgggatggagccggaggcaaagaggcgtcggggctgtatgcctcggcaagagtggctaggagatcttccataggcctagctactacaataaagaaataagctaagtgttagaataatcatgagaaaggcatgcgcccaacaagaaagcaataaaactagtcctcccctgactctctaatt

SEQ ID NO: 142719 - DNA, 556 bp, Cannabis sativa
ccggttattctaggtttgtttaccagttgtacagttatttttttaattaaaaaataaaaaggtacaattaatttactgtttacgttagttaatgtacgaaaaaatataacagctttacttcgtggcagttaattgtacaaatatactataggcagtgggtccatgttgtcggagtggggttattttggtattttcattccttcatatcatgtatgtaattgtgggattgtagttgagtacattatatcacgtaccttgtacattaattgtttctgcatgttgtttagtaaaattagtgtacaaaatatcacgtaccgagtacataatatcacataccgagtacgttcatttatgtttcgtagtacattgttcagaataatttgttataaattatgaaattatgtgttggtatatattgagttttacgttggtgcattatttttatttttattattttgtaaaaaaaaaattaattactatcgaaattttgaccttataagattgaatttttttgcctaaaataatttatttgttcattaattataattttgagatt

SEQ ID NO: 142720 - DNA, 610 bp, Cannabis sativa
ttaactaatttacataaccctcctgaacttattaaataaatattcattaatcaatttttttttttttggagttaaaaattttctgaaatattaggatggttaggtttaagaacttttatctaattttagtaaaaaaaaatcaggagacatgatagtacatatcaaagtttgagggacatgatttggtaaatatcaaatttagggagcatagtttagtacataaaaaattaaatcttaaatctaaccaattcaagggaatttttaacggctaaaaaaaattgagggcataattatatgtcaaagttggaaaaaattgctaattatttttttttttataaccataaattttaataatcgattaattataacttgctttttcaattttatttagtagtttattattattattaaatagccgaaatttaagggtgtgcataaatcattcaatgacaattttccaattcaattacaactaaccgctaaatattagatattcaattgttaccggatcaaattggatgttatttttacatctaacatccaatcgaactaagtaatttaattttatattattatatataaaaattaatattaaaattttactattttt

SEQ ID NO: 142721 - DNA, 514 bp, Cannabis sativa
gtacccttttatgatttttagtatagaaggggcaaaatagtctttttgcctattagagcttttgtcttatatgggtttaattaagttcattaaatcagattttttaattaagtttatgctgaatattatgtagattaaccatttccttctcccattttataaaaaatcaaaagctttatttttgaagaaaaggttctcttcctcttgccctctctctttcgaaactctcttggcaagctagggttgggagttttcattgtgattcaagtgattttcttctattgtttgtaatctccaagtcaaggtaaggtttttatcaacttcccttttgatttcttgatttttaaggaaatggttcatgcatgttttgtggagtttagttgttgtggtggttgtggttgtttgttgtttatttctaaagttagaatatgatttaatatgttgattcatgcaagattgtgttggtgtttgttgatttttactaagtgtagaattttaaacccaaaactatgat

SEQ ID NO: 142722 - DNA, 1064 bp, Cannabis sativa
ttccgtgaaaccgtatttttgttatttttttgttgtttttctgcatttgtgaaattaacccttattttaaagaattgttttccttgctaatttttctaatatcacatatgaaatacacacaagttaaaactttttttacatacattatatgcacgtaaatatatatataatatagaggaaattatattcactatgagattttaaaagttgtttatttaaatatgaaacttttaagtttgaccaatttatatgatattttttttatttttaggtatttttatggtatttgatatgccatatatatgtaaattaggttttcaaatctcatatttttaatatttttattttcttaggcagtattatttgtcactgatgccgaaaaaatcacaggagtttgctgccagcatcgaaaaaatcatcggagtagctgtcagtatcgagaaagacgtcagagttgctgccgacgccaaaaaagtcgtcgaaattggcattgtcgctggaaaaatcaccaagaaagtgatcaccaagaaagtaccactttcttggtgatttttctgggtactttcttggtattttttcggcaacaatgctaattctgatgacttttttgataccggcaactacttcgatgactattctgacaccaacagcagcaaactttggaaaagtcgtcagaattggcatagtagccgaaaaaattaccaagaaacttcttgatgaagaaaccagtttctagtttcttgatgaagaaactagtttcttggtgatttttctgacaataatatcagttccgacgacttttttggcaccggcaacaactccgatgacttttctgacaccggtagctactctgatgacttttccggtaccgacaacaaacttcaaaaaagttttcagaattgacattgccgccgaaaaaatcactaagaaaccaatttcttgatgaagaaaccaattcttggtaatttttttggtgcaataccaattcctgtaacttttttggcgcagcaactccgacgattttcttggtgccgacagctactccggcgacttttctagtgccg

SEQ ID NO: 142723 - DNA, 1112 bp, Cannabis sativa
tcttttgttgttttgtggatgctgggttttgtagcatttgcttttgattaataaaattttctcctataataaaaataaaaatcttgaactattgtgattgttgagtttaaggatttttgtaaaatttcatttaattttactaatttggtgattgtccctcaaattttgatatatactaaattatatttctcaaatttttataatatgtactaaattatactccatgaactttcattcatgttaggctttccttattaaaattagacaaaagtacttaaattcaacagtcttaatagttcaaggaatttttaacgactttaaaagtttaggagatacaatttagtatgtgtcaaaattcggggataaaaatcttaattaaccacaattttttattatggtaatattggtattagctttttcatttataaacactcaaagagcttttgtaattggtaggcacttctcaaaagaagtgttttatataaggtgggagattttaatggttatattaaatatgtaactataatggttacatttattttgagatgttagattattattaaatggttgtgattaatttaaaattaataatttttttaataaattaagaaattaaaaaaagtatatatttaataatttacttgatgctaagtcgattttattttatttccttataaataaaaactaaatatatttataaatattaatggctaaagaagttatactagatattttaatttaaaaataaatttattttcactaaaagtgtaactagagacaaatttaggtactgtctaaacttgttgagcattcagaacatttaatgtcctcacacatttcttttggatcagagattaagtgagtttaatcaagtggaattgttggaattaaactcacttaacctaccaggttagtaggtccatctatatgctcattagatttgaagaaagttactgttagttataacagttggctttaataccaacttaaaggagatcccaccaacaactagaaataggtgttcctctattcacaaagagaggtatgagttttgatcttcgatctccaagcttatactttagattttaaagtcaagtttagagagagagaga

SEQ ID NO: 142724 - DNA, 571 bp, Cannabis sativa
gacagactcagtaagaacgcataaacaataacatagcattaacccagattataatcaggcacccatacacccaatcataaccctgtccacgtgtccaacaccgtgctgagtgaagaatgtttgtacaacaatactatcgaccataatgtccgcctatactcagtatgctggtcatactccagccatattgatgtgacaacatcgatcattatttgagccaaacatacatctatcaatactcaatataactctacgtatactgatactgttatcaatgtaatctaactggcgtaataaacatgcacgctaaacatgtaaatacatatccataactttatactaatcttacctcatttccaaatttaggtgtgccgaccaacctaagtggaataactgctcgacgaattactgacccctaaatcacattattcgtaatactggtgagtgacatgctaaaccacttttcgaagacttaaacttgaaactaaaagtttcccaatcgatgaataacatggaaataccctaaatattgcaaaaaggggaaaaactagggttcccaaaatgccccaac

SEQ ID NO: 142725 - DNA, 600 bp, Cannabis sativa
  modified_base (31)..(44): a, c, t, g, unknown or other
aagttaacttttaatttaaaatatgttaaannnnnnnnnnnnnnatcttataattaaataatacataaatattaaagaaattaacaaatttttaaagaggactgtaatttaaaaaataaaataatcaatttttaaatttaaacctcaaaatatcaaagattaataatattttactaaaaaataaatattattaattttaaaaaaaaatgatatttaagtttaaataaatttaaaaacaatatttattttaattttggattttaaaaattagaagaatcgaattttggggaaaaatcccacaaatttttgatttttcggtgtaaacagcccagtaggctgcatgtgcagccccaggaggctgcaaacccagagatgcgtgcgcaaaagtcagggtaaaggtgagaaaactcgacgctgtgcagggttcgtcgagcggatgtgcagggtgctcctcgggcggagacgacttcagacaagggtgatgttcgagaccacgcgcgcgtaatggtgtcttggccttacccctcgtgcatgagagcaccatgctcgacaccattgaacctgatttttccaaaattcataacttttgcaatttttatc

SEQ ID NO: 142726 - DNA, 649 bp, Cannabis sativa
ccactgggcgaggaggagctaagtatgcggtggtagcagtcgacttcttcactaaatggacagaggctgagccctttctctccataacctgtcagaaagtccttgactttgtcgtcaagaacattatctgtaggtttaaaattccgatgaagaaagtatccgataatggaactcaatctgatggcaactttttcactaaattctgcgagaggaataaaattatcaaaagcttctcgtcagtatctaggcctcaggcaaatggacaagtggaagccgtcaataaaaccctaaaggatactgtcaagaagaagttagatgctgccaaaggcagatgggttgatgagctacctcaggtgctctgggctcacaaaactaacgagaaaatagccacgtgacacactcttttctcgctagcatttggctcgaaagcaatgatgcctgttgaaatgaacatatcgattcacaaaagagagttttataatcaagaagaaaactaagaacttttaaggttgtccatggatctacttgaggaaaaacgaactgagtcgcaatggatctacttgaggaaaaaggaactgagtcgcaaatcaccaacgccgcataccaacaccgagtcacaagatacttcaacaaaagagtcaagaaaaga

SEQ ID NO: 142727 - DNA, 559 bp, Cannabis sativa
tagaatttatacattaaacataattatgaaataaatcatgtgaaccatgtaacataaaatgtgatttcttattgaaatgggttttatttagggcaaaaaacccaacagtgactcaaggaccatggacttttatttcgaagctccaataaatacttgattattatcgatctcattaatagaataatttagtttattaatttcattattactccactataaatatggaattgcactctttaactatataaaattatatttatagaagtctttgttgtagtccattgatatagtcaatataagcagttcgccctccaattattagttcataactagagttgatcaaaattaccattttacccttctaattatctcttgagtccttatgtaccattaagtcaatgtgaacagttaatctataactgataatagatttggatccgactattagcactctcagtattaacactataagagaactaatatttgatctgttaggaaagcttggattccactattgtataacatgttcccagccagtcatgttattaagctcccaaaa

SEQ ID NO: 142728 - DNA, 747 bp, Cannabis sativa
tgaaatttaggagttagtcaacttgcaacaaaagtgcaccaatcagcatggtcgattttgggatgcttttcagggacttgtgccagtcgtcccacatccttctctttcacagcggtcattatcctgtcttttttcatcctattcttgaagtctttcattaacttcccagcaaggatgagacaatcatgtttgaaggaatctggcacaatgaaacccgtctagtttgaaggaaaacaaacacggttagagtgaacatttgaattaataaaaaataaaacaaaattctaacaaataactgcttacttgtatatctttctaaactttatttttcagagtagggttgacttctttctgatttttatacgacaaccatatcgtctgacggcatctgactcctaaagttgatacgagcttggcatagcttttgtcgcagtattgtcctttatcattaacctcgagggcgaatctttttccttgtttcatgagcttgaatatttcattcatttgcttaggccctcgtgtaggtattactgttgtttcatgagcttgaatatttcattcatttaaagttagctatatatataacaagtaatctatatgaaatattaaatgcataaattaattgttaagtattcagcataaacaaacacaatataaagtaagatatgtatcaatttaccaattagacacgttttcttttcttttttgtttatgtttgcctgaatcacaattgacccatattccctc

SEQ ID NO: 142729 - DNA, 721 bp, Cannabis sativa
tactgccatttttggttctggatataagaaaattcttgcattattatgcttgctgaacatgaattcaaaagacatttgagtagtaggaaggaaaagtttgaaaaaaagggtctctataaatgagttcttaagtcaacacaattaatttgaattataattggtttattaactattaattaagagaagctgatgttggttattgtttcttctggtttactctcacccttgtctctttttccataaaaattcttgccaaggatttgatgagtttgagtgcaataattgtttgagaagtattattatcaatgaggtgtgttaagatgtttagaaggtatttacttattagccaccttatcttgagtgtgcaattactttgtatgaagcaggcatcaatagtatggtgatcattggtgaggtgttctctaatttcttaaatatttcaataagtgtcatcacggtaccatatatagtttaggaaaaatataataagtgtagctattttagtttggtatttgatgacttagtaatcaatggcaaccatatgatgattctatatggattaacttcaatgttgaacagaacaccacttccttggccctctcctttcttgttgaacagaacaccacttttccccgctggaggattattttctataatatgtatatatatttctttcactagatgtagaaaaagtttaaggacatgcaactcaaattataat

SEQ ID NO: 142730 - DNA, 517 bp, Cannabis sativa
aaatgatattgaaaatatctaattagttattttaaattatttatcttattcgatatttaatttaatttgacaaaataattcaaataaacatagacattttaaaattagtttgaattttaaatttggaaaagatattttagtctatttttttaacaaccttaaattttcaaaatagttggttagttatgttgacctcgcttttagtcaaggacaatgagtctaatttataagcgacaagtagtataatacaagtgtaatataacaaagcaaataaaggcaaaagaattttatagaagttcaggcccgagcagttcggtaatagcctaatcctccttatttgtattgacttaagaacaaggagaagggttccttttcttagagctcttacaagaatatatttgaatatgaattcatagatagattttttgaccctttgctcagtgagtatgaatcactatttatagggctataagcttgggagggaagtattttgcttctggttacaattgatataagt

SEQ ID NO: 142731 - DNA, 900 bp, Cannabis sativa
aaatacgacttaggtatttatctggtactcggaataaaacttaagtatttttaccgcaaattactctaaattgtaagattttttaatatgtattgtcgtatttcttgggcttgtcacattacgtactttttggattagtttattcgtgtttacatgtcgtgtcttttgtgcttcttttgtcgtatcgtggttaagtacatatttttcgtgccatgtcgtgccaattcatagtattttgttgtgtcatacctaaactcatattttttcgtgcctaatcatattcgtgcctaatgatattcgtgccttttaggctcgtgccgtgtcaaaaagtccaacccgtatttacaacactaatcaaattcaaaagtggtccttttaaacaccgcaagctgcaaaggcttatagctatagctagtcagtaaaaggtattcctctacaaaaaggcccaacgtctaatctttttacatgacggattgatccgtagtacaatgtaacagaatttgtagccaagcaagcccgaaaagctaaattttcattcttatcaataatatatcaatctagttgttgggttccaactcatgaaaatacattctgatattctcttttttatttcctttttcattgagttaaattaattcaacgaaaatgagagatgttattgttaacttgataaaataaaatggaataaagaatgtgtgagtttaatttgatgtaacaaatgtgattgatttggggatgtgatagaccgtacgcaataggacaatgttttttttttttttttttttagtaatttacggcaaaatcctcccaactatcaatttacttgcaaaaaaccatccaaccttatattttggtaggaaaaccctccaaagtactcttccgtttacatttttaaggtgt

SEQ ID NO: 142732 - DNA, 630 bp, Cannabis sativa
catggagactacggccacgacaccaatgaatgcaacaatctgaagtgggaaattgaattcttcataaggaaaaataacatgcatgtacagaagtatgtcaaggctgatcagaatcagaggggtgataataacaaagacttgctacctccaccagtagacggacatctacaagtcatcattagaggccgacacatagctggagattcaggcaaagcttgggagtggtatgccagaacagcacaacacgagcaagaagaagttatcctggtcgtagaagaaaggaagcctaaaatcccatgggcaggagagcccaacattacattcaacgacgaagatgctgtcaagatcaggtttccgcacaatgaccctttggtcatggaggtccagatagccaacaagatgatggccagaacaatgatagataatggagcctcttcaaacaccttattcaagactgcctatgaaaagatggggctctagctcaaagatctaaccccctgtctcctgcttgtatacggtttctccgtccatggagtcgcaccactagggcaaattctcttacccctcactgttgggcaagctctgacgaccataactataatggcgcaatttctggtattggacgttcca

SEQ ID NO: 142733 - DNA, 824 bp, Cannabis sativa
tataattttataagggtaaaagtggtacactattatagacactattactacacttttataatagtatgatatatatatatatatttatattcttttctaaaatttttaaaggttttttcaggtaaaccatttattattttgagtcaaaaattgtaacatattgtaatctattttttatgacgatcattttgatatatgagaaacatatatttttttcccgctagagaaataaattacctgaaagagtaacttttaaatttcttttctatgtatctagttaacaaaaataatcaaactttcaacttaaacaaaatttaatatatcaaccaattttataaattacttgatggaaaatttttatcactcattaaatatgtaatatcatgatttaattctataaacaaacatattacatattattataagtatgaaaaatgtagatctaaagaatacatttgttgattcaaagagaagaagccaaatagtggaagcgtaccttaatctatagatagtgatgatcttaatccatcttgtagagatgatctttatgatgattttaggtaatgatgacactacaagaaatgtcacttttgcaaggacatttttgttttggcaaaagtttcgtatagcgctggtaaaatggaatttacttgtgttggcaaaacggttggcaaatcaacgttggtataagaacttttgccagcacaaaataaaaaggctgggaaaaataacttttctcagtgcgtaaatgcacttaaaaaagttagattttagccactacaaatgtgcgctggtaaaattttgacctttttgtcagcgcagtt

SEQ ID NO: 142734 - DNA, 705 bp, Cannabis sativa
ataatatataaaataattccccaattcttatttgtaaatataatttcatgttcaattatataagatcataccatggcagcaagaggtgatccatacatgatgatattgaggccagcacccaaaaacccaattgcattagtacgtgcatctccttccaaagctaaccgagttactaaaatggctaatccaaagaaacccacatctaatattcccaccaaaacgcctgtctttgcctgtaatttacataataaaatgaatttaattattaattaacacaactccaacaataacatttaattatatatgtatatatatatatgtttaattacatttataccctcatctttgggtgagcataaagaagaaacaagaaaacgtagatggtctcaacaaagatgccaaaaccattgacagtggccacaagaacttctcctggcttggtcaaaccatagtaagtccacaacaatgaatttagcagtgtacaaatatacggaaggctctcaaattcttcagtcgaaccatttttcacaattctccaaaatgtccttctgcacatatatatatatatagagataaattaatataatcaatcttgatgagttaatttatataatatatatatatatatatagaacttacgccggagaaagaaacattagcactgaaataatgttccctgtaaattagaaccaaacaaaaaaaaaa

SEQ ID NO: 142735 - DNA, 688 bp, Cannabis sativa
tgttttcacaaaaactgctcgtttggcttggagtaacctgaatccagacgttcaatccttgagtaagttctcgatttcttttatgtttactttgcacatttattttttgaatgaaactttgacttcgccgtagaagatatgtgggaaaccctaagtttagaaactctgcgattttcttttgtaacgattcatgcgttttcatcgttcataatgcttgcttcttgaactgcacaatgcctgtctttcatcatgcttactctaagcttcatgaatattttttccctaacacacgaaaatgtcaaacttttgagttttaacttttcgtcgaattttcttattctttaattcattgagtactcctggtcggcatatttgcctgttttaatgttcgatatcacgaccaaacactcattttgtgtgttgtcttttgtagatgaacccaggtgagttttggggaagcgaataccaaattgaccatgatctgcttacactcttgcacgaggatcatcctcatcttcgttctagtccaccctcttcgagcaacggacattttagcttaaatctcacgtctgaccataggatgatagctctgttgggttttatgccctaaataaaactctttgcaatctgattagttatcaatataagaaatttgaagtgattgacgtttgcatgaattttacatgct

SEQ ID NO: 142736 - DNA, 1660 bp, Cannabis sativa
agaactggaaccgaactaggactaagactaggacctaaacccgaacccgacctagataaaatcaagacaaagacccaaactcgaatcgagactagttatcaaacccaaacctagactgggacccaatcccagaccagaattgggattgggacccagaatctggatagggacctgggcaacggaactaggaccgaaacctagtacccgaccctagacctagacttgaacctaggacccagctcatgacatggcacccaaaatggaactagaatcgcacctggtctcaatcccgaacccaaactctaacctggaacccaggaccagaactagacctacacccatgacagggatccagatcttgactcggaatccagaaaatggggcttggaacagacccgtagtcggtgtttgaatctgtgactcagactaagacccgaacccagtctaggaaccgaacccaagcccagacctagatccaggacccgaaagtagcacctaaacaagaactgttggactaggaccatgtaacaagactaggaccgtgaccaggaccctgacccagacctagaaccgaactcggaccaagctcaagacccaaaccgagatcgaaactcaggcttagacatggtcgtgtacccagatcagaatcgagaattggattagacctaaatatgggacccaatcccaaacacagactcggacgtagatacggatcaaggtacgaacttggactcagacccagacccagaccaagatcaaaacatgggacctagatcaggacctaaatccagacccaaacccaaacctggacccgcactagggacctgaactcggacctggaccgaaccaagacctagatgaggatccacacctggacccagacctggacctagactcgaacaaggactcaaaccccgacccagacccagacccaaacccgaacccagacacagaatcgaagtgtgggtctatgtccgagttcgcgccctagtccagttacagttttgggtttgggtctaggtcctggtcctggtcctgttcttcggtcctgatccgcttcgagttttggttctactttcaagtcatggggtacgggtcgagtccaagcatcgaatcctggatcctaagtctcgggtgggtcctaggtcaaggtttgggtctggggttaggtcccgaatctcgggttcgagtttggttctttgttcctaggtccagccccagttcttgggtttgggtctaggtcttggtttaggtcccaggtcacaggtcccaatctgggtccaagtctcggtatgggttcaggttgagtttgggtttaggtttggatcctgttatagtcccaggtctgggttctcatcccagtcctggttcgattcagattctgggtccaagattgggtcttgatcccggttcgggtatgggtgtgggtcctggattcaaacactgattatgggtcatgttgaagcctcaagttcagattcgaatctcggtcttggatctcagtcttgttctagttcgggtcccgggtctcgagccgagtcctaagttttagttttggtccgagtttggggttgtgtcctggtagtgaggtcctgggttccaagtctaaggtcgggtcctgtgtctcgagtctagggtcaaattttgggtctcagacccc

SEQ ID NO: 142737 - DNA, 644 bp, Cannabis sativa
  modified_base (28)..(39): a, c, t, g, unknown or other
ggtcctgtaaatctagggcataacttgnnnnnnnnnnnnaaacgcttgatccccttcataggagacaccagtaggaacacatgatcccctacttgaaattctgtatatctgcatttcggatctgcataactcttttgtctgctctacgaagcaagcattctggctttaatcttctcaatcgcttcattagtccgttgcactgattccagacctagatattttctctcccctgtctcatcccagtgaatgggagacctacactttctgccatataacagttcatagggagccatccctatcgtactttggtagctattattgtacgagaactctatcaacggtaggtacttactcaagagccttcaaaatccataacacaggctcgtaacatgtcttccagtatctaaatcgtcctttcagattgtccatctgtctgaggatggaaagctgtactgaacttcaatttggtacccatagcccgttgcaaactctaccaaaattttgaaacgacaggagggtgctcctgcaatgcctgctccagaaattccagtggcacttgcccctgctgtacaggctgaaccagtggtggcagtgaatcagatggaacccctgtatgaaaggttccgcaagcaagcacctccagt

SEQ ID NO: 142738 - DNA, 725 bp, Cannabis sativa
  modified_base (32)..(33): a, c, t, g, unknown or other
ccacatagtttaatataataacttttaagaannatcgctagccaatcgcaacgtgacatgtcgagaaagtgctagacacacctgatgcatgcctaataacaatgctcatttggtacagtttaagagtcgaggcaacaagtacaaacacaaaaacgatttaaagacttacattagagttaatatttgtagtagtatcattattttggatttcatctagcttaaattaattaaataaatttacatactataattgtaaggattttttttaatagaaaaaaaaaatcaaaacgacaaaacttgttagagagtcacacattgttaatttgtgaaaagataatagaatatataagatccatcagctactcctcctgatggtttgagaataaatttgttttgttttcttaaaaaaaaaatggatatgtggttaattgtttgttgtggtaatgtagtgaagtagtgatgttgatgagtagttgttgatttagtatatgaaattagtttggcttagaagagagaattgtatgtaaagtagtaagctcttattgatagtttgggacattggctgtaacgtccccgcttcaagcctccattaggctcttacgctcgtagaatgataacttttatacatgagtacgtcactctcgctgcttcatagaatgatgactgaccctacagaccaacacaaatgtttccagcgtgctttgtcctcactcacacgcttcttg

SEQ ID NO: 142739 - DNA, 708 bp, Cannabis sativa
gttcagggaaagaccatgtcggtgacagagtatacaacaaagtttaatcgacttgcaaagatggcttcgggcatagtgcctacagacttcagtaagaaggaaaaatacttggcgggtttgaatgccaagattaggcatgattggtgattactacaaatgatacaacaaactaagctgagatggttgagaaaactctttgagctaagggtgcgatggaatttcttcaagagccccaagggactccaagtgttggtgggatcaccacccttcctacttcaggatatggtaacaatggtggtgattcaaatgttaatgaaaagagaaagaccttcccgacatcaggtagctcaggtcagaataaaaggtttcaggggaaccaaggtataggtggactttaattttgtatatcttgattgcccttgttgtaagaaatatcatcccgaggattgcaatcggacgacatgttttcaacgtggcctggtcgagcattttaagaaagactgccctcagatgaaaaaggaataaaagaggcaagaggcgaaaaaaacccggtacttgctcgggtgtttgccattacccaagctgatgttgcaaccagcccttttgtggtaacaagtcaacttcctatcaatgattcatattttactgtattgtttgactctggagctacacactcatatatggcatcgagagtaattaataaactag

SEQ ID NO: 142740 - DNA, 533 bp, Cannabis sativa
gcattccgcactaggtatggacatcccaaaaatgctcattgtgtactctcaatcagaagaggagcatgagcaacatctctggatggttctgcaacgacttcgaaaaacataaattatatgcaaagttcaagaagtgcaaattttggctatctcaagtgtccttccttgggcacattgttagcaaagatgagatcaaggtggatccaggaaagatagaatccgccggggattggccaagaccgagaacattgatagaagttagaagcttcttgggtctggctggttattatcgtcagtttgtagaagggttctctaaaatttcaataccgttaaccaagctcaccaaaatgaatcaacattttttatggacagataagtgtgaagtaatttttcaggagataaaacagaggttaatcacaactccattgttagcccttccttttgaaaaagagaagtttgtggtatattgtgatgcatcgagacagggtctggggtgtgtactgatgcatgctgatcgggttattgcctatgcc

SEQ ID NO: 142741 - DNA, 624 bp, Cannabis sativa
attgatatttgtagtacctaatatgactatgaacaaccccatggtgtcactgttgactgacaacaagctctctagagctaactttgtcaaatggaaagttcacattaatattgctacttttgaaatcacgtagtggctacccctacacagcttacgaaagtagaggccactgttgaagaacgaagggagatcacgcctagaaggtcgtgggtactagcgctgggttcctgcatgatgaaatgttagaggaacttaattgacaagttggctagtcagagtacttactgagatgttccatatttcagcgtttgggtagaagttttgacttcaagttctcgttgtacttgtcaaacttgtatgcacctttactgttatcttgtaacatggtgcagacctttttagtttggtccgaacatgcttgctgtaggggatttgctgtcaaggaatattcttcaaggagtaattctcttgcaaagaatttctttccttaatctatttgttgacgggcctggtaactccttatgtgcagccatgctgctttgagttggcttggtctcttcttctttcccttttgtcaagggattctactagcaagatgttgtgtacctcttggtcactatagac

SEQ ID NO: 142742 - DNA, 1263 bp, Cannabis sativa
  modified_base (164)..(166): a, c, t, g, unknown or other
ggttgctgcgtggttgcgcggtagttgcatcagacaatggttgcagggtagttggctgaaggttgaatcagacgaagatttcaatcagacgaaagtttctaagtggttgttggatggttagtcgaaggttgtatcagacaaaggtttcaatcagacgaaataannnttagcaaaatgtttatgcaactataatgtaactgttgtgaaacattaaaaattagaacaatgtttctatgtacgtaactctatctacatgtctctttatgatttaatatgaacaaattcaccattagaaatttaaaaaacaacaaaaatacaccaagataaatattttacaatagtattgatgaatttttttttggattatacttgagttggattatttgggaactccagattaattttttgagatctgcctttcatgaatctgataactgaagtcaggacatcagttttatgaaattaaactgaattttcggttgaattttagtttcgtagtagtttttctacacttttttttttatgaattcaaaacagcccatgttttgattgattctgatcgtcttctcaggtgaagtcgtcagaattaatggtggttctctttctggttgaattttcgtttcggttacgttggattgctacatggttgtacgatagttgcgcgatagttgctcaggaagtatggatcctgggttgaaggtgtgtgttggtatttgtgtattttcttttatttggattgtatatttgtttatttggccagatgaaagtatttttgtaatattgttacttttttttttattaaaactgaaaaaaaatcctttaaaaaaagaagatcaaattgtatttaatcaatataactattattatatctaacaaaaaatatatataaggtgaaaaaattaacatatacaattaataaaataaaaaatggtaataaaataattaatattaaaaatttaatataatttgaacaattgtatgaaatataatatcataggataatacttagggagagtcacaaaaaacgtgtttacatacagacattttttttattatgtgtcactctcatatttaataccaatatttaattaattcctttcatattatttttatttcgttttttttaataatttcgtgatatcaataaggaaagttattaattctgttgtcgagtgaatttcgcaacaccaaattatattattttgttaatatcaaagagaattttatgtgtaaagacaagtgcgagtattcaacctaaaatgg

SEQ ID NO: 142743 - DNA, 630 bp, Cannabis sativa
atattttatcaacctgggccagttacaagaagttttttgaagaagttttccaagcatattctctgttttagtcaaagattaagatgcaagtgttttcaggagtcaaacagaaccatctggcagcctgaaactggaccgaatgcataggttgatatattgtcaacttgggctatttccgatcctatttataaacactctcaaccatagaaggttgttccggaacaagaatactcttgtaagaattgtaatcagtgtcaaacttgatactgctcaatttcaaagctttgaactcagcagcagtgggtttcatatttgatagttgcagctaagaaaaaaacaagaaaaggaaaaatatcaataagaatatttttaaaataaaaaagaacaacaaaacaactaataaaaaaccaaaaaacaacaaacaaaaataccttgtctttggagacatcaaaaatagtaatcttcaaaattctgaaagccggctcgctggtataagtccactgaataatccttagaatatgagaattttcttttggcaatacttacctttcatgtacttacaacactcataaaaccaaacttgaaatacatgaggacaaccaatcaaagtgtaaaatacactaggcctct

SEQ ID NO: 142744 - DNA, 517 bp, Cannabis sativa
  modified_base (283)..(284): a, c, t, g, unknown or other
tgtggttattatgatgtaaggtatatactcttacgataggactacttgtatacgatgaaaactttatacatattataataatatttaattatatatctattttaacaaacaaaataatattaataattaaaaaaatattaatttttaatttgaattattaatatttttttaaattctctcatatgtaaatcttcacagttttttgcattaatattattgttgctctaatttttttttctcattcgatattaaactagtgtgttcttgccattattatattttnnattaatttactctcatattgttataagagattttattaaaaaatattttattattaaactaattttattgggaaaaaaaaagagtttttacaccacatactgaaatttctaactatattctttattttattattattagtagattttttttcaaaaatacaatataagtttcatactgtgtactgtgttaagttttcactgttgttctacggttattttttagttgttctact

SEQ ID NO: 142745 - DNA, 963 bp, Cannabis sativa
  modified_base (285)..(290): a, c, t, g, unknown or other
  modified_base (374)..(386): a, c, t, g, unknown or other
ggctccatggagacaaactatttcctttacatacagttcagcgtactgatccactgaatatgtaactttcactggcagaaagtgagctgattttgtgaatctctccactatgacccataccgaatgatacattcctgtggttttaggcaatccaattacaaagttcattgtaatgtcctcccacttccactcaggaagcaccaaaggttgatataaccctgtcggcctttgatgttcagccttgatttgttggcaggttaagcatttggacacgtagtccaccannnnnnttttcatcccataccaccaaaagtagggtttcaaatcctgatacattttggtggttcccgaatgcagtgaataaggtgtggtgnnnnnnnnnnnnngtatctctttcttaagctcgtcaacaccaggttcacaaactcgagccttgtacaacaacattccactatttgagactgaaaagtttctaggttgacagccataacctcatcttgaaccttaactagctcaaaatcttctaattgtgcctttttgattctctctaacagatcagattgaagtgtcaagttgtgtaaccttccaactataaactcaatccctgcactaaccatctagaggctagttgagggctatcagaaccgtggtacaaatatgcccgggaccctttctactcaaagcatcaaccacaacattggccttccaggggtgatacagaatttcacagtcatagtctttaaccaattccagccacctcctctgcctcatatttaaatctttctgggtgaaaaagtacttgagactcttatgatcaatataaatttcaaacttttcaccgtaaagataatgtcgccatatcataagaacaaaaaccatagcagctagctcaaggtcatgagttggatagcgctgctcataatctttcagttgacgtgaggcataagctatgactctgtcagc

SEQ ID NO: 142746 - DNA, 708 bp, Cannabis sativa
tattactaatatttctgaacttgttgtgcctagaagtatacaggaggcactagatgaaccgagatggaagttggcagtggatgaagagatggatgctttgataaagaatgggacttgggagattgtaatgttaccgagggacaagaagattgtagggtgtaaatgggtgttcacagtaaaatttaaagctgatggaagtattgagaggtttaaagcgaggcttgtggccaaaggctttactcaaacctatggaatagattatcaagagacttttgcacctgttgcaaaaattaattctatacggattctactatctttggcagttaactataattggcctttgaaccagttagacgtgaagaatgcttttcttaatggagaccttgaagaggaagtgtatatgagtgtcccaccaggtttcgaaaaaaagtttggagttggaaaagtgtgtaaattgaagaaatccttgtatggtcttaaacagtcccctagagcttggtttgaacgctttggtaaggttttgaagaggtttggttacactcaaagtcaagcagatcacactatgttctacaaacattcagaggaaggaaaggtggctattttaattgtgtatgtagatgatattgtgataactggggatgacattgatgaacaagagagattaaaaagaagacttggtgaggaattcgaaattaaagacttgggtcc

SEQ ID NO: 142747 - DNA, 1010 bp, Cannabis sativa
tgggcaggagcaagcgaataatgtataagaaatttcttaatgagtctaggaatgggtaacctcagcctaatcttcgactcaaaccagtatgagtgtaggcataccctcgacggaagcctaacttcgaccctcgacggaaaaccacacgaccaaaccaaggaatcgagttcacgctgggtgaggaccgacggacaactcgacctaacatccaaataggaactacccagggcatgttttttctttttgtccttcttcaacgggggaatcgctagagtaaccccctcagacggggctgcttgagcactaacacccgcctcgcctccagaacgagagcggggaataacagagacgctgcctagacactcaacttctgggtcgtcagggacttcaacattctcagtctccataggaggagtatcagagactaacaacgactcgacgaatccaggagcaatacttgaggaaagagaatcaaaaaccgaaggagagacacttggacaagcatttgacttataccacagctaaaacgacaatcgaaatccgaagcctacccaaaaaaaaaaaagagaggctaaccctaagaaggaaactgcccttacgatctaatcataacggggaaaaagcaagactaacgccctgaaagggccgtaagagggaaaatgctaggactaaataggggaagtagagaaaacgggccagagaaccgggatgatatcccagaggccaggaagccctaaatgtctcaatggtaggggaaataagagaataaggtagaagaaaggggaagatcctagaagaaaaatgggagggaagataatggaagggcggaaatacaaaaatatacacagtaattaaaacaacacatataaaaggggtaaaaatgaatgaaaaagaggcaaggatgaaaggaagataaaaaaagaaggggagaaagaaaaagggatgaaaagaaataaaacttaagttaaatagagaagcataatatatatacctgaagacagcaagatcta

SEQ ID NO: 142748 - DNA, 506 bp, Cannabis sativa
gggagatctcagaccccatttgaatagtcatctcacatttaatgccgcatgggagaaggcgtattggtactgcaataaatattaaattctgacggcgtaaccccgtttctggagctattacgttatgattaataagcctagtgacggctactttatgagggatcacatcagtcaagaagcgatagtggagtatatctatctaactcctgaaatacctagggaacagaccatgcatttcctattttgcatgggctaggaacacatgctcctactgacgttacacagaaatacatatgggataattctagggattacctcggagaaaatactataaataccccccaaacgcattaaggcaggggtcgagaattctgggtttcataagaacaaaagagaaaagtcaccaagaacattctttgtaatacatactctcgtaattattaaggactcgtggactaaggctcattaatgcctcaacaacgtaaaaatcttgtgcattaaacttc

SEQ ID NO: 142749 - DNA, 872 bp, Cannabis sativa
tgaatagtggttaattataggcttttatatatagtactcagactaacacaagaaaacatgtacaaaaaaaaaactaactttaagatgcaattactaactttctaaacatgtcagtagaaaacacgtggacaaattaatctatccgagtagttgaataatattattttgacatgatatgtatttatttaatttcaatagtaatactaattattaattacatatactataaattaaggttccaaaagggttagttgatgatgaaactggagaagcacataacaaaggaaattccttaaaggatctaaacatagcaggaggatttggagatacaatataacagaattgttaaaccagctctgataattgaataaaaaatagggaaaaatattaggattaccttaggttttcaagatccaagaacaaaggtttttccaatagtagtagctgaaaagaaatgttatgactgaaaaaaccaagcaattcaggagctatttacccttttaatactcaccttcgtaaacatccccattactataaagactctctcccaattattgtccaggtttattctttcaattttattgtaatccaaacaatcacagtcccattcaaaccaaagaaagactcaaatcaaattaaattaatttttcaataatcctaacaaagaccatttttaatttggaattttgatttgagatttatgatagttaagatggtggtcattttaaaataaaaacaatgaatgttatattttatgaagtctatggacattgcagaatggagattgcagataaacatagggaaatcaaggaaacaaaagtcagatgtaattgaaattcttaccttattttggatttgacgggagagatttg

SEQ ID NO: 142750 - DNA, 501 bp, Cannabis sativa
gacctgagcttgttgtggaggcacaacaggaagaccctgctgccttagtcataaaatttcttcatgttgttggaagattcgatcttgcatcttcgcaaacctctgctctcaatctggaggagcttgtggtggatttacaagatgattaccctgagctctgccacggccatggccgcgaccacagccgcgaccacgaggattctggggaatttaatttccctaacgtcctccggtctcaaccatattaccctgacttcttgtatttcactgggcatacatataataggacttagcctgtgaacccataagctaggcaggttggacggcgatcataaaaacttaataccgctcctatggattttaaggcaacgcaactaagatagataactataatctaatatgtttccttacatgctttaataacgacatataattctaaacaagtacgggcttactgaatcgtgacttgagctttctctgatgaagattgtgttgggtttt

SEQ ID NO: 142751 - DNA, 637 bp, Cannabis sativa
  modified_base (29)..(34): a, c, t, g, unknown or other
aaatcttccccaaacaccaccaaactttnnnnnncatcattatatgacataataaacatattccacagctcaaacacaataatttcactaagaatcaaacagtgccattaaagctccaagcttaagttccatgaactcaaagctttcttttcacatccaaattctcaatttacaatcaaactttaaactcaatgaaaccctaaaaatgcctctgaatttaccaaaaataaatcccacaattaaacacaaaatcatgactttaactcctaaaatcaaagctcttgaacttgagcataaaacaaacttatttccaatattttacagcagccacataccaaaaataacaaggatttcaaccaagagaaaaccctaaaatctcagccacaacttaataattaaaacctacaacaattcaagttattcacacccaatttaccaagatcaaacatcaaactcaacaacatgcataatcaagaataccacaccctttacatacttttcttacaatattttcagcaagaaatttaacaaaaattcagtaggaagaactacctcacttccaattcaaagctagagtccaccaatctccaaaaatcaagctccaaaccaagcgagatcactccaatttcaccaaaaa

SEQ ID NO: 142752 - DNA, 1638 bp, Cannabis sativa
  modified_base (926)..(928): a, c, t, g, unknown or other
  modified_base (1084)..(1088): a, c, t, g, unknown or other
aactctcactttttttctctctgagattgcttgactgaaatcaactccagttcaccctttatataggctttcagggactaaaaagatagaaaaacgcacaggtaaaatgcctattcaaactaggaaacccccaacacctaggtgagacaaaaatacgatttttgtgctgtttaggggggcgggctgcggcatgctaaagccatgccgcggctcgtgttggaagtgatttttctcttgcgtcgattgatagtatttttgccataactctctagatattacttcgaatcggacgattcaagatgttccgaaaagataaaagagagatctagaccttttatactttgactttttccaaaatctaaccaaaagatagtagaatttaggcctgaagtttagctttatttccttgcacaattttctctattttaaatatcatctttttgtgagatatttttatctttttttcccatttttttctctgatattttctaatcttcttctattttaaatctgaaaaaataaaagataacaagcgtaaaaatgcttcaaacacgattaaaactaaattaaaaatatactaaaattaatctaaaattaatactaaaaaataacctaacagtatgttcatcaaatggatgtaaaaatatcatttctaaatggtgacctcgatgagaaggtctatatggaacaactcaaagggtttgtcctaccaaaaattgaacataagttgtgtaagttgaaaaaatccttatatggattaaagcaagctccgaaacaatggcacgtccattttaaaatgctattatttcaaatgaatttaggcataacaatggagacaagtgtttgtattcaaaaacctgtaaaagttatgtgataattatgtgcctatgtgtggatgacatgttaatccttagtgataacatgannngaatagaagaaactaagaggtttctttcttcaacctttaaagtgaaagtccttcgagaagtggatactattttcggtatcaatgttacaaggcatagtgggggttttgctatagggatgaaagcacactacattgagaaagtgttgaataagtttnnnnntctaaaggctaaagaggccaacacaccattcgatcatataaaccactagttaaaaatagtggtagagcggtggatcagtttgagtatgcaagtgctatagggagctttatgtacgttgctccatgtactaggctcgatatatcatttgcggcgagtaaacttagtagttactagtaatccaagtgtggatcattggaaggcaatagggagagttttgggttatctaacgaaaaccaaaaatctgtgtcttcactactccaaatttccttcaatttttgaaggacatactaacgcaagttggatatatagccaaccttggggataatttatccacaacgggttgggtattttgggggtccaagaaacaaacttgcatttctcattccacaatggaagcagagtttataactctagctgtcattgggaaagaggtcgaatggttaaaagatcccttaattgagattccaattatcaaataggatgtatctaaaatatcgatacattgtgatagccaagcaactattgctagagcatatagtggagtatacaa

SEQ ID NO: 142753 - DNA, 735 bp, Cannabis sativa
agctccacggccaagttagccctggactccaagtccgcctggtgcaattcctctaaggacctcaccttggcagccatctcgtctaaggcctccttggcctcacaaagctcgcgctttgccttggcagtagcctcgccctctgccctcaacgcttcccggtgcttcgcctccagcctatccctccgaaggacctcttcccggatcatcgcctccgcctgggcttccctttgcttagcctcttcttcgaacttggccttagcaagagcctcctgccgcgcagcctcctcccggaacgcccgcctttcagcagacaggttctgcaggatcttcacgacttcgtctatgcccccgaattcggacaagacgaagccgtgattaataatggtcttggaaacgcgggcggcctctgcaataatttgaaaaaggaagcaaaagtgagtgaaggccttaagtaaaataatgagaaaagaagtaaatcacaaaatacttaccgtggccaaggcgtggctgagatcctgaacttggaagacggagttcaaggatacacatgcagcgtatcgcttaggtgcgcaccgagtcagctgggagacatactcgccggtcatctcaccggtaaagggagccaaggtaggcccgaggaaacgattgaaccagtccgtcagggggtccaggtttagatcttacggattctggtagttctcctcgttaagggaattttgcacctcctctcgcaaa

SEQ ID NO: 142754 - DNA, 1400 bp, Cannabis sativa
  modified_base (318)..(343): a, c, t, g, unknown or other
  modified_base (791)..(803): a, c, t, g, unknown or other
  modified_base (1105)..(1115): a, c, t, g, unknown or other
  modified_base (1340)..(1371): a, c, t, g, unknown or other
ttaaagatcttgcgaattgataagggtggagaaatatttggtagatatgtagttcaaagattattaatttgaatttttgaattgtatcctaagttacctcccaagaaattcggtttgcatattgatgaaagtaataggtctatgattagttactagcagttgcctaagttcttctatggatatacctagtgataggaaaaccttagaatgatggaatggttatgtacttagtgtaaaccattattagattcatggatgtcctgatcgtgaccttaagaaaagctagaactgctaactaaagtttgcatgtttgatagnnnnnnnnnnnnnnnnnnnnnnnnnnatcctatggtcattaagataagaagtgtttacaacaaatactacttttctaagaaaatgactaaatcttaaaataaagtagcaaagtagaggagatattttttttttgattccaatgtgttctatcatcgtattctataaaagatggtcccactgcctctgttgtcttgatacaaccgatgaggataataccacatacattcttagacagaaagtcacgataccttgtcgtagtgggagggtttcaaggaactcacccttttatgacttggaagatacttgtgacaaaatccattgtttgtttaaaaaagaaatgtatagtcagataaggaactaagaagcaaagccaagagaactatgcttaaaaccattcatatagagtaaccaaaagttttctagtacaaggacaagaaagagaattttcaaaaataagtctattcaatggactnnnnnnnnnnnnntggtcctagtattataggtttgagattatctaaacctgtggcttatggtatgcctgttaatttacttactctggtccaagcaacttactttaataagatgctggagcatttttctaatggctacatctatacaagcttttcgacttctagacattgattttatttatctaaggaaaagttttaactatttcagaaaagataaaggccaaggaaagaattccttaggatcaatagtgagaggtcttaggtatgatttacaatgcattagactagacaactgttgttgagtgggagtaatgagnnnnnnnnnnnttaatccaggaaaggaacattggatgataattaagtaaatcttaagatcaagaagaggatctatatgttagtacataagggtggtatttaatactcttagactgcaccaaattaggtttctagacttgcttgatgctagaaaaactactaatgagattgtgattactctgggggtggagtagtaattttatagaactgtaaaaactaggggtgttcgcggtgcgnnnnnnnnnnnnnnnnnnnnnnnnnnnnnnnnaacccgcacatgcggttttccaaattttc

SEQ ID NO: 142755 - DNA, 646 bp, Cannabis sativa
taattgtgcttatccctaaaaaatccaatgcttcttctctgaaggactttagacccatcagcttatgctcaaccctgtataaaatcgtctccaaagctatagctaacagaataaagcctatcatggagactatcatttctcctactcaaagtgccttcctagctgataggcttatctttgataacatccttattgctcaggaaatggttcatgccatcaaccacaggaactggtaaagttggatgggtgggattgaagttggatatggaaaaagcttttgaccgtgtggagtgggatttcctcattgccatcctgcacccatatcaacttccctaataagctggtttcccttattcaccagtgtctttcctcggtttccactaagtttagtgtcaatgggaatttcactgaggaaatctctccctctcgaggcttaaggcaaggagaccctctctctccttatcttttccttctctgttctgaaggtctggctgctgctcttcgtatccaagagcagcgtggtaacttttgtggtctctccatagccagatccgcacctgctgtttctcacttgctttttgctgatgatactcttatctttgccaaagctaccctctcttcttgtaatgcgcttcaagctgctctc

SEQ ID NO: 142756 - DNA, 539 bp, Cannabis sativa
aattataagaaacaagtttatcgacaataattttacaagtagttttgaaaacatccacagggaggtggagcagttgagcccattagatggcttgaagaatgaccttaacttttgtcacagcaagaggaacacatccaacaaagggtttggagaaccctgctttaacctgattgaattcatccataacaataactccaatattggttgttagcatatgctgaaactatttatcttgtacctcctaactcacaatggattgacatttctgaagatattcttgcaatacaagtgatatcacctcctgaagacaaaactatttatcttgtaccaagaaccaattgcatagcttccaaaggtgaatttcttaagaaacaatataattgaggaacacgtggacaatcaggacataattcgcaaacatgtccataagagccatcatatggtagaagcacatgtgatttattattatttagttctctaaattatatatttaatgtttcttgtgtttgatatatgcaaacttttatttatatctattt

SEQ ID NO: 142757 - DNA, 848 bp, Cannabis sativa
  modified_base (28)..(34): a, c, t, g, unknown or other
ttatccatgcataagcactcacaatagnnnnnnnagttaaaataacatctaaaatcacaattaaattttgcaccacaataattaacttttgctttcttactaaacttaaacgagctattttatttacaaaaaaataaataataaaaaaaaattatatgacaatattaacatatatacataaaacacacataaatatatatgtacaacatataaagtaatatataaattttcttaaaaaaaaaaaataatgtgtgtaaacaagtaactaacaaatatgttaacaaaaaaaatttcaataacaaataggatatatataatgtataaaaaaagtaattgacaatatagcaatataatgtagtttttattcatgtactcataatgaataaataatgtatatatatattttttaaacagtaaattttatcaatttctctcaaaaataaaaaatatgtattatcaatttttaattttaatcgaataaaattcaaatattctttaaaaaaaaataaaaaaaaataaaactcaatgcccaacccatagtataacaatacagtttaataaaaaaaaacttgaacatgttgctttaaaaaatatatataatttttttaagggatgcaataaatgtatattatcattatatataaatatatatttataaactaaaaaattagggggccatacaaagatggtaccgcctatgttccttaccccagccattgacatatgtatatatagattgaatgaaaaaaaatgaaaaaaaaaatctgacataataaaattatatacgttcatatataattacaattattaatataaaaaatatattttgtttgatagaaaaatagttg

SEQ ID NO: 142758 - DNA, 1202 bp, Cannabis sativa
caaatatattttgagttgtgataaggttgaaaactgacttgatgacatgtacacattttataaatactcgtatatagttagagtacaattatcaaagaaaagatctaggcctaaataccataaagaccatttcatcagaaaagctataaggtttaagggttacatattttattatctatctcacaatactagaactgtggaattaagaattgacttgatcagtggaagcgatcgatctacgaacctagtttctaaaaaagattatttattttctcaaacttacacctcaagtatttgattaatttttattcacaacaacctttaattttaatgattattgagaattcataattaatcattaataattcacaagtcatcgataaagttataataaagtcatgttatttattaattacttacaatttctaaacaacatatacatgttgaacaaattgctctttaaagagtattttagttgatccttaagatgttttattagaataataaaatcaatatttctagcgattacattatgtacaataagagttcagctacaatattaattttagacataaattaaactatggaatgcacataatttaaatggtagtacagtatgccatgaatgaataaatgaatatcataaagaagcaatgaaatctatttttagcaaagttgcttattggagtggagaacattcattaagcatatatttttcaccaataaacactcattaggcaacatggagaaacataaagatataaaatcaaaatcattgctaagaagttcattttaaactaagaattaataacaaaggagatttacattctcacttgtctttatcaaagattctattatagtaaccttggcatttgttgctcgtttcaattcattaatcaattcaaaatagtgaactagaggagaaagtatacagataaccataaaaattttcctctgataatggtgaacatatgcaaggtttaaaagtctacctacagattaaaataaattttttacaattggtatttcattatgctatcttttctttaagtttgaaaagagcatatggaattaattatataccagaaggtcagtgagagtaatatttgttttacatgtagacaatatgttacttgcaaatgatgataaaagttttctatataagttgaaataattcatatctcaaattattattttgagat

SEQ ID NO: 142759 - DNA, 775 bp, Cannabis sativa
attaatactaacattacttttaattttttattaattgaatatacatataaaatttgttatgtgtaaatttgaatcatcatggtcggctatatttaagtaagattattatatttaattacactataaaaatttatataagagccctaatgtttttttttgaaacaaataaattaaatatgaatagctgattatattaagagtatttttatttatatttttatattcttttgtgttaaagtttgataatttttttaattttgttttcatatattttgatttttattctaataaaattttatatattttttattttaattattttatctatgtaaaatatatcacattttatgctacatacaagagtatgttaaaagtgatttaatctatgattatacaattggcctactcctcatctttttttttttttttgcagctagagttccactaattcattttgggccgttgagattacaaagctactgcatgagtattttcttgcttggctatcggttataattagattagtcggttattattgaatttgatctatttatgaatattccgataactaaatatgtgctataaatcattcaaaaaaaaaatatacattacaaatgaaaattaaaatagtattttaatggaaattagagatgtgttccaagtatactcatttagtttgatatttattagaattttttagataatttaaatttttttttctataattatacaaattgtaattatttaaaactatttgtaagtttttagaaatttt

SEQ ID NO: 142760 - DNA, 1013 bp, Cannabis sativa
catccctatagtactctgataactgttgttgtatgaaaattctatcagtggtaggtacttgctccaggagccctcaaaatctatcacacaggctcgcaacatatcatcaagtatctgaattatcctctaggactgtccatcagtttgaggatggaaagttttactaaacttcagcttaatacccatggctcattggagactttgccgaaattttgaggtaaacttcagatctctatccgatataatggaattcggagccccatgtaacctcactatttctttaacatataattttatgtactgatccactataaaggttattttcacttgtagtaaatcgatccaccacaacccaaataaaatcgaacatccctgtggttctaggtaacccaaccgtgaaatccatggtgacatcttcccatttccactcaggaagagtcaaaagctgcaacaaccctgcaggtctctagtgttcagccttaatctagtgacaagtcacacatcgagatacaaattctaccacatctttcttcattctgcaccaccaatagaagtgttttaaatcttgatacattttggtagtgcaaggatgcaacaaataaggagtggattgagcttcttcaaaaatattatttctaagttctacattgcttggaacacaaactctagttctatacaatagcatcccattacctaacactgtaaagtccttagcttgacaagctaaaacctcttcttggatctttactaattatggatcaattaattgagcagctttaattttttttttgacagatcagatcgtaatgtcaaattattatgttttcatactacaaactcaatgccttatctgaccatgtcagttgctagcatgggtgaaatcatagtcatgctagatacttgcctaggacccttcctgtaacaccttaactaacttaggcatgttagcgtgattttaaatgtactgtgcagctcgttgctagtcaactagattaacgaaaaacgtgattaat

SEQ ID NO: 142761 - DNA, 541 bp, Cannabis sativa
catgctcaaattaactcaagaacacaaacatgcaattacaagatcaaaacaacttttccaagcttttaccaccataaaattcaacaagaaaactcaattaaaaatatgaaaaaaaacctcctcaattccttcacactctagttccaagcctccaaacacaacttcacaacaatcaagcttgattcaagcaagctcccaagtaatttttttctcaatttgaactaggttagatagagagagagagttcgggtgagaggaagaaacaacaagataatcaatctatttccctcaaaaatccatttttaataaacttagaaaataaaggtctgaccaaaatgcccttagggcccaaatcacacatattcacacacacaagggtaatttgtcatttcatgcataaataactcacaaataatttcaaattatcacttatcaaataaaatgccaagtaaatcaatccaattgtatttcgggcccaaaccaagttcggcccgaaattcccggttgtgactataccgcgccaacctgtcagaacacacct

SEQ ID NO: 142762 - DNA, 1524 bp, Cannabis sativa
  modified_base (1295)..(1308): a, c, t, g, unknown or other
tgacatgtaaaagtaactgatccaatccaatccaatctgcaaaatgcagatatccgcacttgtgcccattggattggatatgaaaatctaaaatctgcacttgtgcagattaaatgttaattgacatgtaaaagtaactgatccaatccatttacatatatttagacatattttttaaaaaattatatatgtaactaatattttaatgtgaaaaatagtaattttaaaaattaatacatatgatataaatatattttaaaatataataaactaaatttataatccatttttattataaggaaaaaataatctaaaacaaaattaaatttttctttatacgtacaatttttttattcttgctttaaatttattatttttttgtttcatttattttaatttattattggaaacataaaataacaataatttattttattttgttgttaggtatgttaaaaaaaaatattcttttaataaatatcaaaaaattcaatattaaaaagtaacaaatctaaaataactgatctaatctgtacttttgcagattggatttgattgaatttgagttactatgcggattaaattgtatccaaaatagaaaatccgtacttagtgcaaatcgaatacctatgagcaaaatagtagggattgaatcttataaacacccctaccacgtattagtcttcctttgctatcaactttacccaactctcgaacacttaattgtgttattttaattagtgttttataaatacacacaccatgaaatagtagtacttgtagaaagttgtttctaatgaagcaaacatcattgttaaatttaacaggcacatctcttgtaacctgcctcaccaaacatcatttaattatttataaattttctctacaataattaattattgttctgtatatagtcgaaaaaatcactaataaagtttcttttttattttgtgtagtagttaatataaggtaaggttatgtgggaggaatggatgggttggggaggagctagaattagagattattttactctttatttctttaaaaaaattgctatatatttttaagctacaaaaaattgtagtttacaattatggtttttttttttttaattataattagtttatgagttattatatgtttttatttattttgttatggaatcgtttgtttttatatttataccacatattttttagaattgatttccaatttttttttttaaaaaaaattataaccagttttatgaggtattatgtgttatgagatattttattgtggaactagttttattnnnnnnnnnnnnnncagtgttttaggaactgattttttttttaattgtaataagtttaaattattgcgtgtttcttattcttattcattatgttatataatcggttctattttaattataattagtttgatttatttcgtttgatttatttttattcattataacattgttatagaaccggttctattttaattataactggtttaagttattttgtgttatttattttt

SEQ ID NO: 142763 - DNA, 1247 bp, Cannabis sativa
tcatgtttagtctagtttgagttctggtacggatttgggttctggtccgtgtctgggtcttggtccaggttcgattccctgatttagacaccgattatgggtcaggtcgaagcctcctgtcttgggtcctgggtcacgggccaaaatccagatccttgtccagttctagctcatgtcttgggtcatggttcgaatgtcaggtggaggtttgcgtctaggtttgggtcttgggtcgtgagtgatgggtccaggtccccgatccaagtcagggtccaaggtcccagtttgggttagggtcccagtctgagtgcaggtcccggtccattttcggtactggtccttgtcttgggtcttggcgtggtttaggtttgggtaaaaattcggttcacaggtctaaggtctaagtatcgggtcccgggtcccgggtcccggtcccggtctcggtcccggtctcggtcccaggtcccggtcccggtctcggtcccggtccaaggtctcgatctcggtccccgctcttgagtctcgatcctattcctagtctagtttctagtcctagtcctggttcaggtctttgtcctagtccgggtctatgtcccatacctgatatcgttctaggtccgggtcccgggttcgagtccgggttctagtacaagtacgagtctgggtttgggtctgagtctgggtctaagtttcagtccgtgtctgggtctgggtcttggtctgggtttgggtctgggtccgagttctggtataggtcttggttcaggacctggtctcgggtaatgcgtcctgggttacgcgatctgggtcgcaggtcctggtgcaagtctgggcttgggttcgcgtctcttgggttctagtcattattcggttctaggcctagatctggttttgggcccatgtccaattcctgttccacggtccttattccagttcttattccgatttcgggtctcggtttcaagtttgggtttgggtcatagtctagaaatgtttccaggttcgggtctttgtacgattcccatatctagacccccactaggggttgggtccaagccccatgtcgtgggtcaagatctggatcccaatattcggtccgattcggatcttgggtccctgtccgtgtccatgtccgggtccaggtttgggaacgaggccggggttggggcttgggtcactgtcccagtcctgggtctcgattcttgttctaatttttagtttgggaccccaatctaggtctgggtcct

SEQ ID NO: 142764 - DNA, 872 bp, Cannabis sativa
ttcttaaccattaatgctctaaataaatgcttggatcttggatagttgtaagagcatcattggattaatatatttgattatagtgattataatgctcttgtttgaatattcctttaacatgcttgtcaagggaatttactttgctgcaagcttaatcaatttattaattacttctttctttcttaaatctttttataaccaactatttgcagctgagggaaaaaattgatgaaagggttggaagaacttttgccaaatcctaataaggtaaccatttctattggttatctcttgttaatgaattgggcatttttgttatgtaaacacaaatttcttttggtttattgtcaacatagattatgtcaaatttcttcagctccaagtgaaggtatgttaaagaaacactagttattctattgacacacacacacactgatattagttactctcttttatgaaacaatcacttaacaaaaatgactctttttgtcaggttcttctcatcacagatggtcaggttgagatatggtcttgttaaaccccattaatacttacttattaattgcttcataacaaatgatattatatacttttctttttcttttgttttgattgatgaaacgatctgaataacattagatggtgaattaggtgaggttgttttcccatgtgatgaaattgtgttgttcgaaggagaggagaggtagtgaaggtgatggagtcaagtgtgaccaaagccatgctgcaatttcttcaaagcaaattaggcctctgactgtctcatgtctgttgctcttgcttctgccatctccactcaccaaaaaaagacaaatgatctcttctgtgtctctcaggattacaccaacaaaaat

SEQ ID NO: 142765 - DNA, 530 bp, Cannabis sativa
ccaaaaataaagataagggggttaagtgtataaaaatcaaaacataaggaggtttcgccgcaaattgctctaaaaataaggagaatttttccttctttttttttccttcctaattttagtagaaaacaaataaataaaaatcattaccacgtgagtctcatacttggaaattaaaacacacttgtacaatttagactgcaaatgtacttcaaattcaaacatagcaagaaaattggaagcaatttcaaaatgaatccaaatgttaggaataagttaaaataaaactttttgagcaacttcagttgttagctgtgaagaagcaaagttaataaacaagacttttagatcactataatttttaaagaatattactaattaatcgtaaggtattactatacataggtcatgtcctttgacatgttatttttctctctactgtagagtgttattttgattagtaaaagtcttgttattttggttttttgttccctgagatggcctcaagcagtcgagtaatggaagagttagag

SEQ ID NO: 142766 - DNA, 755 bp, Cannabis sativa
  modified_base (57)..(71): a, c, t, g, unknown or other
  modified_base (721)..(729): a, c, t, g, unknown or other
ataagtgatgaaaatacttctgtctctttattgatatttaaatgatagagattacannnnnnnnnnnnnnnatttagggcataaagcccaacattaccaccgtcataagtctataaataccccagtgataaacaaaaatggggatcgattgaaaaactatatgtaataaatactctccttaacacagtgactcgtggaataagactaattaatacctcaaccacgtaaaaatcatctcttctaacattcattaattactccatacagttctaattattggttgtcaaaaatctcaatcaatatttccaataaaaaattaaaatagatatgacaaaaaataacaaattaaaaggaagaaggaaaaaaaattcatgtacaaaaaatgttttaattttgttttagcttataatttttttataaataagaatgaaataaacatttgatctattaagttttgaaatatatttatatcatatgtattagatttttaaattactattttttacattaaaatattaattgtatttataattttttttagaatatacatgaatatgtgtggatctgattggatccgttccttttacatattaatcaacatccaatttgcacaattgtgcattctagatttttcaatctgaaattccgtattttaatatttccagtttgattattgaattaagtgattaattaaaagcggaataatgaaactggtactgannnnnnnnnttccgtagttacagaatacaactctg

SEQ ID NO: 142767 - DNA, 502 bp, Cannabis sativa
  modified_base (358)..(360): a, c, t, g, unknown or other
  modified_base (447)..(460): a, c, t, g, unknown or other
gaaagcgcaatttttgtttttcttccaaacaaatatgatattgacatttttttacctaggcgtaattggtttcgaagatcgctcctagccttgttctttggaagatctatatcgtgtctagtactgcatggttccagtctacaagaactctgaatcattctgttgaagcccattcgcttcatcataaatgatctgcttgcctcgaaatgacctggcacaatagggaaatcccaattttttggggctgtctatttgattgaatcgaaaaccccaagggcgccatattgtaggagccgaaactatgtgactgaataaatcctcctctatccgttgcgggtcgaggactccttctccttcnnnttcttcaaactccgatttgtattgttcatagcaaaatctcggatcaacgatagaacaagatccattttgcatcatatataagggatnnnnnnnnnnnnnncgaagaagcaatgtcactcgatcattatcaaactggctgcaa

SEQ ID NO: 142768 - DNA, 688 bp, Cannabis sativa
cacgtacaaatctcttgtgtcaagtgatttaattttttgcaattatttttctattctgtatgttctgttttgtcgctgcaaaactggtttctgcagtaacaaaattacattatgcttctacaaacgtgtacagttttatatacagtatatttctgtaataattattggcatttgtaaaaagtcagtttttcagtatatactaattagtatatgttaagaatatataataattaatattaacaagtatgaagtaattaatactatgtttgaaattgtacatactaattagtacatatttaaaattatatagatactaaaaagcaatagttacaattaggtatacatttgaaaatgtacatactaattagtctatatttaaaattgcatatatagagaaaaacaagtaataaatactattaggtatacgtttgaaattgaaaatactaaatggtatatatttaaaattgaatagatcttaataaattataaatagtttaaaattatatattaattggtataaatttaaaattgtaaaatattaacaagtaaaagatactattcaatatatattttaaaattgtatatactacttcattgttgggctttatgccctaaataaaactttatttcaatgtaatctctatcatttaaatatcaataaagagacagaagtattttcatcacttat

SEQ ID NO: 142769 - DNA, 594 bp, Cannabis sativa
  modified_base (38)..(48): a, c, t, g, unknown or other
gggtgaggtcacttatattatttttgcacattcaccannnnnnnnnnntcttctatctttcagatgagcgatttgtcagacagccaaatgcttggctctggaggcggtgcattcaatggcaaccaggaccatcagaaggatagcttcatcccaacttctatcttagaagaggagatccctactgccggagacaccgagttgggcccgctgtcctctgcagacatcgagaggatggtgtaggagctcgttgaaccaggaactatcgagattcgagagagcgagtctatgatgtcagcccgtgaacaccttattcactccaggcacgctcctgacgtcaaagtcgaggagatggatgaagactggatggttccagaccgcgagtcagatgaggaagaggacgcagagggaagtgggactgattcggtggacaatactcaattggatgatcccttctcatgcgtggacttggttgcgcgagtcaccaaatctaatctcaccacctttacgagattaaatttgctgcgacttgcctccatgcgtcctcgtcctacccagagagcgcacctttcctttactaaccctgcgatcataccc

SEQ ID NO: 142770 - DNA, 1367 bp, Cannabis sativa
agacctcgtggctcacgaaccaggagacaggaaaaggcccgggaagaacaacccggggaaaatgagacaccccctaaaaattaggttgaacagccaaattggagacaatcggaaactgatgaacgataaatccctcatgaaaatgaggatcttgggactcaactgggagaacagagatcacctgctagaaatcaccaacgtctttcccaaacccatagagcgaggattcgtacataccctgataggggaaatacgacaaaccggtctcgagaggaaagaacagagcgtgaagaagcaagtgtgacttcaagggaatccagaacccatattcgatcaacccgaagaggagcaagtactcaacaagctaatgatcgacaactgttttcagatcgacaactgatcttgggtttatttttccaccatgtgtaagaaactcggtattagactgtacgagtcactagcatttcctcttaagtcatttagtgcatgttccttacttctccaagctttcatgtagttcatcttgatgccatacctgtatttcaattctccctttatatccagcggtgttgcttttatctttatgttcagaaactttagttttatgcattctcctcagttttgatgttgcttgcctttggtcttcatatctaatatttatgggggcaggtgtgaatttttgagaacctcctgggccatttttggatgctcgtagagaccaattacaactttcgtaaacacatttcagactatactcttaagagaacgacttccacactttgtacaagaagttgtttttaattgcgtagtagctgaggacattcttcagagtttccttgtcctcgtatgcctgacctttttctacttttgggtgatgtttgtttgttattagcttcgcgttgttgatgccgatttctggatctagttttttacttttgttttcaagtttttctaccatttcttcagcaaccagattcacatagtcaactatgtcgaatttgtcgttttcaaattctcttgtttctgactctcctccgtctaggggtgaaaatcggtcggttaaggtcggtttttacaatttttattttacgaaaaccataaccgaccgtttaaaaattataaccgtataaaaccgaccatacggtttttggcggttttttagtttggcagttttggacggtttttggcaatttttgacagtttttggcagtttattacggtttttggcagtttttttggtttaaccatttttttatttcaaaaattgaaatcgaccgctatgtcaaaaaaactgaaaccgaaaccgactgccaaattcggtgatgacgtggaaccgaaaattcagttacggtctggtcagtttgatg

SEQ ID NO: 142771 - DNA, 695 bp, Cannabis sativa
aaaatatgaataaagatggaatatgtttgagtgattatagataagtatgtaaattaaaatgctatcatcaaaagccatctcattaaagtcaattaatgagtttaaataaataaaccaaaaaaaataagaataaatcaaaaaattaggagataagagattgcaaaataatcacaattaggatgccacatcaattcttaaaaacactcctttatatatatatattgattattatgatgctatgatctttttgtcccaatctttattctttttttttttctttttttagtagaattttatttaatttatcttctaaaaaagattaataataattactctcatttaattagtttttaatttctctcataaaatatcattaacgggagagttttttaattttgttactataacgtttttttaatagatgtgtatttatgtattttatttgtaattaaaagaagatttaatgctttaatttttataaaaataaatacattaaatttatatataaaatcatctgaaaagaaaaaaataattaacttaagaaattaatataattttttaaaattaattataaattggttgttaacctttaacctcctctccttattattattattataattattattatttgaataaacttcttattattaataatacataacaataaaataaaataaatacttaataatact

SEQ ID NO: 142772 - DNA, 1465 bp, Cannabis sativa
gtaactagtttaacctttcctatttggatcaggttgattagatactagtttatacatatttttaaagttttatgtgaaaagttccatcatgatatgatttttctatatctataataaaattcaaagttatcttctttttctagttgcgacaagtttagaagtttttttttctcaatccatgtccataataaaattcaaagttatcttctttttctggttgtgaccagattagaagttttcttattaaattgcaaccactttaattagtgatatttgggcatacccccttgcgaagagaaattctccattgaggttcagcttgccaagtactgcgagttgttcactatagagtgtcttcatttcttctctgaggaaacagattgggtcatcttcaagcagattggctcctcttcgtgcagagttatctatgagcagatttatctacgagtacagttatctacaagcagactcatctacgaccagatttctctaatcacagttatctacgagcatagttatctacgagcatatttatctgtgattatagccatctacgagcatagttatttacgagcagatttatttatgattgtagttatttctgatcacagttatctatgagcatagttatctacgagcatagtaatctacaagcatagttatctacgagtaaatttatctgtgattgtagttatctacgagcagatttatctgtgatcgtagttatctacaagcatagttatctatgagcatggttatctacgagtagattaatctgtgattgtagttatctacaagtagagttatatatgagcataattatctacgagcagatttatctgtgatcgtagttatctgtgagcacagttatctatgagcatatttatctgtgatcgtagttatctacgagcacagttatctatgagcagatttatatgtgatcgtagttatctacgagcagatttatctgtgattgtagttctctacaagcatagcctatctacaagtaacaagttatctacgagcaaatttatctgtgatcgtagttatctatgagcaaattgtgttttggggctatgatttaacaagattttttcctttcatcactttgtcccaatttggctttgggaattatataaatccattgacaaccacttgaatagtcagtaagtgaacaacccaagcatttcttattatttatgacaaataaaatgtcttgaacgttgacaccattcaatatttctctcatatatatatgtatttattctgtatatttatatatatatgaatatacgtatatatagcatttttctcatatatataagaatatatgtatatatattctatttatgctcttttggtgaccaaaaacttatatatacttcacatatatagttataatattatgtaaagtaggtaagaattttaaaattacttcctacatgctttgacgatgattagtaga

SEQ ID NO: 142773 - DNA, 612 bp, Cannabis sativa
aagctgtttgttggattgacgttggtcgaacccagaaatctgactcttgagtaagtttctgatttcctttatgcttatttttgcatgtttacatttcgaatacaccttagactttgctttaggaaatatctaggaaaccctaggtccagaaacttctgcgattcttcttcgccatggcttcatgcactttcacagtccataatgcttgttttctgaactatgtaatatctgtgtttcatcttgcttattcaaagcttcatgaactttttgccctaactcgagtaaattttaaacttcttgagttttgacttctctttgaatattttcactcttgcttctgttgagtactcctggttggcatatttgcttgttcatcgttcgatattttgaccaaaaactcatcttgtgtgttgtcttttgtagatgaactcaggtgagttttgggagaacggacatcggatcaactaggacttgcttcaacttctacacgacgatcatcctcgtctttgttctagccaaccttcctctagtgaaggacattcttcaaaccctgtacccagccatagaatgatggctcgtacaaagaagaccacgcgtctggctgacgcatct

SEQ ID NO: 142774 - DNA, 592 bp, Cannabis sativa
ttacatagttttcattctttgtcagaacactagaaacttgagaacctctctctatagaatttggatctcctcctcttcttcttcattattttcgagccttatagtgaaagagtacatgtccacccatagcaagttaaatactcaatcatagtgtgtaagactatgaagaatcaaacacctgaaggagaattaggcttagatcttgaaaataatctgtgatgaaaaggaaaagggttagagatctgagttgaaggatacatattattccgctataatcaatgtaaaatttcgtgaactttatatgtgtttaaattctattattttagaagattcatatttagggtgttaaataatatacatgttaataaatctagatcttggtaaaataatccccaacaactggtatcagagccaagttaatgatttactttcatgaaatatgaattaaaaacaatgattatgataatttggatgtgttcatggttgtttatttgattatttgatgatcgcttgtcaattacaattttacaataaaaactatttttagatttgtcctgaaagtattttttttttctgaaaagtagatgaaaaa

SEQ ID NO: 142775 - DNA, 650 bp, Cannabis sativa
cagcctaatcagcccaacaatccatataaccaaagattgcatcctccccctattgagggcgaggatatattggttatcttgggagggctgcatctcggtggagagagtaataatgcccaaaaaatatatgtcaatgaaataaaaaacgagaaatcggtgtttgctctagagccactaaaaaagccaaaacagaagaacctccaattatattctcagaggaagatacaaagcacatgaggtatccacatgtctatcctctcgtcattacagttcggcttgccaacaagagaataaaaagagtgttggtggataatgagagctcaataaatatccttgacagggatacgttgaagaaattggggctacaagatgcaaaattaaaaccttgcatggtgagcttatgcagatttattggtgatagtgtcgccagccaagacatcattcgactcccattaactgtagaagagccaccattatccacaacactaatgcaggagttcttagttgttgatctaccatcagtttataacatattgatgggtcgccctgtattgattggactttgggcagtcagttcaatcaaacacctatcattaaaattcaaaacaccaattagagtcggtgtagtacgaggcgactagttgttggct

SEQ ID NO: 142776 - DNA, 525 bp, Cannabis sativa
aaacttttgtgattaaatgtgtttttagtcgcaatacttattatgactaacactaaattagtgacaacttgtaactaaatactatattttagtcatatgtaacattttgtagtgactaaaagtcatatttagtcaaaaaaaaaatatgttgtgactaaaaaattgtcgctaaaagtaactattttttgtaataaatgtagtccatttaatctgacaggaataatataattcataataaaacactctaaaaaccagctgcaattgactcaactttaatggcatatctcagcaagttccaacaggcctcccttaagaactcaattcctgatttgagacatactgtggttgattgtgttccttggcatctcctcctcagaggcaaaataaattgaatgtagatgcaacaacacactctttgccaaacagaattagtaatgtcaatctgggctattttcgcgggccgggccgggcccccggcccgacgggccgactgtggcccgaattattcgggctcttctcgggctt

SEQ ID NO: 142777 - DNA, 575 bp, Cannabis sativa
atatccttcccagtctccaaactcgccaacgacatgaaaaccaccacatcatcaagatcatccaatctctcactccttgactcgcaccaaacaacaaccaacacttctgccacaaccctaatcagcctcctgggtgccttaatctggagctcgaaaaaaccgccaatcagaaaatgacaataaaagtccccaacctaaaaggaatttaaaggttttcaaaccaaaccacaatcagaaaaagaaaatctcaaaacacgaagcacaaagaatatgaggacaaacctaagcggcaacaatcgtcccagaaatcaaaccaagaaaagcaccgctgcggagacaccgaggtggaagaggcgcatacatattgccttgagcattaagccctcgcgccctactccgtacagaaagactcggctgtttctggcgacggcggaggagatctcgttgactaagatgtccaagactggtgggtggcaactgggtgtggagaatatggaggatatctggttacaaatttcagaggcaagtgaagccatggaattagggtttcaaagatgaagaagttagagagagaa

SEQ ID NO: 142778 - DNA, 658 bp, Cannabis sativa
atgaataaaaacaaataacatgaaataactcaaaccagttatataacataatgaatacaaacaattaacatgcaacaactctctcgcgtgggatgaggatgttgtgagggacctgtttgttgcccatgatcatgaccttattttgtccattcagctcagtgattcggccgctaatgatggttggagttggagacttgagacttgtgggaattattcggttaaaagtgcatataagttcttgcaagaatctaagggtgcttagtgccgggaggccaatactgagtttaggaagcggctttggtcattaaaaattcctcctaagatcagtagttttttatggcgagctgcttcgagtgtgcttccaacttgttttcaactccaaaagtgtcatgttcttgtcaatgttgattaccctgtgtgcaactctagtactgaaactattcaacatgcgttggtggaatgctcgatcgcaaaggctgcttggcatcgtagcatagtggacgttggggctggggctgcaacgttcaccagctggttgttgggaattttcacaaggggcacgagttgaaatggaggaagcatcgatggtgagttgggctatttggcgtgcacggaatgactttgtttggcaaaagaagagttggcttgcttcaaatat

SEQ ID NO: 142779 - DNA, 571 bp, Cannabis sativa
  modified_base (55)..(66): a, c, t, g, unknown or other
  modified_base (134)..(134): a, c, t, g, unknown or other
  modified_base (499)..(499): a, c, t, g, unknown or other
atttgtattaactcaagaacaaggagaaatgttccttttcttatagctcttacannnnnnnnnnnnaatatgaattcttagacaatatctctcaagtaaaatatttcggccctttgcccagtgaacatgcatcnctatttatagggctatgagcttgaagaggaactattcgttacaattgatatatgcagaaagattgcatagtaaatacagaatacgctgatcgtggaatttggacagctttctatatctctataatctgatccccagattatagggatttccttgatgactcacgatgcaaaagttgaattcgctaagtgtttgtcactctgtgaggattgttgattgttttgcctcgagcatgcacatgaggtatcctgttcggactgtatcttgtgggcagatgctcggagttaattctcgtgtgatgccacttcatagagcaaaaattgggataacacctttaatactaagagcaggaagttttgttaagtcnattgaatagacttactaacgaaatttcctttcttgtccttgtaatagaaaacttttcgttgttccatatgaa

SEQ ID NO: 142780 - DNA, 546 bp, Cannabis sativa
tataaatttatatatgtcataaatggtgacctctttatttttaaaaaaaaaaatacacatttttaaacatatatttgtcaaatagttaaaaaaataatctcctaaatttaaattaattcaaaatattttcaaatataaccccatcaaaatcaacattctttgaaaattcatacattttccaagttgatgacttcgcaagtaaagccctaggttaaaaaaaacttcaaccaaattcaaattcaagagactattttttatctttttgacaaaacataaggtctaaaaatataatatatgtgtttgtaaattataagtatagtacaaagtcttttttttttttttttggtgaaaataaagcattatatagatagggaaaattagacctcatggtcattacaaagggtgggaacaggtattaaggaaggttccacaaaccctgtaaagttccgatcgaaagcccatttagccacattatgggcagcaaaattacaacaccgcgaaacaaacgaaaaattacacgataaaaagtttttagagagttgatta

SEQ ID NO: 142781 - DNA, 557 bp, Cannabis sativa
gtttgggtcgtgcgggtctaggtctggttctgggacagggtctctgtccagatctaggtcccaagtttggatctcggtctgggcttaagtccaggtttgtattcggatacctatctaggtcaaagtttgggtttgggatcgtgtcccaaatctaggtccaggtcatgggaccgagttctgagtttggcttccagaccgagactagtgttcggttctaggtcccgaacccaattctgtgtcccgagtcaggttccatgttgggttcttagttcgggtccaggttcggcaccgggtcgaggtatgggttgggatccgggttcgggcctaggtctgggttggagtcctagtcctggtccggttacggttttaggtataggtttggttacggttcgaggtccaagtccaggtctaagtccttgttccggtcccattaccgggtctcgatctacttgtgatttcaattccaattttgggtcacagggtacgggttcgggtccatgtttgtgtctaggattgggtttgggtccgggtctgagtttggttcctgctctgggttc

SEQ ID NO: 142782 - DNA, 591 bp, Cannabis sativa
  modified_base (431)..(436): a, c, t, g, unknown or other
aagccaataagaactatacaaaattaccttgtataaatctatagttgtgagtgtgtgcactaaacttaaacctttcttaccgcaaaccaaaacacatagatgctttcaaaaaatgtaccaagtgaaagtctcaactccattagcctcacaggtttttgaaaaatatttattcatggctaaggattcaactcatgaagttggaaatttgaaagtgagcactcggaatggatagatcaatttaggacaaatatttgaataaacattgaaacgaatataggttatgaattgtttagataaactaccataaaaagtaccacaaatcagcttttcgggacttttgaaagaaaatagacaaccttttatatttattttaggagccaaaacaaataaaaaatgaaatactacaaactttcttttcttttcttttcttnnnnnntttctttttctttttttcttctttctttctttatttttctttgaacaaaaggcaacatgttggatataatgatagaaatattgctcttgtactatatatatatatatctatttttattctctttttttttttttcacataaagaaaataattaca

SEQ ID NO: 142783 - DNA, 546 bp, Cannabis sativa
  modified_base (482)..(486): a, c, t, g, unknown or other
agacttaaaaatggttatttgatttgggagattgagttgtatattttttttttggaagatgatgaatttttgattgctgttgtttatattggtgttggaaaagaaactaaaaaaagatgaattgtatattgctaatggagaagaaatgaaaaaaaaaaacagaaaaaaaaatgaaaaaatattaatgtttttaatttttatattattttttaatttaaattatgatttgaacgaataatattttaacacgtagcatttttaacatacacaaacgtatccgttaacttaggtagtaacggacaaacaaaaacgctgaccttagggactatcaccgccaatttttgaggttgaggatttatctgcatcaaactggactttttggggacttatgccgcaattatccctaaaaaatataccgtataaactcaatttcttttttgaaaatgtcgtatacactcaatttaaacatatatatatatatnnnnntggaacactttttaatgggtaataaccattgatggccactaaaaaaattaataaggtaac

SEQ ID NO: 142784 - DNA, 831 bp, Cannabis sativa
  modified_base (795)..(804): a, c, t, g, unknown or other
ttttttttatacattttattaaaatacaatgatagtttttttttttttaattgacactatgtacaacagtagatattaacttattgattatatattatcgattatattatataccccattttaaaatcataaaattttattatttttattattaatgtaattatttatttaacttttaaaaaataaattatcattttaactgtcactaacatataaagagaaggagagaaaaaaaaaagttgaaagtatgaagttgtaacaataaatttcatgaaaaaaaaaaataatgtagtagtacaaaaagataaatcaaattatcaaaactaagtaaaaaaatcgtaatacaaaaacatattgatcaattaggttattgttttattatttttcattgatttgtagtaccttttattgttttagaattaattattttcatgttgcttgttaagttattttagagtttttttaagttattttttttattttactgaaacacaatatttttgtaattttgaaattttaacacaatatttttaaaatcttagtacagtctaaatgtaaaaataagagtataacagtaaaaatgtaataataataataacaaaattggttatttttattagatctctttttttttttatgacatggcacacggtgcatatattgaaaagtataaaaaataaggataatttgttcaaaaaaaaaaataaggataattatatttacgtttaaagaagttttttttatatttttacagtttttcataaaaacaacacgaaaactacataaaagtaacannnnnnnnnnatctaaataatatcaaaacaacaacaa

SEQ ID NO: 142785 - DNA, 649 bp, Cannabis sativa
tggtaaaagttatgcatttgagttcaaaaaactcaaacttgaattggttgtataacttgatttctgttgcaaattaggttaaggtttcttcatgaaaaatattcattatgatgtgtataggtgctctgcaaaatttggtaaggtttggattagacttgaatgagttatgaatgttttaaaatcgggcactagagttttagatggccgaagtgggagtttcggaccgtccgatttaggcagaatttggggtccgtttttagaaaggactgtacattttgagacttgttctgggaccctaattgagtgttttcttaatacttagggtattgcgattctatctatcgatatggaaacttttagttgtgaatttaagtccctcaaagtgttagggcaacacttagaggtagtggttgaccgacacacctgaaatacgaattgaggtaagactagtataacacacatacatatatacatatttatgtttgctagatgtatgacatatcagttagaacgatagttggtgtatatatgattgcatcttattattttgaatatatgtgtttggcaattcaaaatgtatgaactaatgctaccaatactagtatgccagagtactgagtgcatgtggtaatatggttggttatacttc

SEQ ID NO: 142786 - DNA, 564 bp, Cannabis sativa
  modified_base (39)..(59): a, c, t, g, unknown or other
ttgctaaccatatcagatttttaaaatttgttatttttnnnnnnnnnnnnnnnnnnnnnaattataagattagaaaaatgttacttttgacattttagctttttagatatttattttaattaaattttatttttggcaaaataacatgaaattttgaaaagtttattaatttaggtttggatagaaatttagcgtttgctaaccgtaaaatttttcaaacttaggatattttgttttatttaattattaaataaaattgataatatcctaaccatcaagatatttattttataaattgtttatttttgttatatttaatttattaaattataagattagaatataatattagaaatatctaaaattttaaattaagatattatattatgttatcttattagatatttaattaatttaaattttaaataaactgaaaaatttgaaaatttgttagatatttgaattccatttagaattttaaatatttaggagaattgttagattttaaatatttcttttctaacaacctaaattttaaaattctagttaagatatattttaaat

SEQ ID NO: 142787 - DNA, 859 bp, Cannabis sativa
atgaggtgtcactaaagagtaactcccataatttatattatttttcttaaaaaaaatattggcttacagtgacgcgctaaatgcgattgggtaaacatgccacaacacacttggcatgtcactatatcatgtattaaaaaaatcttttaatttatccaaaaaatatggctaagtaccttcattaaaaaaaagaaaaaaatgtacaactatatatagtaaatattaataaataataataaataaattaataagtaataagaaaaaattaatgtattactattattaattttttttgaaagaaataataagtaaatattaatttttttttattatattaaatatagagtataaaaaaattatgacataaaaatttaaaattaatactatatatatatctccacttttaacatattcagccgctttctcactcctggtttttcaagatgcgtccaaaggccaaattttggcaatttctcttgtgcaaagacgcaggcgacctcaacacgtctgctcctcaggcgaacccgtgaagcaggcgacctcaacacgtctgctactcaggcgaacccgtcactcctcaaacgaacccgtctctcctcaggcaaacccgtgcgatcatagggccaaatggcctttgacaatctatcttttcaatgggtattttttttgtttctctctctataaatgtgaaaactatttgaatctatcctagatctaggtgtttgaatctcgtcgatggatcattggagttacgttcggagtttcgtggtccaggacaatttgttgtttgtggtgcactacggtttttggttcatggttgacggagaatgtaacgccctgtccaacagggacgccacgt

SEQ ID NO: 142788 - DNA, 682 bp, Cannabis sativa
aattgtgtgtatatttcatagaatagtacatatttatatacaaagctaggagactaaatgggaaactaccaataaaataggaaactactaaatatcgattaccctaattattttacaactaatatacaactaatattctaacagaaatgtaaggtttatttgagttagatttagctttttgcagcttgttttggtgtatgggattggatttatgcaagtttgaatttagaaacctaaactttcatccttaatgccatatttgaattcagtggctttttctgggattttctggttggattatgttgtatgtaaattgtttaggtactttggaaagtttggttgcatttggtagagttttgagtaagaaataagatttttggggaggactggtataaacaggtttaccggtttaccagtacctgtaaattcggtaaactggttttggcagggttccccaaatataccgttttctcaattctcgtccattttagtgccttagttgggtgtttccctatttcttgagttattgtaatccctaataaatataacagagcctagagttataggttcgggtttttcgaattagggttttgaacatgtgatttacccgatttcaatatgtgattagtgttggaatttattttgccaggatcttagatgtactcacaagtatgttgtttaa

SEQ ID NO: 142789 - DNA, 718 bp, Cannabis sativa
  modified_base (576)..(578): a, c, t, g, unknown or other
cacccaaccaccaccactgaaccttctttcctctaccaccgaacctcctcatctacccaaaaatccagacgaaacccagaggcccaagaccagtcggacctccatagcactcaagcattaaaaaacctagaggcccccgagcctctgtctccatcttcatcttcatcttcatcttcatcttcgtgcttatttgtttttttattggatttgtgtttgtttcagaccttagatagttgtggttatggtgttttctggccaaaacgtgattatcaataggttgtcgatgggttatcgatgatttatgtttatataacatagttttgtcaatttgatatttatcgataggttatcgataggttattgatagtttatcgatgacatttattgataggttatcgatagtatatcgatgacatttatcgataggttatcgataggttattgatgatttctgtttggacacaaaaaaagcagtgcacagacaaaactgtccataaactatcgataaatgtcattgataacctatttggtctcggtggtgcgaaaaagaggaagagagagtgaggaagagaaagnnncaaagagagaaggaaaatgaaagggagagtattttgggttgatattgaaaataatagtatttaattgtgtaaattaattaggagtttaaattttgttagaagatattttttttagggtgcgtttggaaagtcacaatgta

SEQ ID NO: 142790 - DNA, 1517 bp, Cannabis sativa
tggttgcactgcctatgctcacatcaggcaagacaagctgcaaccaagagcccttaaatgcttatttcttggctaccctgatggaatcaagggctacaaactttggtgtttggaggaaggatacaagaagtgtataataagcagagatgtcacctttagagaagatgaaatgccactgaaaactaccagagaaatccctataaacccagatgctgtccctaggagtgttcaagtggagcttgaacaaagaactgagtctctgaaccaaactcccacagatcagagaaaagaaactgagactgccagcaaccttgatgactaccaacttgccagggatagaactaggagagaaatcagggcacctgagaagtttggctatgctaatttttcagcatatgcactgtctgttacagatgaagttgacaacacagtgcccaaatcttatcaagaagcagtgaatggcaaagatggcaagaagtggctgcaggccattgatgaggaaaaacaatcactgattaagaacaagacatggagaatagttagaagaccacctggacagaggttaattagatgcaaaatggatctttagggtcaaagatggcatccctagatttgaacaggtcaggtacaaagccagattggtagcaaaaggattcactcagaaggagggtattgactacactgacatattctcacctgtagtaaagcaagcatccattagaatcataatggccaaggctgcagaacttgatcttgaggtggatcaaatggatgttaaaacagcctttctccatggcagtctagatgaagatatctacatgaccattcctgagggttttgaaagccatgaccctaaagaagtatgcctgctgcagaaatccttgtatggatttaaacaagctccaaggcaatggaacttgaggttcaatgaaacaatggagaaaccggggtatacaagaagcaactatgattactgtgtctacacaaatggacacctatacctgctattgtatgttgatgacatacttattgtgggccaagacagaacagaaattgacaatctaaaagcaaaactcaatgttgagtttgacatgaaagatctgggggaagccaagaagatactaggcattgatatacaaagacaaagaccaaatacaatcactctatctcagaaagaatatctggaaaaggtgattgagaagtatggaatgagtgattctaaacctgtacagacccctctagccccacatttcaaactgaccaaagaccaatctcccacaactgatgaagaaagagcattcatggacaacataccctatgctaatggggttggtagtctaatgtatgccatggtgtgtactaggcctaacttggcctactctctaagtgtagtcagcagctttattgctgatcctggacaagaacattggtcagctttgaaatggattctaaggtatgtcaagggctcacttgacataggacttacttttggaaataagtctaattcacaagaagaa

SEQ ID NO: 142791 - DNA, 686 bp, Cannabis sativa
atgcatgattctattaagtccgaaaagatagccatcatacaactttgatttgttccaggagcgttacatagtccaaatggcattcttctaaatgcaaaaattccataaggacatgtaaaagtagtcttctcttactcttcaggtgctatggctatttgatgatacccaaattcgccatataagaaatagtaatattcttgccccgtcaaccggtctagcatctgatcaatgaagggcaagggaaagtgatcttttcgggttgctttgttgagttttctgtaatcaatacaaatcctccaaccagtaactgttcttgtggggatcaattcgttcttctcatttttgattactgtcatcccccctttctttggtactactagcaccgggctaacccatttactatctgaaattgggtaggccactccagcatctaaccacttcaccacctcctttctgacaacttatttcataggtggattaagtcttcgttgtgcatcaattgttggtttagcgttttctgccatcaaaattcgatgcatcactgttgagggactgattcccttaacatctcccagtgtccatgcaatagccttattgtgcgactgaagtactctaagcaacctatcagtctccacatcagaaagtgaagttgacactatcactggaagcttcttatcttctcccaa

SEQ ID NO: 142792 - DNA, 687 bp, Cannabis sativa
  modified_base (26)..(28): a, c, t, g, unknown or other
  modified_base (55)..(57): a, c, t, g, unknown or other
tatattaataagtaaatctcattatnnnatctcattatattgaaatgagttttannnagggcataaaacccaacagaagtggccaaagttggtttactggctaaaggaatttttatcataagattccagaacatggagcagcgagataaggtgctgcagtagggatacgtattctttgacaggaaaccaatggtgatgaaaccttggaatccaatcgatgatttcaccaaggagaaggtgtcgaatgtaccaacttggattcaattgagaggactagatatcaaatattggggggaatcatctctgttcaaaatagtgagttaattgggagagccatttcaggtggataatgttaccaagaacagagataggatgcaatatcctcgaatattaattcaggttagtttggctcaggattttcctgaaaaaattgatttcatagatgagtttaatcatgaggtggaattggaagtgaaatatgaatggattcctctggtgtgttacaactgctctggtattggacatagcactaaagattgtaggaaaaaagaagaaaagcaggaacaaagcaagcaagcagggacggacgccgttgagttattgtagcccccactaatataaataatgtcttttaaaaatttaaattaattatttttaattttataattatagactaaaataataaaa

SEQ ID NO: 142793 - DNA, 613 bp, Cannabis sativa
tttcacttgtcattcctacttgctaagtgctaataatttctgaatatgattttgtgttaaacattacttgatttctatttattgttaattgtagtatccaacacgacgatgaacaaccccatggtgtcactgttgactgataacaagctcaatggagctaactttatcaaatgaagagcgaacattaacattgctctcattggtgaaaatgccctatttgtgttgactgaagaggctcttgagcagccaggtgagaatacaaccaaggcagttaaagaaaagtttgagcattggcagaatgctaacaacaaagctcgatactttatgatgtctagcatggtttacacattgaaaacaaggtttggaaacaccctcatggctgcagaaatcatgaaccagttaactgaactgttcgggatggtatcaattcaagctcgctttgaggcgaccaagaatttcatcaatgcacggatgaaacctcatcagagagtgcgtgatcaccttatccagatgaccagttacttccagaaagctgagaatcatggaactgttatagatcagacaactcaagtgagtttgatcttgaacagtttgactccagcttttctgccct

SEQ ID NO: 142794 - DNA, 2043 bp, Cannabis sativa
ttcaagaggtttatagaactttcgttgtccacgagtatactatggacgttgtctccgccaatattggcgacaatgaccagtgcgtcagaatgcgggtgatggacccatctcgcatcactgtccataaatgtgatgtcgttgcattctcttttaaataatttctctagccgctcactaagattatttacattggtgagcgacttctctttagcttccttggcatatcgctcttgtgacttccgagagtctcctgcgatatggggccctccaatgattgttaatatattgcgaggtattctcgaaccactcgcgttctggttttcttctttgtcatccgctcggggatgaccttcctcatttcttttatacttgttgaattttcccctccggatcagctcttcgatctcatcctgcaagacccaacattccagagtagtgtaaccaatatctttatggtacttatagaattttttggggtccctcttgtcgcggtttcctctgatcgggggcggcttcttgaagaccccgttcttttcctcaattgcgtagatgtggtctcgtggcaccgcgagttcggtataattcacgaagcgcggtccacccttccttttcggcgaggacaccttctttggaggagacttggccaacttcgggcttcgttgtctttgtgggctgcgtcttctcgggcttcgacctctggaatttttccctcgaggactgcgagatcgtgaccgcggcactgggacttacgcttgtccttgcctttctcaaattctgctagagaattctcaattctcatatgaggttcggccatggcaaagaactcaactagtgattctggtcttcgggcttgtaattccttccaaaaatcagttcttggccagacacctgttattagcatacaaacaagcgaagactcgggagccttctcgacttttgttacttcagcattaaaacgtttaaaatagtcttgcaaagactcacctggttcttgttgatgttagccagagtagtatagggtggcctataagtcatcgtggcctgaaaatgcgtgaggaataaggcgacaaaggtttcccatgtcgagattgaggcctcaggcaattggctgaaccaatcgtgggcgttttcctctagcgtcatcatcgccgcgagatgcgacatttcgcaagctgaggtacctgatccacttccattatagtattgaacgtttctaaataacctatgggattagaggtacctttatattttagggattcggataatcggaatcccttgggaagctgtgcttgtcgcacttctgcagtaaaaggagaggtcccatgtagcttgtatatgggctttctctgctgctcgagtattttcaaagcttgcaaaagcatgctttgatcaattcccccaactataagatctgggactgctgcgactgcaggagttgtgactattgcagcaaggtttgctgggacattaactccctgctggtgcgttaggcgggttcatgcgagtgtttacaccttgatcgcccatttggggatcatggggtgtttcctcgtcacgaggagcgcgggagcgtgctctgaaaatagcgttgagatgattgcgcagattgcccttatggactcggtatcgtcctccctactgtgtctccagagagccggacctcgtgtatctgctaggtgtgcgaccatgcgaggacaaggaggaagattctgcgtcgttgtttcttgaaggtcggctgtgaggattacgtcgctcagagtcttcatcaacctgtgtttcctgattgggatacctcagaaattggtctctcgaggttggctgatttaggtccaaacctttagggttggttcttcgttccctgcgaacacgattattacgacgcctagagtttgttacctgagggttatctgtgcgagtagtaggcgcttgaggggggtaacgggccctgttctgtccatccacctcggcttgcagcgcgcgtagttgatcctagatcgcggtatattggtcggtggtgagttggacgattccctcggatactac

SEQ ID NO: 142795 - DNA, 753 bp, Cannabis sativa
gtaaaataaattccaacaatctatgtaacctttatgaaatgtggaaaatccccacatttcatacatgtggataaaatgaaataaccattgataactatcttttgatattatctaaaagtagtcttttgttgccgaggtaacctattctaactatggctcacatctctcaatagtgttcaagaatagatggtcacattcttcgagacactagttaagatgtttgtccttgctatagcctttcgtagaaactcttggtagtcttttgaaattttaagattagttgtactttgcttatttctcttaatctttcaacatactcatgagtatgtgggtcaatgagttgcaagctcttaaagaactcattatctacccttttagcaatagagtttcgatctgttacaccagtgaagacgtctacctttatcatatcgccatacgtttcttttcttgctgtcttatttccaatgcataacgcgagctagatattgctctagattttaccttatgcaaagaaatttgaaatgtttgataaatttcatgtatttctagcaattttgaaaaaccattaaggtaagtggttaaagatcttgcaaactgataggggtggtgaaacattaagttgatgtgtggttcagacataattaagtagattttttgaattatatccagacttacctccccaaaaattcgatttgcatttagatgataatataaggtctataattagttactagttgtttcctaagtccttct

SEQ ID NO: 142796 - DNA, 623 bp, Cannabis sativa
tcgggacttgggatccgggactcgatgcttggacctgacccgtagtcagtgtttggatctgggaattagaacagaatcctaacccaaactcgaactcaaactaagacacggacatatacccagacccagacccacactcaggaaccaaaactgaaacttgaactggaaccggactgggatctttgaaagcgaccgggccttcgacccagatcagaaccgaaaaccgtacccaacctcataccctaaccgagaccgaaatacgaacctccacctccccccgaacccaaatcaagactcgaacccagactctgacccaaacttaacccgaactcgtaccctgtgacttgaaactgaaccgaaaccagaagcaggacccaaacccaaaccctgacaaaaattcgggacccgaaactagaaactgaaaaagaactgcaagaccaggacccggacccaaacctagaaccaaacttagacctagcccttgacccaaaccgagaccaaacctcgggcccgaacacattcatgtaccagaacgggaccgagacctggacccgaacccagaccaggacctaaacctgggacctgatcccaaacccagactcggacctagatagggatctgga

SEQ ID NO: 142797 - DNA, 728 bp, Cannabis sativa
ccatatgttgtacagcagtcctactgcagcagtagagaggactcctttcttaaactttgacggtttggacttcccaatccacttgaggagctcctggaggttgctggtttgagcatgccagtccagccaagtcttcaagtcctgtaaacactgtctagcaacactgcactcaaaaaataagtgttgacaagattccatctgcaattcacacaatctgcaagtcccctgtacctgaataccaaaccgcagcagcctatcttgggtcttcaatctattaagcattgccaaccaagctataacactatttttacgggtgtttagccttgaccatgtttccttgctccaatacagtcgggttaatgggggtgaaaacagtttataacctgctgagacattatacttctgcttctaaaaaatatcaggatccatcaaatttctaagttgatctttgagggctaccatcttcttccaataccaactagagtgtatggagggagagtagtcccaccaaacctggttcttaatactatggacccatctaagccataagctctcttgtttatttgaaatagcccatatgtacttacatattgcagccttgttccatgcttccaggttcttgattcctagtcctccagatgccttgggttgacaaatgctattccaagcaacagaccctgcaccctggaacatggcttgacctttccaaagaaaggctctacaaatag

SEQ ID NO: 142798 - DNA, 631 bp, Cannabis sativa
  modified_base (586)..(587): a, c, t, g, unknown or other
gaaggagctcaccagggtaagtctgttttgattttgatattgatactgatacttccctttaactttccacacttagcttcatatgttgaattctttcctttgtgcaggccgatttgaagttggcttacacttactcctgggctaaatctgttacttccaagagtgcggctctgtccgacaccttgagggtggaggcggacttggccaaaaaggaagctgaggaggccagggcataagctggagctgttcggctagagttgggcgaagccaacaagaagctgtttgctgccgcgaagaagatcttcgtactgacaaaggatcttgaagctgctgatcgctttgaggagaccatcaagatcttatctgctgaagttaacagtcttcaggatgagaggacttctttgtggcaagtgcttcttcggatgaaggaggagaaggacgccaaggtggccgaggcggacaggttgaaggaaaaggtcaatgctttagagacagctggtcttgagctcttctttgacttttggaatgctaatccctgggtcaactttgactacttgggcgaggctaaggacatgtaccttgagtnntgcgcggcccaagttgcttatggtgggaatgaggcagctgcttc

SEQ ID NO: 142799 - DNA, 710 bp, Cannabis sativa
gccgacggttctaaatcttcatgaatggtgcattatttttttaaaaaaaaattctccgcacttataaatcgtcacctaatttataggagtgttaaaaattgtcgcctatagtatattataggcgacggtttttaacactcatataatttttttagcgacggttccaaaaaaaaaagcgtttttgggaccatcgcgaattctgccaattgtagtagtgcataaagtttatgatccttgagtcgttgtaaagccatgtgaagatgttgctcatgttctgtttttgtctacgagcatacaaggatgtcatcaataaacacaattataaaattatcaaagaaatccttgaatactcgattcataagatccatgaaggctattggggcatttgttaatacaaatgacgtaaccaggaactcataatgatcatacttggttcagaacgctgtcttcggaatatcttcctcttgaattctcaattgatggtagcttgatcgcaaatcaatcttggagaaaactgtcttaccttgaagttgatcaaacaggtcatcaattctaggtaaaaaatacttgtttttaatggtcaacttgttcaactctcaatagtcgatatacatccaaagattcccatctttatttttcacaaacaaatctggacctccctagggcactgttgggttttatgccctaaataaaactctgtttcaatgtaa

SEQ ID NO: 142800 - DNA, 510 bp, Cannabis sativa
  modified_base (30)..(43): a, c, t, g, unknown or other
tagggtgttaatcaacatatttgtgagtannnnnnnnnnnnnngtaaaataaattccaacaaaaatcacttcttgttatattggaaggttagtatgcttatgttatattatttgtaatattaaaaaaaaagtttacttgaagattgatattagtagagtttgaatatcttatatattcatccatagtaaagtaggttctgtgaaaaatatactgcggtcggatgggtggcaaaaattattatgtatgtaaattgttttggtaaatttaggaatgatcaattgtaaagtgttatgatgttgaattttcggtagcataacattttcaatttgatgatagtttttatttaaaaaagaattagaacatcattaatatcatagatatgataataggtataatttaatatgcatgtaaattgttttagcattgtgtttgtgatttttgtgtaggtgttataaatttggaaatgctcaattgtaaagtgttatgctgtcgaattttcggtagcataa

SEQ ID NO: 142801 - DNA, 502 bp, Cannabis sativa
ggtcgggcagtggcatctactccatatttgtatcttattctctgaagataaggtctgattctgctgtctattttgtcgagtttttacatgtatccttcaaatgatttcgtgttgtatgtcttggcggctttgacaaagtttaatgtaagatcttccccgtgtattctaaaattgaccttaatattgtttagcaagtggaatatgcatgctccacggaatatgtttgggtagacaattgttactgctttctctatgcttttgtgctggtctgagatgattgtcatgcctgcgagtgtatgtctgttttaaccgatttttttgttactttttttttttgaaaccggttatttatgttaaataagtctaacaaacaataggaaaactattacaataaaaatgatgtattttctttatatttatgcttgaaccagtttcttaccttctctttctccgaatgtttctcttagcttgtggaagaaccactcccatgatgaatcattct

SEQ ID NO: 142802 - DNA, 1053 bp, Cannabis sativa
ctccttcaattgtccaggtgcacaggcaataatcctcttaaactgtatcaaaacataatctattccttatttagaggtgtcgcaataattcataatctttcctcacggactggcaatgttagcactggtgcaataggtaacttttatttcaattcttttaaattaattccactaaggacatagacatatctcaacaactatcccacaacatcctgttaattccagaaaacctctaacatcactatatatatttaagattagcaaaactcatgtttcttatattttgcataaaacttatgcttccaagaacgttgcaacaccatcaaaagatgcatctcatatactccttcaagtcgaagaaatcaaaatatcattaataaagacagctacaaaatcattgaatataaaaagctattttaggaatatccttccttcgaaccttcaactgataataaccagatcgaagaccgatcttagagaagatggtcctttcttaaaattaaccaatcataacatctatccttgacaaaggatacttgttcttcaccgttaattggtttaatctcccagcagtcactactcactcatatggtttcatccctcttcctcataaataaaacccactcaaactagatatttcaaacctaatatttcctgtaacggaatattcacccctttcaatcttacagttaccatccaatttagaaccttggattcaggtttcactcctagtatcaattcaattcaaaattaatttcccatttcaccaataatcttggtagctcttctgataaggcatctagaagtccttgagccacaaaattgtgttccagttccaccgatgtttcctttgcaacattttccacactaactgaagagttggtacatccatcccataatgaaccttcagcctaaagcgtcatgatcaatggattttgggacctttgatccttgccaaagaacacgaaggtcctcactttttttttttgattcaaaagttaccatctttccttcctaatcaatatttgcaatacactttacaagtcaatccaa

SEQ ID NO: 142803 - DNA, 832 bp, Cannabis sativa
  modified_base (40)..(45): a, c, t, g, unknown or other
  modified_base (610)..(612): a, c, t, g, unknown or other
taaataatttcataatttaaacataaacaactgctaattnnnnnnttaactaagcgggctttacagttgcacttgattacgtttgatttcccatattcacttttgaggcgggaagtcgaggcgtctaaggttcctttgtatgcagttatcctttttgcctataaatactcagagtgctggcacattactcattttatcaccgttctttgttaagttaactccagagcaaaaagagagagttttctggcttcaaagttgtcgaagtgcctacagacaattactcgcttgcttgaactcggacattcgaatctttgagtaagtttctgatttcctttatgcttttcgttgcatgtttacgcttcgaatgtagctatgttgtagaaataattcttaggaaaccctagggttagaaacttctgcgactcttcttttccaagtccttatgtttgcttttagctgtaaagcttatttttgaactgcattgtgtctgtcttccatcttgcttattctaagtttcatgaaatttttcgccctaactcaagaaaactttttgacttcttgagttttgacttttcttcgaacatggtcgttctttaatctgttgagtacnnntggtcggcatatttgctgtttttcgtttgatactccgtccaacactcatattgtgtgttgtcttttgtagatgaacccaggtgagtcttgagagctggagcatcagatcgaccaggattagcttcaacttctacacgaggttcaccctcgtcttcgtgttagtcctccttctagtgaaggaaattcttctgacccggtacccagccgtaggatgatggct

SEQ ID NO: 142804 - DNA, 960 bp, Cannabis sativa
cattagaccttcgtgggaaggcctatcctgcttcggttctctgattgaaccgccttatcaattcgaaggcttctatgttacggcgatctagctccgcttagtgaaatcgaagcaggtaatctttgtcatccatccatctcaaaaatttgcatctctgctaagcgaatacatcgcaatcaatagcgcgtggttcttcagttaattcgacttggcagacggcctctctaagtctggctaactcgagatcttctcccatgtctacatggggctcgccaatatcaggcacaccaattctaggtcccgtctctctagcatagtattggggatgcggtccagtttttgttcctcaggaatgtttccgaagggtccttccttcagtgagaagcacctatggatggtcctttcttggaggcaaggaccaattgtttagatctaccgggatgtttgtgtcatcctagcccattgtagtggctagagtcgtggtgcttgtcgagttggcaggattgaccacatctgcagtgttcatgggaattccagtcttggatggaacatggacatcaagatctccagtcaaaggatcttgaggaagactcgatgatgcagatggtgcaactagatttctccttatgttaaccatggtgttttagatatgatatcaactcgctcttagtgaaagcaccaaactattgaccttagaaattggccaaccgatagtggagtcgtattaacattgacgattaccacatgttacacaattagaactagaaagtaaaagaacacaaggatttttatagaggtttggtttccttagttagcgggtaatgacctactccatttttaattgtattaatacctggagataatactattcatatcactataagtgggatttgatatagctctcttaaggttacaatgtatgaatcagtaggcaggtctctaatgagagagagagagaga

SEQ ID NO: 142805 - DNA, 519 bp, Cannabis sativa
atttatctgctactcggcataaaacttaggtatttttgccgcaaattactcaataatgaaattagaaacttgaagctgactcgcaagaccaatccccttcaaaataggcagacttttcacaatctcaataggtgaaaccacatttcaggactgggcagataagacaagaatcataccattatagtccttggcccccaccccaacaccacaatgagtaaggccactctgaactgaagcatcacagttaaacaacacaaatctataaggaggaggaagccacttacacagagcactctctggagctgtagaccccgcttgtgcattggtgtgaagcatagaaaaagctcaactcaacagctcaatatcgttggggcagtatgttgggattttatgccctaaataaaatcaatttcattgtaatcttatttactttcaatatagatcagaaatcataacctggccttgtcatatgctttgttcacatgttttatacatgattatttgtttaatatatatgtt

SEQ ID NO: 142806 - DNA, 1367 bp, Cannabis sativa
tacaaagtgataaaatcattaaaagtatattcaagtttgcttaagacagattataactatcattgtgagatagaatcgataactgctcgtaaatcaaaagtctggtagataataaactgctcgcacacatagtagattactaattacttaaataggaaagttacgagcaatggaaagaccaaaagtactctgcatttgatcaaaatatagttgattacattgtgaatgaaaacgcaagtaaacacaaatatattaagttcgaatgaaaaagtacaaggcatttaagataagaaaaaaaccaagttggtttacaaacttgtctttacaaaaatgccactaggggcaaaccattaagccattttcctaaacaaagaatacaaggttatttataagggacaggagagctcgagaatgactgtctacacacaaaaggactgacccctgcatagacctcattctctgctgtaggaaatgggatcttctaatgcgaggaatgaaggtcttctgctgcagagaatgatgcttactttcaaaaataccttgtaagaatcgcccgtaacgatcaacaatatctccttggtttggattaatcggatgatttttagttttggaatcttttgtttcctttaaactgaggtttgaagtttcgaggaacatatggagaagaaaagcagttggtgtattatgatgttacaagtgtttttagggataagtttctaagctttgatgggacatctccacaggagaatgacaatccaacttctggataaaatttaccaaaaaccaagagtttatggaatatgggtagcctgggctatcattttatacatagaacccagtaacggtattaaggtaaggccaaaggttgggaaatctaacggttgggagtggagtagaagatgaaagggaagttcactaatgcataatgaccctcaaaactgtgaagccgttaagtcgaagggcatgcgtggtcttgaagaaagaaattatgacaaatataccctttgtaatccttaaaaagcactttttattaaaaagaactttttaaggggcaattgttaccttaaatttagctaccatttcaatggaaaacacatgtcaaaattgggaagaatatggatcaatgcgtgtaacggtaattacatttaatggaataaatcattaaatgcggaagtcacaaagtatatttacaacttgctgactataaggtttataataccaaacttgttgtgagaaaccatacgacattagatgcacaaagcgagacatcaacctcgttacacctaggtagaaaacacttggcgtgtaatatacagtatacaaactaagtataacagtcgggtgaacccaagcaactaatagtgagg

SEQ ID NO: 142807 - DNA, 532 bp, Cannabis sativa
ctccaaagattgtaactccagagacgctcaagttagtgggattgtaccctcttgagcataacacaattgtcgcaagcacaatcgatggacctgatgctcctgctattcccatttacagggggaatccttctcatgggaactttactacagctgactcttccatccacatatctttaccacccgctacttcgaggagggacactggagtgattgttggtgttgatagcaatcccgaggatactacaatgctcaatgattatagctctgaaggttcctttctctcctttctttttttttttaatatatacttattcagtttttttttgacatacccatatgataacattatgatgttgtgtgtattgtgatattaataatttttttttttttttacagattcagatatgttccaccaactaattgcgagttatggtgagagtgaggatgttaatgagtctggaggagaggaaagtgctccagaccttcctctagtccctcgagcctgctcccaactgaggaagccttgtcctgc

SEQ ID NO: 142808 - DNA, 880 bp, Cannabis sativa
tctgtcatttatatattcaataacggagttagattaaaatgagaaaattacattatatacccactttactttacttattttaatttttatttttgtttctatattatttaaaatatactcacttttacagatgatacctccattataccccttaggctaatgtaaataatataactaaaatttgacataaagtatgattaattagttgaattatctaatttaaatttaaattaagattttatgtaaaagaaataattatataattttgttgatatttttaaattgaatttaaatatttaaaattatttgaaaaaaaaaataattaattgattgatctaacggtgttagttttaatcgttaattttaacaaaaaaaaattgttaaaccaacaatttttcgttaaataactacatttaatataaaatttatatatatatagatggatattaaacttcagtttcacaacattaattctaaagccaattacattgtttattattagagagactttagacatcagtagagtttagcattattaatattataagatagtatcttacgaatagttagtaatataaaggtcattttatattaaattatgtagaacttatacttaattacttagttaacatatcttttagagatgtgagtcattatcactattaatataattaaatatagattttacttattttacttaaataataattatatatagggtaaatggcggtaaaaccccccaaaactttcattttggtttcacttaactcctaaaactcaattttagacggtaaaactcccaatactcgtattctgttagcaatttaacatttccatccattttaggtgttaagtatcatgttggactggacacagtgta

SEQ ID NO: 142809 - DNA, 1057 bp, Cannabis sativa
ttttccttttagtttttctcattagtcttgtcttttgacatagttttttagtcttttccttttagttttttctggttcgagtcttgtcttttggcatgggtttgtagctcagcatcaccgtgctatggtagaagcattcaagaaggagaagattaaatgtgtttaacccgaaattgctgagataataggcattaaagaagcattgagttggattgcaactcatccgttggatagagtcatgttggaaacagatagcttggtgtgtgtccaagcgattcagagcggtatttttatgccttcaaagtttgatcttattgttcaagatgttagaaatttacttgtggctttattttttgttgatttgtgttttgtaaaaatgatctgcaaataagttaccttaatttagaaattatatccatttaatgaatgtggggaatacaattagtaaactaataaatttttgttaaggtacactgtaaaagcactctaaaagattttatacacataatggtaagttaatttggcataataaaaaaaatattgctataagacactaatggtatctataacatcatttatataagtgactttttgtgattggttaataatattttataaaaactattagttttattaaattatataggattcgatattaattagagttttttttttatttatttaattaccatttcatttgcactctttaagctcaaatttagtagtaaaactatccaaattatttaactgttagcaaatttgagatgctatttattttaaccgttaattgtcaatatagacaatttatgtgtacactcttgtacgcgtgacacatttatattagtatacttaatattattatttaaaaattatataaaaattagtctaaaattagtctaatagtatttttttattttttaaatattttattttttaattttataatttttttaatttaaaaattaattttaaaataattttgaaataataatattaagtgtatgaatataaatacaggtgattctacaatgcacccccttaaaagagatgtactgat

SEQ ID NO: 142810 - DNA, 707 bp, Cannabis sativa
  modified_base (538)..(546): a, c, t, g, unknown or other
atatatatatatattccatctaacaagctggcttaccacaatcattaaatatataaatatataattatatttatagagtaagattatggtaggaattagtataaattttgtactaatttgaagtttttttaccattaattttaaatcatgtaattacatgtatactcttacaataagactactggtatatatacatattataattatattttatttttaaaataaaatgatattaataattaaaaaaatatataaatttttaatttgaattactaatattttttaagttaatttgaattatttttatataagtatttattttcaaaaaaaaaaaaattacttacaaattttgttattaattttttatactaataattaattataaaaaaattaattacttaatactaaaaaaaataactacctttagtgacaatattttagtcacaacataaattttttgtaattaaatgtgacttttagttacaataaaaggttacttgtgattaaaacataacatttagatacaagttgtcactannnnnnnnntagtcacaacaagtattgtgattaaaaatacatttagtcacaaacaaattgtaatttttgtgaataatacgtttagctatagaccttttggccacgacataagaatgataatttatcattagttacaacttttgttgtgactaaagtaaaattttttgtag

SEQ ID NO: 142811 - DNA, 566 bp, Cannabis sativa
atggaaacaggggacaaaaatcttaattagcattttctaaatctaattacaaattggattagatcagatgagaaaaaaatattagattagatcagatacccaaccttaagtctcactccatgtgagaaaaaaagattctcaattcataaccatattatgatttcacaaaataaaaaatgataaaaaaatcgctactttgaaaagagaaagagagaaatgataaaaattattgctttgaagtagtgctgcaaatttgtgtgtgtcgtgttggtccgaagttgataaattaggtaggttaattaaggcaaatttagcaataactaaggctttaaaatataataggcctcataccttttaatgtaaatttaaaaggtttctttgaaaataaaaatttattaggtatggaaaatagtatcattttattaattgagttataaattaattgttcacattgaattaatagtataaaaagaatttaagaaataattaaaaaggtaaaacgataattttgatcaactctaattatgaactaataattggaagacgaactacttatattgattata

SEQ ID NO: 142812 - DNA, 648 bp, Cannabis sativa
ggagatgatgttttgaatttggtgattgaggcaagtgtggatcactctcttgttatggctcttgtgactgtatatggtttaatgcagagaaagatgtaaataacgactactgcaatacaatttttcattagattttctttttcttttttcttttttgggggtgggaatttgaacaattttgtccccagattatatattgatgtgtatgttcaaaatctaaaggtaaagggaatttgtgtaaattgccacaatgtttgacagttaagttattattagattatactactttcatgtatgtgaccaacaaattaaatttaaacaagttagaaaccattattttccactagttttgttcctcactcaatcttccaattttagcaatttatgtgtcatttttaaactgacggtataacttttttgtgacggtttagaaatgctacaaattattttgcgtcattttcaaaccgacgctaaagataaaataaaagtgtgtatattttacgtcggtttttaaataaagataattattttttgcgtccttttaaaagtgacgctaataaaaaactatttgcgactacggcatacacgtcggttttataaaccgacgtaaattctttaaatgacatttaaaaactgacgagaattgta

SEQ ID NO: 142813 - DNA, 1383 bp, Cannabis sativa
  modified_base (1175)..(1176): a, c, t, g, unknown or other
tatagacccatttacagcctattaccttctgtccttcaggttttataatcactatccaagttttgtttttccttagtgataccatctcttcagacattgccttattccatttcttagcatctttccctaatatagcttctttataggtttttggaactggttctgttggttcagtgacaacagccaatgcatatgcaataatgtcagcctttgcaaatctaacagggggcttgatttctcttctggttctgtcccttgcaagttggtattcttccaggctttcatcttgattttcactttctgttgcaggagctatctcaatttctatttgattttgcacaggttccacctcaattggcacactggtttttgatttgatttcatttcctgcagcatcagaaaaactacctttctcatttcttttaaaagttaaatcaagttcattgaaaataacatccatacttataattactttattatcttcagttgataataacctatatcctttaataccatttggatatcctaagaaaacacatttgactgatctctttcctaatttatcttcaactctatgtgcataagctgcacaaccaaaaatttttaaatgagttagggaaggaggcttacctttccatagttcttcaggagtcttggcatcaagctttctatttggacttctattaatgagataacaagcagtgtgtaatgcctctccccagtatttcttgctcattccagcctctagtaacaggcatctaaccttgtttagcaaggttctgttcattctttcagcaatgccgttttgctgaggagtctttatcacagttctatgcctttctattccatacttcaaacaaagctcattaaattcaacattaataaattcaagaccattgtcagttctcagcacgttaatctttgaattagtttgagtttctacaagtgttttccaatttttaaaggcttccaagcaatcatttttttgtttcaagagaaaaatccaaacctttctgctgtagtcatcaacattagacatgtagtattgattacctcctattgttttgaccctgcttgctccccaaagatctgagtgtatgtattcaagcacacttttggctctgtaattgctattcgaaaacttgattctgtgttgctttccctgcacacaaatnncacaaaatggtaagtttgcatgtgtgtagttttttattaaaccttgttttgatcattctaccagtccctattcaccaatgtgtcccattcgagcatgccaaagttgagttttagacacatgtttgtttacaattgtagcataggcaggcatgactgtttggacattcaagaaatacaatccatgccttttggtgccttttaatatca

SEQ ID NO: 142814 - DNA, 700 bp, Cannabis sativa
  modified_base (202)..(213): a, c, t, g, unknown or other
gccgtgagagcgagcagatggagactgcacatgtcggggcggttaggcctggagcgtacgaatatctttgggacatttgggcttttgttgtatagtcactaggcgacaaacttttgtatatgtatagttaaacttttgtaaatatttttgtaaacgggatcccggaattttatatgtaggttattttatgtttttaattaannnnnnnnnnnnttaattaatcacgattttcaataacctcgttgattagcaaacgagctacactgtaagttaagaatcacgctaacatgcctaaaattgttagggtgttacaatttggtatcagagctgtcaggttgtcttccgaagattgtcacgacatgtacaatcatcatcagtgatcagctcgttccacggttcagtaagctttattgctttagtagtttatttggatagtatgatttaagaaaaacctgttaggaagcatgatagtagcttgatagctgaatagatgtatgtttttaatttccaaataagcagtaattagtaaatatacttgatcacaatctgaccagattagctcttggttacgcaggctattctaatagtatggacaccaggcgaaacaccaggagctagtgtaactcggtcggattcagtggtggtcaaggagttcagattcctccaaatgttcgtggccgaggtagaggtcctagaggca

SEQ ID NO: 142815 - DNA, 548 bp, Cannabis sativa
ccagttatatttcaattatacccggttctatttttatttatatttgagacatctacttctggtggcttttttagtaactttttccggtgacggtgactttttcggcaaaacttattattttttacaaatatgggatttctatctttttttacaaaaatatggcataaaaaaactcatataaatgtaaaaaaaaaaataaaaaaaaaaacccataatcccttaactttatttatttatgccataaaaaaataaactcttaaaattttcccatatatagtgtaatttttacatagaataactactcaaggtaaatttggtataattttaaatctttgaattagttatactaggttaatcttacgcgcaatgcaagtatgcttagttatatttttcatttttattttgattatgtttatttttagttgtataattagatttttttatgttattcaataaataatatttttttttattaaaaatgcttaatttaagtgatttataaaaaattaaggtttttattttttatttttacactatttttttttttt

SEQ ID NO: 142816 - DNA, 629 bp, Cannabis sativa
ttattattattatttaaaattattatatattttaataataataataaaagaattgaatgcatcatgcattcttgactaacagaaccaccagaatcgactttcaaatcatatataatatatatacaattcagagtcattaacgctacaatcttcaaacaacacattatttatttatttatctcatatgtcgaacataaccaataagcaatatatcaaagtttccatcgcacatcatatatatataaataaagtatgggagcaacttttatatgtataaatatacttatggttgttcatcgcagaaatatattactacaaatctaaaaattcaatcgcatgcaatatatatacaaacgattgaacaaatttgcagcggtgggacgtatatatatagcatgattaactaaatactccaaatgcaaaaacaataatttaatagaagatcaatactaccataaattctcaagaattaatttaaggatgctcttgataccacatgttagaaatacggttatggagaacccatcgggtatccattaaggcaaaatgaaaaaaaaattaaattaaaccaatattctcacaaatatttattatgcattcataatctatagaagataaaagacaaatct

SEQ ID NO: 142817 - DNA, 658 bp, Cannabis sativa
tgagctttttcacagaggctcttaatgaaagcaccaaattgttgacgcagattttcattaaccaaatttaagcctcacaatgataactcaacacagaaataataaaatttataacaaaaaaatatgaataccgggttttttacgtggttttgtagttaaaattcaacaaagtccacgagtcaatcttattcagatttctgagtattttttttagggcctcttgcataagagttttttcgtcccttttttgagattgtttgccattatttatggttgcatagtggcagttattaattacaaagctgaccaaaatatgattacagtcattttccataaaattgcgggatctgattacataatacaaaatgtaaatgcggtgtatgattttgaaaattatacagctgtgattttcacgctttactaggtcaagaatatcgtgtattgaccacgtctttaattattgaatctagagatgtctcaacggaaacttgattgtagttatcctaatggcgagctggaaccattcttctttccgacgtcgagaagatttgtcttacgtcgatcgcgggtatacagaaatcttctgtcttgctagggttatgagttttgcttccattagttggatgaaactataggtagtttgttgggttttgtgccc

SEQ ID NO: 142818 - DNA, 591 bp, Cannabis sativa
  modified_base (35)..(51): a, c, t, g, unknown or other
  modified_base (231)..(233): a, c, t, g, unknown or other
  modified_base (305)..(307): a, c, t, g, unknown or other
gtacataaacaatcactgaaacagtaaaattaaannnnnnnnnnnnnnnnnccttaaatttaacaatctcaatcgtccagggagaatttctaacagccagaaaagttcaaggggcacgatttagtacatgtcaaagtttgggggaaaaattactaattagcctaaaaaaaaataccacttttagtgacaactttttaatcacaataatttttttttgtgattaaatgtgannnttagtcacaacaaaaaagttacttgtgactaaacatattatttagacacaaattgtcactaatttaattttnnncacaacaagtattgtgactaaaagaaaatttagtcacaacaaattgtaattttaatgactgatacttttactcacaatgtaagaatgataatttataattattcacaattttttcacttttaatcacaaaatttgttgtggctaaaaataagatttttttgtaatgaataagaatctagttctaaaaaaagaagaagaagatttttcctagttctttgtcacactttgtaattaactaattaataatatatatttggaaaattttacattacgtgtctttaaga

SEQ ID NO: 142819 - DNA, 844 bp, Cannabis sativa
aaaaaaaaaaaaaaaacctctctcactttaaattttggatacgtcactggctattgttgtaattaagtatcggattttatataatttaagaaaataagcatttctattaggcattagtagtgtctgttaccttctataggtgacgtcccacgattacttaacgatatttcctaaaagttattttcttaagttatatggactcgatacttaattacactaataatactaatattagtatgacaccgaggagggtgctagacaccaatagtgcattttagcaattctctaaaaatataatttttaaaaaatatcactaactaattttaaagtaccacctataaaagatgttagacactactagtacctaataacagtacgtataagtgtcggatttcataaaacttaagaaaataaatattgctattagacattagtagtgctcggtaccttctataagtgacgtcccacgattggttaacgatatttcttaaaagttattttcttaagttatatagattcgatacttaattacactaatagtactaatagtagtatgatgacaccgagaagggtactagacaccaataatgtattttagcaattctctaaaaatataatttttaaaaaatatcactttaaaatatcacctataaaaaatgttagatactagtatgtaataagaatacacttcttttctgttttaatcacttttttctattagtttttttatatatgatcactgattctgtgactatatttatatttagagtaatttgcggcaaaactccctcaactatcaatttacttgcaaaaaaccatctaacctcatattttggtgggaaaa

SEQ ID NO: 142820 - DNA, 1148 bp, Cannabis sativa
gagctccctttcacatatttgggagttccaatttgtgctaataagatatccaggaaagaaagtgagattctggttgagaaaatgacatcaagaatcagaacctggagttcaaggaacctctcttttgctgggcgaacaacccttattaattaagttttggttaccatacaggcttactggagtcaaatcataatcatgcccaaaagaatcatgaattcgaagctatctgtagagctttcttatggaaaggacaagcgatgttttctggtgcaggtgctgtggcctgggacaatgtatgtcaacctaaatctattgggggattaggcatcacaaagcttgaaacttggaacaaggctgccatgtccaaatacatttgggcaatctcgaacaaccaagagagcttatggctaaggtgggtgaatagtgtatacatcaaaggacaaagctggtggagttacaatgcctctattcactccagttggtattggaagaggcttgttgctctcaaaaaccagatccttttgaatgttagtgctgatttccagggaaataaatatgctatcaacgcaggatacaaactgttcagcaccccaaaaccgaaaactcattggagaaaagaggtatggtcaagattgaatacacctaagcactgtatgattctttggcttgtgatgctgaacaagctgaagaccaaagaccggttgatcaaaataggtatcaaggtgcaagagaaatgcaatttaagtggtgactgcaatgagaacatacaacatctattctttgaatgcaggaaaaccaaccaatgcttggtagagatcaagtcttggctgggttggaaagctatcaccttcaatgtacagcagcttgtcaaatggattgggagggcaaaaatctcaaaattcaggaaagccatatacagtgttgcggttgctgccatggtgtacactgcttggaaactgaggaatgctgtcctatggcagggtgcacaagtagacaccaatcgaatgattgaagaggttaaatggagtctaaggacttgggtacagaatttccttccaaagaaactctcaagtgtagataaagagtggttttttgctctatagttaacatagaattcatttgtaagcaaatgtgaattgaaaaaaaaa

SEQ ID NO: 142821 - DNA, 1477 bp, Cannabis sativa
tggctgactgtcattgaaagaatattgaattttatgggagtggttggaaatgacagggtggcatgtgccacatttcaatttcaggaagatgctttggtatggtggaagatggtatccctcaccaaggatgttgctagaatgacctgggaggaattccgggatttatttatgctaaatactacaatgaggcggtccgaagtgcaaagcagaaagaattcgttgagttggtacaaggcgagggtatgtcagtgactgaatacacaaccaagtttgatcgcttggctaagttagcctctgggatcgtaccaacagattttagtaagaataagtatttggcagggctgaatgccaagattaagcatgatttggttatcacaacaaatgataccataacctatgaagaaatggttgataaggctctttgagctgaaggaacagtaaaatacttgcatgaaactcgagagactcctagtgccggtgggaccactactctccctatttctggccctggaaaagagtgtggtgattccactcttgagcaaaagaagagaactttcacatcttcgagaagtttagggcaaggtaaaaggtttcgaggaaaccaaaataaaggggggcgtcagacttactcctatcctgagtgcccgcgctgcaagaaacatcatcccaggacttgtaaccggagagcttgtttccagtgtggatcaatgggacaccttaagaaagactgtccccagctgaagaaagaggaaccaaagcctgaaactaaacctgcccctgctcgtgtatttgctatcactcaggctgatgctgctgccagcccttctgtggttacaggtcagctacttattaatggttttttctttactgttttatttgattcgagtgctacacgatcatatgtatcgtcaagagttcttaatcaacttggtaggcctagtgatgtttttgagatgggatttggaaccctgttgcctaatggggaactaattatttcaagaaagtgggttagatcggtgctaattagaattgaagacagggaatttagtgtagatcttgtggagttaccattggccgagtttgatattatactcggaatggactttttgtccaaatactcaactagtattgattgtaaacggaaaatggtaacttttcaactggagaatgaggaaccatttgtctttgttggttcggttcaaggttctcgtgttccaagaatctcagtgttaaaagctagggatttgttatgcagtggatgtgtaggattcctggcagttgtagtggattccagtaaacctgtgttacttggacctgaagaggttaaaatggttaaggaattcctagacgtgtttctaaaggaattacctgggttaccacctcagcgggagataaattttatcattgatctaattcctggcacagaacctgtttcaaaagcaccctaccgaatggcacctgctgaattaaaagaact

SEQ ID NO: 142822 - DNA, 859 bp, Cannabis sativa
  modified_base (456)..(460): a, c, t, g, unknown or other
ttttaatgtatgtgataggttcaattgttaatgcgtttgttatgtataatggtgtttgggagcttgagggtagagattgggtttataacccgggtcgaaaatttgacatttgatattgatccgaacgtaagatactcagttttggttgatcttttgtatgaagaattggatgttgacaaagttcagtatgactcgaaattagaagtaaattacaagtacatgaaaggcttaatgtatcgccctaaagttattggaaatgataagcgtgcaaggttctttttgtctacacttgcgaagaagccagatgaatttactctcttgtttgtcactttgttaaagaagaatatttgtgtcgatcctagtccacaccaagttctgttaaggacactcgtagcgaggttaggagttttgttccagaattaaatctagaggtgttggttgtggatgtattacctnnnnnaaacactatgatgccgagtgctgatattgtagcataaatgcccttcattgatggtttttttgatggtccagaccttgaatattatgttgagggcaacgatgacgtaagagacgaccaaggtacagaggtcactactactgtagctttgagcttgactccattatcgtactaaataccacccaggtcatcgacacgaaaaagaatgccccgtagagaaaatcaccaaacacctggtactagtagtagtcatccaggcaaaaccagtaatgctagaggaacccttgacaatacaggtcctaataatgctagatagaccaatgatgctagtggtccttgtgatgctagagggaccaatgagactggatttagcgatctattttcttcttcgacaagttacgg

SEQ ID NO: 142823 - DNA, 677 bp, Cannabis sativa
gaataatcttgagcagaagggacatgatgaacaactgagagagacttactggatgcggaggtgctggcaccagaagccccggtgttgggaaccgggaatggcagcttaggccgggaaggcgcctgctctttactagcttttacccgcagagccctcccggcaacagcttgagccttaatataagctagcttttgctccctcctgaagagttacttctggtaccggtcttctgcggaggcgataatgtctacccagagtgctttttcggagtccgaactgcagatgttggggcaaagaaccttggataagttgaaatcatccaccgattagctctctgtgatgagcttagccctcctgcagtttgcagttgcgactaagtcccccacattcagcccgtccttatcgtatgtgaagaagaacttggcatgttgaaggaaaagttgggtaggggcagtgcggtgcatcggaggaaccctgacccactccgtgagtagttctgggcgttccacaacttggaaactggaagaaaggaaaaaccggagacgatactcttttacattcttttaaaaattaaaaggaacggaccctcgttagcaggatgggcccagagtgtgaaaaaaccgtctttaagtctatcccccttcttggagacagacacgagttcataaaaatataaa

SEQ ID NO: 142824 - DNA, 874 bp, Cannabis sativa
ccaaaggcatttctgtttcacagcggccatttacactccaactcttacaagaaaccggttatatgggagcaaaaccctcttccactccaatggaagtcaacctaaaactcagtaaggacaaaggtaatcctttacctgaccctacttcttaccgcagtctaattggcaaactaatttacttgactataacacgacccgacatttcatatgtcgtgaatcatttaagtcaatttttatcttgtcctcgcattccacatcttcatgctgctcataaagtgttgcaatacctcaaagccacacctggacaaggtctttttttcccatcaaatacttcccccaccataacagcttttgccgagaccagtttatcaccttccaatgttcaaatctcttttttctctgatgctgactggggaagttgccaagatactcgaagatccatttctggttattgcctattccttggcaagtctttagtctcatggaaatccaagaaacaacaaaccgtgtcccgttcatctgctgaagcagaatatagggccatggcccatgctactgccgagcttacctggattattgcccttctcaaagactttggtatcactcactctccaccagcaacactctattgtgacaatacagctgcaattcacattagtgagaaccccgtctaccacgaacgcaccaaacatgtcgaaattgactgtcattttgttcgagagaaggtccagcaaggctccatcaaacttcttcatgtttcttcccaaaacaacttggctgacatcttcaccaaagccctccaaccaagccatttttcaaggattgtatccaagatgggattaatcaacatttatactccatcttgaggggggct

SEQ ID NO: 142825 - DNA, 997 bp, Cannabis sativa
acctagacctagaactgtaactggacctagaaccgtaacgagactaggactcggactccaacccagacctaacccgaactgggacccagacccaaatcccaaccaagacttggacacggtaccccaacctagacccgaacatagacccaaaaatggaaaaagacttgggatagagaactgcggccagtacctagaaccgcaccataccctcagtcccgaacaaaaactcggacctgggactcgggacctgaaccagaactagatcgagacacgtgataacgatccagatttgggactcaggccaggacccgaacccagactaggaccccaacctggaccctgacccacacatgggacccaaaattagaaattgaagaagaatcacaacaccatgaccctcgaacaaaactaagaccgtgactaggaccctcgaacaatcgggatggccccttatgaacttttacatggaagaaagtgtagatcatttattcactgggatgaagtaggtcaaataaagttcctagtccctaaggctgttcagagaacaagtgaggcagttgataaaattagagcgcgaatgctcgcggctgaaagcagaaagaagagttatgttgatccaaagtgacaagagattgattttcagattagagatatggtatttctccgggtatcgcctatgaaaggcattaaacgctttggtaagaaagggaagcttagccaaaggtccattggaccttttgcaatccttgagaggatagggcaagtagcgtacagattgggtaagcccccagcgctggcagctgtacatgatgtgttccatgttttgatgcttcagaattatgtcttcgattcatcccatatctttagttatgaagctttggaactatagtcaaatttatcatatgaggaacaaccggtgcaagtacttgatagaagagagaaagtcttgagaaacaagaaaattacactggtgaaggtattatggaaaaacagtaaa

SEQ ID NO: 142826 - DNA, 1080 bp, Cannabis sativa
gttattttagatccaaacaatccccctaaatgtgtgtttattggaaagaatttggatgaaaaactaaaatctaaaatagcaggtaattaataattaactttttgaaggcaaaccaggatcaattttcctagagccattcagacatgataggaattgaccctaaagtgatctgtcatcatttgaatatcgactccaattacccagtaaaaagaaaaaaaaggtgacccttagactttgagagacaaggggcacttaaagaagaggttgataaattattgaccaatgacttcatatgcgaggccttttatcccttgtgaatttcaaatccagttcttgtcctgaagccaaacaacacctagagaacttgtatcgattttttagacttgaataaagcatgtccaaaggattgttttccactaccaaggattgaccagttagtggatgcaactgcaggacacgagcttatgacatttatggatgcatattctggatataaccaaataaaatgcatgtccctgatgaagaacatacaagttttgtaacaaatataggactttattgttataaagtcatgccatttggtttaaaaaattctggggcaacatatcaacgactagtgaatgggatgttcaaaaatcagattagacaaaatatggaagtctatgtcgatgatatcttggtaaagtcgataaaaagggaagaacacacgaaggacctcgaagagtgctttgagatacttagaaaatataatatgaagcttaacccacagaaatgctcttttggagtttcctcgggaaagtttcttggtttcatagtaaatgcaagaggaattgaagccaatcaagaaaaaatcaaggcctcaatcgagatgccttcaccaacaaagcaaaaagaagttcaagccttgacaggaagaatgacagcattaaatagattcatttcaaagtcaacaaataaatgtcttctattctttaatgttttgcgaggcaataagaaatttaaatggacagaagaatgcaaggaagcttttaaaggcataaagaaacatctatcaacacctctagttttggctaaaccaat

SEQ ID NO: 142827 - DNA, 588 bp, Cannabis sativa
atgttaaaataatgattttgattttataacattttattccctttcatttctcccattaatttattccgataacgattacgctttagtaaacgtgccataaaattatcatcaccaaatgtaaaaataactaaagtaatattttcacaagaatttataccatttaaaactatagtgtgtgattataaagaaaagattgttttgttatctttaacacttcgataattcataactcacaatagtatcatgagtatgacctataatgtatactatcattacttcaaaaatatttttaagaaaacttagaagagcatatagaaaaaataacactagaattttatttaatagtgcttgtttagtcatttaaaaggggtagataaaataataaacttcttaaaataaagacaaacacaaataagaaaatttcttacaaataaattaaaaaaaaattaaccttctttatatctcgcaaagaaagagatataaatctcttttcactccacccaacaaagtatctactacacactataaaaatactcaatctattattatttcgcaattttgtattaaagtccaaacaacataaagtta

SEQ ID NO: 142828 - DNA, 721 bp, Cannabis sativa
gagatccagatccaagtcctcctctgccacattcttgattctatcgtaagaactctctctctctctctctctcttgatctttcccctttcattgattcaaaattagactagtttttgttgttcaatgagtttgaattttagtttctaaaatttgtatgtttagggattttgaatgagtttccagtgtgagtaacaaagaggtgttcaaatttagttattctttgcactgcatgtttcaatttgggtcatgagttttcatcaattagaaagtcatgagttctatatgttcaattttcgaattcacattcaatttatgagaaccattctgggtattgctcacatgccacattcaaatgatgcctatgtttgtatctaacaacagcaccaaatgatgttaaattttcttactattgcttattttttctagttttaataagacttgagccccaaatgatgaatctccaaaacatgactgcaactcttagtcttgattttgaatctctgagttctgtagtttgtttggaaagtgtatcaatagaagaattttgagtctagtcttatttatttatttttgttttgtgttcttgataattttctaacagttctatatgtcattacaccagttccaccctaatctgttagttttaggttttaattaatgatttagagagagagagagagagcagtgaaggtaggggcgagagggagaaggcagagaagg

SEQ ID NO: 142829 - DNA, 724 bp, Cannabis sativa
  modified_base (681)..(689): a, c, t, g, unknown or other
taagtcctcgtccaaagattacgtacggaggcgcgccttcgaactcttgaccaggtggactacctgggcgagctagactgctacattcccgcccacactaatcgtgccacaaaccctgacaaggggatgtgcgcctggtcaggggcccatggctagcaaggagcgctgatgcccttgcacaagtacttcaaggatgtgtcagacttcttttgtctctgtcgggcccaaatcactcctaagggcattaagtatttgtcttcccagggatggggtactccttctcccacgaggttgcatggttctttgatttgaagtccacccccaaataaggcaggtcggggtacttctatttctctcagccaggcttcaagtggctgacaggcacggatgccaaggccatcagcaaaatagggcgttttgctgatgagtacttcatggtgaaggatatgacctacccggactcggtttcagcagatttcgacatatcgccgtcctcctctcactcttgctcatagggatagagctcagaaacttgcccggttgccgaaggaagacaagaatattatacagttgacctccgatgataatcttgtgaagtacgggctctatcccgaggactttactcctacctccgtgacggggaagaagaagaaatctgtattggaatttattttaccaggnnnnnnnnnctactcacaagtatgttgtttagatcggaagagcg

SEQ ID NO: 142830 - DNA, 1051 bp, Cannabis sativa
caattatattatatgtaataatatatataacatatcacaattttaatcttaaacattatattatataataaataatataacagtatatactatcctggtcttaaaacaaattaattcttattcgatgtgtttccatttatatatgtatatatggatgcattcttaatgggtattactcatttacgggtaatattgtgaaaatttaaattcttatgcttagtttttctatctaattaaaaaaatctcttatttttacattatatgagttgaggttgttccatcggttgaaaaaaaaaattaagaaaaaaaatttttcggcaaaaaaaatattgagtttgacttaagtattttgtatataaatatatttttaatatataaagtgtaagaagtaatattctttaatatttttttttaattaagtagctaaattaagtataaaaattcaaatttctcttttattattcttcagatcaaaatctagtaatctaatatatttttaaaattaatatttatagttaaattatttagtaatggaataatctctattgagaactattccatattagatatatacttaattatattcttaatttttattttaattatgtatatatttttgtttcctaattagttttttttattaagaaaatgtttaataatttattattaattataattttagtttgaaaaaccataataattttaattttataatactcttgtttttgacatatcaaacactgttttaaacactgttttttttttttttttaatttttaaataataataatagaaatatattttttagttaaaaaaatgataatagaaagatatttttttaaatatgtgtaaagaatttaaatttaaattgtaatattaaaaaaaatttaatattatataaatacatttaatataagataaaagataaagagaattatgtgtagtaagtttaaatttaaattgtaatatttaagaaaaaaataatacttttattatatagtcacatttaatataacatatatatatatatatggttacatttttattgtaa

SEQ ID NO: 142831 - DNA, 1010 bp, Cannabis sativa
gtgcatcacttttctattgggcacattgagagagaaagtagttttcaagcactaataatcattttaataaaaatagtaaaaatctcacatttctattagtggtatccctttgtcaaatgtggcctggacccatctcaaaatattttttcccactagtgacatgaattcatacatctaagatccaaatgaagattggcgtcgcattaaatttggttaaaattagctcctaacgcaaaaattgaaaatattcttcttttcagagtaaattttaacaaattttttccttactcttacactcattagtgttctcttaaaatctcaccctacacatcttaaaaaatcttgaaatttcataggaatgaagccaagaccattgtgcatcacttttatattgaaaaagttagagaaaaagtagttttcaagcacaaacaataattttaattgaaatagtgaaaatctcacaattttgatagtggtacccctttgtgaaatgtggcccagagccaactcagaatattttcccctattagtcacaatgaattagtactactaagacatgaatatgaaaatttgtttcacgttaaattttgtcaaaatagccctctaattcaaaaattgaaaatattcttctttttagggtaaattttaacaagttttttttactcttattctcgatagtgttctcttaaaatcttaccctacttatcttaaaaaatcattaaattttaaggggacaaagccaagaccgttgtgcattacttttctattagacacattgagagaaaaattagttttcaagtactaacaatcaatttaatcgaaatagtaaaaaatcttacatttttaatagtggtacctctttgtgaaatgtggcccgaagccacctcagaatattttaaaccactagtcacaatgaattcgtactactaagacgtgaatatgaagattttttttgcattaattttttttttttcaaaatggccaccttatctaaaaattaaaaatattct

SEQ ID NO: 142832 - DNA, 548 bp, Cannabis sativa
  modified_base (50)..(61): a, c, t, g, unknown or other
ataaaataaaaattaattaaatatcatttaaaataaataatatatcatannnnnnnnnnnnataaaaataataattaaatatatatagcgtgtcaataaaattatattcatacattaaaatatttaaaatatttgtattacgttaacaaaactatataccaatattatacataaaaaataaaaaattaatattatctaaaaataataatgtattataaaataaaataaaaatttactgcacaacaaaaattatataccaacatcccataaaaaatcaaaaaaaaaaaattaacataaatttaaaataaaaaaaatttcaacaaaactaatataaatataccataattttaagtaatttgcttctaattctaaaaaaaatatggaaaaaattattgattttttgttatatggtaaaagataatataaataataaataatgtaaaatagttatttttctacaaattttaaatgaagatatttacttatataatattataatttgggctatttgctataattttcctattgtaaatttaaaaaaaaaaaaa

SEQ ID NO: 142833 - DNA, 583 bp, Cannabis sativa
tgtgtaggtaagggaagggctaagctggaggagcagtgagtttgagcttggcaaggattgtacatatcgcagcagtgcaacctggaggattttgattttataacattttgagctgccctgtattttgtgtaggaaaaaaattattaaattattacctaactatatattgtaaaagtaattttcaactatgtttaaactcgagatcccgacctatgcggttatataattataatatgataagattaattttgttctagtaagttttcaaatgcgggcgttacactggcactagcctccgtctcgttacattctacaatgaagtctgccaatgcctggcccttgatcaaggtgtgtgggatgtactgtatgtcgaactggcctaattccatggcccacttgaggagccttcctgaggcctctggcttttgcaaaacttgccaaagtaggtgatttgtaaataccttgatggagtgagcctagaagtaaggcctgaggtttcttgaggcaattaagagataaaaagctaatttttcgatcaagggataccgaatttcagctcctatcatgcgtttgctgacataat

SEQ ID NO: 142834 - DNA, 504 bp, Cannabis sativa
gttgacgcatgggactagccctatgccgaggttgacagtttgcaaacttgggccacaaatattgaagtttttcaagaattcttttgagcatcatgtatgtcttcaaaaaatattaagattcaattatttctagggaccaaacagaattttggaacgggcaaaactatgacccatcgcctaggttggcattttgtcaacttgagctgtttccaattcagtttagcaaaaagtgctctgggaatttttaccatcataagaaataaggaagattcaagtaaactttgggagaaaacaacaaacccaaatcctttgaaaaagggcccagctctagcttaacaatcaacctatgacactaccttcaattgcccaaatgccaaattcaatgtgaccattgaatctgacttgtgggctttgtgccctaaacaaaactctatttcaatgtaattaattctattcaattatcaataaagaaacatatttattttcatcacttatttagtatgt

SEQ ID NO: 142835 - DNA, 659 bp, Cannabis sativa
tgtggctgaagcaattggggtttgggaggctttgagttagatcaaagatccgtggctcagtgtggttttagaaacggattgtctttcggttgtacaactatccgtagctctgtggttatgctttctttgtttggcaaagttgttagtgaatgtaaggatttattaaatactttgcgtgatgttttttttaattttgtaaaacgatcagcaaatgtagtggttcattcctttgcaagggcctctatatctcaccctgatcgatttttcgacttggacactgttcgagttgagttgttactgtacttaataacagagttattcgtttaataaaatgatggctatcattttcaaaaaaaaattataaatatttgtatgtatatatgtattaaatgcaaaaaaaaaaaaaaacaaaactgtaattaattatctacatacaataatgttgttgctttctttcactacacattttcgtttttcttttttaatttatttttaaaaagaagaaaactttttgcgttattggcgcaactttcactttgtagggttttactaagggcatctaatagagaaatctaaatttagtgttaaatcaacactaaaaaattactattttaacactaaattttttttcaattccaaccacaacactaaaaattaca

SEQ ID NO: 142836 - DNA, 1251 bp, Cannabis sativa
  modified_base (1196)..(1203): a, c, t, g, unknown or other
gagggagaggaagagtttaaaccgccaaattacggcgggtacaatgaggctgggcagcaagtcgatgctgatggagacatcctagtcgagggtgtggactacgtcagtgtggagcttgcagcggcggttcctcataaaaggtagggtgccttgggcgtcagatgggtaagtcctccctccaagattacggaggcgcgccttcgaactctcgaccagggcaggcacctgggcgagctgcactgctatattcccgcccacaagaatcgcgccacaaatcctgacaaggggatgtgcgcctggtcgggggctcatggtcagcaaggagcattgatgcccttgcatacgtacttcaaggatgtggctgacttgtttggtctctacccggcccaaatcactactaagggcattaagtatttgtttgccctctgcgtcctctacacttcccaaggatggggtactccttctcctcacgaggttgcttggttcttcaattggaagtccacccccaaacaaggctggtcggggtacttctatttctctcagccaggcttcaagtggttgaccgacatggatgacaaggccatcgtcaaaataaggtgttttgctgatgaatacttcatggttgaggatcccaggattacccggactcagtttcagcgtattctgatatatcaccgtcctcccctcactcttgctcttagggaatgagctcaaaaagttgcccgattgccgggggaagactagaattttatcaagttgacctccgatgataatcttgtgaggtacgggctttatccccaggacttaactcctaagtatgtgacagggaagaagaggaaatctgatgctagccggactgaacgaactcattcggagaatgagttgattcaactgaagtgtgaagctaagttgaaaggatgtgccagggccaaacaatatgcttaggagccgttgaatcccgaagatgagactgaggaagagcaggtgactccattaaagaggaagaagaaacttccggcctcgcctaggcctattgaacatgcaattcgcaaaagggagcccatttcacctgctcgaccatctcttcccgtgttcggaaaagtgaaagctgttatgtctgagataagatcgatgtcaggtgatcatggaattctgagtcttgtgttggcggtcaccttgcattttactttattctnnnnnnnngcttcttgattttcatgccttgtgtttctgatggctgtcttctaacca

SEQ ID NO: 142837 - DNA, 666 bp, Cannabis sativa
tgtatcggggaaaatgctgaattttgttttggcgataacgtttgactctggactccgttttgggagttctttatatcgttggaaagctcgttccgagatctatgtgattatctgtattttaaatgctatgattatattttatgaatgtggaattggggtttaaccttttttgagtaaatctcggtattgtgactaggattatcggcacctagtcaagagcacacggggatttggaatctcttcttttgcgggacaacactaagacagtagttgcacgtagagatatgaacagtggtccttatattgaatattatattggtgataaattagaagccaagattagggttatcaccctgaagtgagcggtttaatggcctagggttattaccctagtaattatcaatgtttaaatgctatgccatgctatatatatatattgtaataaacaagtatgcgctcaaggcatatttaagttagactcggtaagttagtaccttgagtttgatagtaatgcggtctagggttattaccccagaatttatgtgaaggtaagaaagggatgatgtacaataatattactaatcaagtgaaagcatgaattagggttattaatctctataagtgttattttgagcatgcaataatatgttatatgagagactattt

SEQ ID NO: 142838 - DNA, 1102 bp, Cannabis sativa
ttacattgaaacagagttttatttagggcataaaacccaacaacaaggacaatcccttgacttatagagaagcaaaggaagatcctgactcaaataagtggaataatgccatggatcaagaaatagattccatgcgcaccaataaagtctaggaatatgaaactccacttgaggatattacacccataaggtgtaagttgattttcaagaagaagagaaatgctgaagggaaggtaaagacctttaaagctaggcttatagccaaagactacacacagcgagaaggcgttgactttgacaaaaccttctctcttgttgtattgcttaaatctattcgaattcttctttccatagctgccacttatgactatgagatatggtaaatggacgtcaagtctgctttttctaaatggtgatcttgatgaaatcatttatatggaacaatcagaagggtatatgttaccagggaaagatcaaaaggtgtgcaagttgcttaaatccattaaagtaagcctctagattttggaatatcacctttaataagactattaaagagtatggcttcgaacaaaatgaatacaaagccggtgtatacaaatacattaaaggtaatgtagtggtattcttaattctttatgttgatgacagtctagttattggaaataatgtagaaaggttattagacataaagaagtggttaggcaataaattccaaacgaaagatttaggagaagcaagctatgttctcgatatcaaaatctatagagatagaaagcggagaatattagcacattttcaagcaacttatgttgataaggtgcctgaaagattctcaatggagaattctaagaaaggacaattaccgtttagacatggaattactctatgtaagattcaatgtccaaatactcctcaagaggaagaggacatgagaaactacccttatgcatcagtagttgggagcttgatgtatgcaatgttgtgtacaaggcctgacatatgttagtcgttatcgatctaatctaggtttggaatactggatagctctaaagcacattctcaagtattttcagagaataagagatctcatgcttgtatattc

SEQ ID NO: 142839 - DNA, 606 bp, Cannabis sativa
gaatggcttcttgcagcctccagcgctaaaaaatctcggtcgtgtcctcccctcagcgcacgcgaatggtatgcaatgcaatgcataccatccgtacaacttgcatttttttttcttcattttttcatgctttttcatggaattaattttggattttttgtgtagttttgtattttgatttttatttttaaaatttaaaatctaattagcaaaattcaattattattttttaaaataaaaaattaatttaaaatattagtaaaatttgaatttgaaaataggtaaaaatttatcttttttgcttacttaattatcttatttttaaaatttgataatcttatcttattttaaatttaaggtctgatatttaatattttttaaaattattctatttttataataatttggccttatttaaatttaaaataagattagtttaatcatgatattttgaatagaattaggattttatgctaacttttaaattttgttatgatattttaaattgtaaaatgagaaaaatgatattaaattatcattttattttattaaatatttaatttttaaaataacatgaaatttgaaagtagttagcattttttttga

SEQ ID NO: 142840 - DNA, 1686 bp, Cannabis sativa
gttagttagggtgttacagtttgggtctgggtcaggtcccaaatctcgatccaagttctggtcctagtttggaggcgcaattccttggtctgggtcccctatctatgttcggggcctaggtcccgatccaggtctaagtttatgttccggttcaggttcaggtgtcgggtcccgattcgagtccaggtctcggtttgggttcaggttcgagttcgggtcctagttatagtcggagtctgggttttgtgtcccaggttcgagtttggttcttcggtcctgggtctaatcttgattttcggtctaggtttgggtcctggtcccggtttggtctaggtcaaagtcttggtttatgtcccaggtcacaagtcccggtccaggtccaagtcctagtatggattttggtttgagtttgggtcctgttacagccccaggtctgggttcctgtcctagtgctagttagattctatgtcaggaatcaagtctagatctcggttttaggtcagctctcgatacggatctgggttcgggtcttgcattcaaacactgactatgggtcccaggtcccgggttctagtcccaattctggttctattcccaataccggtttagggctcagtcctagtcttggtctgggtccctgtcttgatctcggtctgggtctgattcccaagtttgagtccgagtcctgggttcaagtctaatttctagtacgagtccggctctaggtccgagtttgagtccgagtcttggtctgggtctaggttcgagtcttagtttgggtctggtccttggtctgggtctgggtctgggttctggtatgggtctaggttttgatcaaggtcctgggtcacgagtcctgggttccatgttctaggtcgcaggtcctggcgcaagtctgggtctgggttcgggtttgggtccgggtattgatccctagtctaggtctgggtccatgttaagttttgcgtctagatcttgttctgggttgaggtacaattcttgttccaaggtcctgatttcaattcttgttctgatttcgggtcccgggtccgagtttggttttggatcctggtctagaaatggttccaggttggggtcttggtacgattcgaaaatccaaacaccgactacgggttaggtccaagccgtgggtcgtgggtcaagatctggatcccaatcttgggtcccgatctcgttctgattcagatcttgggtcccggtctgtgtctatattcgtgtttctgttcgggtccgggtctgggaccgagcactactacaaattacactattcacgtcggtcaatgctactattcatagggttgactgacatgaatagtgtccaaataattggacccatctgtttaaaaatgttattaataatatactatttgcgttgtttgattaaatgatgataaaaaagaaaccgacgaaataaagtaaaaatttaaaaacttgtttttcattttgcgtccattgttaatagtcgactataatgacgtgaaatataattgtgagcgatagaaaccgacacaaatttaataaaatccctaaaacccaaaaattatataacatgctgcacacatccctaacctttgtctcctccttcgaaattgctctggccaaattggccattctcttcaacccagttcatcctcttcaaaactgaccattctctttcacccattt

SEQ ID NO: 142841 - DNA, 1035 bp, Cannabis sativa
  modified_base (833)..(833): a, c, t, g, unknown or other
aatcctaatagttaaagatcctctatagatgatctacatcgaataaggacaaatttaccgagacctcttactattgacctttaaggaattcctttaatgacttttatcttttttggaatatttgaaactgttccttagataaataaaatctacatctaggagtcaaatgacttcctttagatatccattagaaaaatgctccagcatcttactaaagtaagttgcttgcaccagagtaagtattaggtataccataagccacatgtttagataatctcaaacctatgatactagaattgggaagttttattaagttcattgaatagacttattatcgaaatttctcttcttgtccttgtaatagaaaactttttgttactccatatgaatggtttttaccatagttctcttggttttgcttcttaattccttattctgactatccattacttgtttaaactaacaatgtatttttatcacaagtgtctcccaagtcatcatagggtgagtttcttgaaaccctcccactacgacaaggtaccatgactttttatctaggaacattaatggtattgtcctcattggttgtgtcaagacaacagaggtagtgggcccatcttatatagaataagatgatagaccattttggaatgcatctcctctactttgctactttgttttcaaatttagtcatattcttagaaaagaagtatttgttgaaaaaaaaaatactttcttaacttaatgaccataggatgatccacccataatcactttagaatagcaatcaaacttgcaaacttaagttaacagttctagcttgtcttaagttnatgattaggacatccctgaatctagtaatggcgtacactaagtaaataactattccatcattttgaaggacttaggaaactactagtaactaattctagacctttcactttcatcaatatgcaatccaaatttctagggaggtaagtttagatataattcgaagtttaagttaatgatctttgaactgcataaccaaatatt

SEQ ID NO: 142842 - DNA, 1362 bp, Cannabis sativa
agggggatcatgaaggggacgctagggtccaagagattgaggagcaggacgacgtacgtcctagcagttcctctgaggtggaggaagaagcggaggttgaaccccctaactaagtggaatacaatgaggctggggagccagttgatgctgacggagacgtcctggttgaggaagagcaggtgactctgaaacttccagcccagcccaggcctattgaacatgctattcgcattagggagcccatctcacccgctcggccgccttctcccgtgctcggaaaagggagagctattatgtccgaaataagaggcatgtcaggtgatgatggactttcgagtcctgttcgggcaatcaccttgcatactacttcgttttgtttttgagcttcttgactattatgctttatgattctgatgtctgtttttattccgtgtagacatgtctcagaatatgtttgacgctctcaggaagagaattggcagaagttccagcgcatctcctccagccaagaagtctaaaggcggtgaagggtcctcttctaaggagaagatgcctactggggaggtcattgatcttttcgaggagctaacggttgcaaacccctctactccaaaagttgctaagtccaaggagtctcgaggagggagttcgaacaggcctgaacaaccaagaactgggtctgagctgactaagagtagacccgagcagatgctagcccctactccacctttgccggtgcttccagaggtgaagaaaggcaaagagatgcttgcccactatatgaaccggttggttcctgaggttagtgaccaactggcggacgctgataataactcttctctggagctgctgatgggcgaagtcttgaaggaatccacaagggcaagtctttcttgaactttcctttaattttctttacttggctcaaatattaaagtattttctttgtgcaggccagcctgaagttggcctacacatactcccgggctaagtttgctgcttccaggaacacggctctgtccacatattcatccccgccttgggaagttccctacttagaaatgcttttcccttgtctgtgctctggttggaggatacttccttcttagccttggccactgcaaggttataacattcccgagcagactgttcgtttcctcttagacaccctaccccattctttgttggaaacatcaagcgtgagtggaatatcgatgtgacagcctttaggtcatacaaggccgacaagcctagcattacaataaaagctgaaggaacatctaatatcaggaactgtgccttgatagtcatgctcgtcggagcttgtccaacagtgaatggtagacgaatttgtcctagagg

SEQ ID NO: 142843 - DNA, 958 bp, Cannabis sativa
tttttttataaatttctcaattttatttttttttactataaggatttaacactatctcttattaatcttacttctatggatatcatattgcagtgtttaatttttttttttgttttaacttttgatcttttttaactctactagcacttcattatattatttatttgtattattatgtattgagtaaatatattagagataacaacgacaaagactacagatgagatacgttgatgacaaccggtgagatacaataattgacaaatactctaatttttctctatactatcctatttattttattttatattaacaattttttaatttaaaattttatatatacattatccatataaattttaaatttcttaataaataaaatagaatctttgagttttatttttaataaataattctatagtataattttaatattattatatattagattaatttttaaattattatttattatttttataagtaatttttttttaattattatactaaaataaaattaaaatagtggcacggaaaaggctatattacctaattttataatctcttttaaatattactatactaattttatttttgtcaaaaaaaattgtggtatataatttttttattataatatattaattttttgtgttacaatatattgaataatattatatgtaaaatatatatttgatgatataatataatatatttatttattgtaattatactaaattaataggaaatactaataaatttataccacataattttattattatataatttattttttttaaaaaaaacatgaaataaataataaatatatttttataatttttattatatattttttttaaaataaatatttacttaatttagggaaattctataatgcattctcttaaaagagatacaccgatacatctttatatgttttagtatctgaaataatttt

SEQ ID NO: 142844 - DNA, 975 bp, Cannabis sativa
tacattggagtgtcatttggatataattatatgtatgtattttttaaatttttttaaattttcctaattaggtaacgtatttgatatggcatatattgtaatttactatattcttaaacaaaactcacataatcaaatttgagtgtgtttgtatatagactggattcgtaaatttgatataaatattttttattcccaaactttactaaaattatggtgtgtaaatcggtttaccataactaaaatagaaagcaatctatacaaccatttcaatttaaaatataaaataaataataataaaattaaaaatattgtgaaaaatatttataatattttaaatttaaatttctttatataaaatattaggaaaaaaaaacaggaaaatacaaaaagggggaaaaattacaaaattactatgggtcgacccattcaacatttatacagtccacatacaaatatttacaaaaataccacatgctctaaactttcagccgaacggactgaacgatgaagatggacatacctcgatcgtttcaaaacaacaaaacaaccaaaatgaggaaatacaaccattaattccagcgaaatcaactggaaaagaagatctgcaattatctaaacagaaatttacgaaaaaaaccagaaaaattgggaagaaactgaaattacacaattgttttcggttttattcgatcaaaacaactctccctaatattgaaattcaaattcatgaaatgtagatctgtaacaaacagatctggagctctcccgaatccaaaataaagtatgatgtgaaaattttaaaaaaacctcatgaataatagatctactttatatacagttgcattttggttgattactggttttcaatgtggaatatattttttaaaaagaacacaataagaatagaaaatttgaattaaaggacaacaagttacgtataagtctgtttattttttgttttggttgccttat

SEQ ID NO: 142845 - DNA, 554 bp, Cannabis sativa
atagaaaagtggccaaaacctaaaaaatgcatatttttctaactttgttatgaaatcccatatttcatgtaattttcacttcaatattagagtactacgctagcttttatattatttaccaattagagatatttgatgaaaattattataataaattatatgaaatttaatatttaatttagttagtgctaaacctaaaacttttagtggaggtgattatttttttcttataaataatatcaatgaaaaatataaattttatgagaataaaaataaaaataaaaaatgtgtagaaaaaaaattaaaaaaatgtaaaccttaaaatatatattatttttatgagattagaatataaaataattaaaaatttatatataaatataaaaaaattgagggagctaatgatctcacatgccttttttctctccaacagtacctttttaatatttctcgaatgagctctaatattatatatataggaatatgattttgtccgtgatgtactttcacggaatgtattccgtggtacattatatgggtctcagggtacatta

SEQ ID NO: 142846 - DNA, 637 bp, Cannabis sativa
cgaactgactgaacttaagttcacttttaatagaaaacaattttggtattaattccaaactatacctatccacatacttaataatattataagattcatcatcttttttattcaaatccatccctttaatttcaaataaatcaagacattctaacacaaaaaactcgtattttcaaaattgtaattctataaataacctattaccaactttagaagagagacataactatttttgaaaacctataacatgtcatagaagattattttaaaccgcaattatttaagaattttattttatattatagataattgagttaacatctcaacagtatagttgtctatagactttgatttcttttctacaattactttatatgttagaaaaattaataaacaatatactaatatcaaagaattattacttgaaaatcatacctttgataatatttattttttgccttgtttttgccttttggtggaaaaatttagtgttctggtctccttcttgtagccattgtattctagacttttgtttccaatacacttcatctttaaatagcaaatcattcaatttttcttccaattctcccaattcctttgaatattttgaaaattgttgaagattatgcaactttgc

SEQ ID NO: 142847 - DNA, 568 bp, Cannabis sativa
ttccctatcgatgaataacatggaaataccaaaaacaacacaaaaatgggaaaaactagggttctcaaatttgccccaacaggtagattggttccccaaccggaattccggttctcggaaaaaaattcctggaagccaattaaaatttctgttcctacaggcctccctgaaccggaattctggttcagtgaaggaatggatcaaaatttcataactcatgcaattcaattccaattcataccaaactctccagacctgttatttagaccataaagaacataatccaagagataaaacaatcatccattcacataaacgaatttcaccattaaagcttcaagattgagttcaaaactcaaaacttgactaacccttcaaacaacctctaattcaggcatatatcaacataataatccatatctaaacctcagaacacaacaacaactaactacagcagctacagcaacaaaacatcaaagcatgcaaaatttcatttcttacaacttaaggaaattgagaggaagctacaagaagcttaccaagaacttgagatcactaattccttgct

SEQ ID NO: 142848 - DNA, 750 bp, Cannabis sativa
  modified_base (47)..(57): a, c, t, g, unknown or other
  modified_base (437)..(455): a, c, t, g, unknown or other
  modified_base (600)..(602): a, c, t, g, unknown or other
ctcccactcaacagtaggtgtctggtctaatgcatagcaaagcatannnnnnnnnnntcactgttgatcctaaggaattatttctttcgcctatatcttttttagaatagttgaaacttttccttagataaataaaatctaagtgtagaagtcgaaaaagattcctatagattgtcattagaaaaatgctccaacatcttactaaagtaagttgcttgccctagagtaagtaaattaccaggtatatcacaagccataggtttagataaactcaaacctattataatactaggaacgggaagttttttttgagtccattgaatagacttattttaaaatttcctttcttgttcttgtaatagaaaacttttaggttattccatgtgaatgcttttaaccatagttctcttggctttgcttcttagttccttattctnnnnnnnnnnnnnnnnnnnaaactaacaatggattttaatcaaaagagtgtcccaactcataacaaggtgagttccttgaaatcctcccactacgacaaggtaccatgactttctgtctaagaacactaaatggtattgtcctcatcggttgtgtcaatacaannnaggcagtgggatcatcttatatagaataagatgatagaacaatttggtatcaagataaaaatatcttccctactttgctactttgttttcagatttagtcatattcttagacaagtagtatttgttgaaacaaaccctttcttatcta

SEQ ID NO: 142849 - DNA, 634 bp, Cannabis sativa
  modified_base (44)..(49): a, c, t, g, unknown or other
aattcatattaggatgttactgaaacatacttgttagtaaatcnnnnnnctgataaaatatttccaacagcatttactataaaactaaaaagaacaacataaatgaaaataaaataataatttaatagtcaaattgaaatttgaggatattatagctgataagtcgatattttgtcctataaatatggtcaatttatgtattaatattcttaaattgattttttaaattattcattatcatgattataattttttttaaagttattttaaagaaatttttacatgaaaaatacaaatggtcattttatttacaaaaatacctccagaaaagttgggcaacaaattttccttttctttatttttatttattaaaataccacttgcacacacaatgtccattgatgatgatgtcattattcttacatatcactcaactaatttctctctctttcatattcaatttttgcatcctatatcaattttttatttttatttttatttacatatttaaacttctacataggggtgagcatcggtcggtttttttttatataaaaatacagaattcgattttcggtctggatcggtacaatccgaaaaccgaccgacaaatctagaacctatcttaaaacca

SEQ ID NO: 142850 - DNA, 534 bp, Cannabis sativa
ttccaacgatataaagaactcccaaatcggagtttggaatcaaaagttatgcatttttgaaatttcaactcgaaactgcccaaaaacacgagggcgggatgcggcatgcccaaaccatgccgcgacacctgggacaaaacccaggttccaccaaaaggggcgggccgcgggcatctgggtgcagaacccagaaaccaacaaccttcaaaacgattttcagcttgaaaaaccaatcttttcaccccaaattcacaaccaaactttctaattaacaattaggattactagcaattactagatgctcaaatattgcatttcatgcatcaaaaccccataacaaaaccaatattcagattgcataaaacaacacaaatcttgcttaaacttaacaagatttcaagttcaagaacatgaactaatacccttcacaaccccatgaaaaaccagcagcataacaccactttaacatgaaattccaacctagaaatatcataaaatctctgcccaaactcaacaataaagcatacaacaaca

SEQ ID NO: 142851 - DNA, 803 bp, Cannabis sativa
aataatattttaataataaaatttgaaatgatcttaatgtgataataaaatattaataaaatttagaaataatctagttgaagttttaaatttgctaaccatatgagattttaataatttgttattgtttgaaatatattttattaaattaaattataagattagaaaatttttgttttcacattttatcttattggataattattttaattaatattttatttttggcaaaataacatgaaattttgaaaagtttgttaatttttgtttgaatagaaattttaggtttttgtaaccataaaattttcaaacttaggttattttttttatttaattattaaataaaattggtcatatcgtaaccataaaatatcttatttttcaatttttttatatttggttatattcaattaattaaattataagatcaataatacaatattagaaatatctatattttaaattacgatattattttatattatcttataagatatttaattaatttaaattatttaaataaacagaaattttttgaaacattggttatatatttgaatttcagttagaatttaagatatttaagagatttgttagattttaaatatttttaaatattgtctaacaacctaaattttaaattctagttaagatatattttaattttaaaatagacatatttcaacctctttccagttatctgttacatgtttgtaatatttgtttatttatttattcaaaatttttttacaaacctattatttatctgatctgaattactatgattaactttttgacagatc

SEQ ID NO: 142852 - DNA, 507 bp, Cannabis sativa
tccaattccgagtaatatcgagagagttattgccaaaattctatcagtcgtcgcagcagaaaatttctgaaaaaaaaaaaaggatagcgaaaataaagatagaatataaagatagcgaagagagttgcgattttttttatcttttttttttcaaaagatgagttatctattcttttagtgagaaatttcctaacacaaatataaatagaattctaattctaatatgattcatctaactttcttatcactataaataagacctcttaggctaccaatgaaataattttaaaagctacaaattagagagagaaaatcagagagagagcaaggaagagacggagatcggcttcgaagtgttcttcatcataattcttttcttttccttctacttttactaaatattgtgattttggttataatatctagttctgagtagttttcttttagttaagggttattttaaaacctgaaatatgaattcttaatttcattattgaatgttaattt

SEQ ID NO: 142853 - DNA, 584 bp, Cannabis sativa
tttaattaggtaatgtatttttaatttttaatttttaaaatagggtttaagattttgatctttgagatttcgtttagctattgcggctacattagtgtgctttttagatgtgattatatatacgtactgtacaataaaagaatgaattttattattatatgtattttatattgatctctatataaaaaaaatatattagaaaatattttgacaaaatttgagtttgattagagaattaattactttcaaagtagatgatgactgctggtactgaaatggtgaatcaaatgggagtttcagtgtaagtagtgcgtactcgctgctgcaacaaagcaagtcctctcggcctgtatctaacaactttgagttctggaaagagttgtggcagctgaaaatacccctaaaagttaaaaacatgttgtggcgtgccttgactaattgcctcccaacttgcctaaatcttgtcaccaaacatgtaaatgtttctatcctttgccccatgtgtgctacacaatctaaaaacacctctcatgccttggttgagtgttctttggctactgcatgttggcagcaccttggtgttc

SEQ ID NO: 142854 - DNA, 599 bp, Cannabis sativa
tatgcctaaccgacgcaaaaatacactaacaaaagtaacatttattgtagtgcgaaaaggcacaaaaagagattaaaaaaattaaaacatgaaaaccaccacaaaactcaattgggtggacaatgtgccaaaaaaaaggtactggagaaagagatagatgaacactcttgaaggttcctgagccttaaggaaagtgtccaaataaagttactagtattattttgggcttttttcagtttcaaccaaaaaaaataataatattacaaaaaatactttaagctggccaaataaataaatataaagcacaaataaaaaaaattacacaaataccacttacacacacctttaacctaggatccatgcttcctgggcaaccatcgcgcaaccacgcaataacccagcacaaccgaaacaaaaattcaaccagaaagagaaccacatttaatttcggcgacttcatctaagaagacgaccaaaatctataaaaataggggcggtttcaaattcatgaaaaaaagtgtagaaaaactactacaaaattaaaattcatccggaaatccagtttaatttgcataaaattaatgtcctgacttcaattt

SEQ ID NO: 142855 - DNA, 773 bp, Cannabis sativa
cttcatgatcctcctccttctggaaggttggatcttgttcagcgctgggtaaggtggcgtgccgagccacttgagggtcggatgcgtcgaccccacacattgtctttttggtacgaaccatcatcctatggatggacaaaagacttaaggaaaaatgcatgtcactcgaagaagttgaactagaacgaagacaaggatgatcctcgtgcaagagttgaagcagatcctggtcgatttggtgttcgcttccccaaaacacacctgggttcatctacaaaagacaatgtacaagatgagtgtttggtcgggatatcgaacgttaaaacaggcaaatatgctgactaggagtactcaacagattaaagaataagaatattcaacgaaaagtcaaaactcaaaaactttgaaattttcgcgagttagggcaaaaaatttcatgaaggttagaataagcaagatgaaagacatgcattatgcagttcaaaaagcaagcattatggacgcatgaaccgttacaaaggaaaatcgcagagtttctaaacttagggtctcctacatatcttctacaacaaaatcgaaagtatatccagaaagcaaatatgcaaagtaaacataaaggaaattgagaactaactcaaggaatcaaacatctggttcaggttacgtcaagccaaaccagccattttgatgaaatcactttagaaaacttgaagcccaaaacctctcttttcgttctgaacttacataacaaggaaggttggtgaaaatgagtt

SEQ ID NO: 142856 - DNA, 554 bp, Cannabis sativa
atcaggtgatcgaagttctagaattaggagcatacaaactgggtaagtatgacgaaaaaaggcaactcgttctagtaacaaggtattggaaccgggaacacttaagaaaatactacgagtaaaagtaccaggtcggatgaccatattaattacgaaacaaaagaacatttaccgttaagtgaatggccttctgggcggaccacgtctaaaggttcgtataaaattacaaagtactcaggttggatgaccactcatgaaagtaaaatttttattttctccaatttgttttgtttatgctaagctgaagatcatattagatcaatataatagcttcaatgtaagttactatagtaacagacatatttccgaccaataaatgaataaagatatttattccaattcaaatgagtcaagttcattagcatgttataaatttatcattaaatgtgtacaaaaagtttggtcgtacccaaagccttgaacagacaaaaagcatacttgtgaaaacaagtgaccaagagtcaaaagtctgctcggtcacttggggggcacct

SEQ ID NO: 142857 - DNA, 650 bp, Cannabis sativa
ttattagctttattgtaattttatatgtttttgtgttttttataattattttattataatttgttatgtggtatttacttttaattttattttagttttctaattaattttatgtatttttaggtgtgtttggaagaaaaagattgggattaaattgaagaaatattagagaaatggagctaaaattgcaattttgaaaaggaaatcagatcagcccattagaaggcccaccctcggtcagccctttgacccaatccacgccgtccgtcatcagatctaacagcccagaagcgtgcgtgtagcacaccccagacagtagcaagtgggagcagcaaaaactcctctcactcccagccgcgtggtccccaccttgtcagcacacacccaaccagcgcacgccacctcacgcacgtcagccttctcctccaatcccagctcgccagctgccacctgcagaagaaaaagaagaaaagaaattggctgttaattggaattgcatccattcgaaaatacattaacaaaagtccaaaaatacaacttttctcccacaatttacatataaatacctatttactcttcccaatttatttcacctaaataaacattcataatttatttttaccctgtcttttcactacttttccatccaa

SEQ ID NO: 142858 - DNA, 1087 bp, Cannabis sativa
  modified_base (1022)..(1038): a, c, t, g, unknown or other
ttgaattaatggagaatgttacatattattaataataggagttataaaattaaattaagtttaaaaaaaaattgaaaaactaagaaaataaagatgatgaaagagaactcatatagatctccacatcatcatgtgatttcctttatatatatatagatatagattggttaagattaattaagaagctaattaaaaatatttaacatattatctgtagctttatacaatttaatctcattttatttaccaatatattttatttttctataaaatactaactaagataattttaattaagaaaataaatgtaattacaattattaatttaatttttacaattagttattaaataaaaaaaattagcaatttttttttgttttgcaataattaaaagttatattacacatgtaatcctaattgaaaaaaataaattggccataatcccatacattaataattttttttttcaaatttactaatttggctaaataatcacctatatgttttgatatattattggtctactagttatttttttatcaaaaaaaaaccttattttttatttgaaaattatttaaaataaatttaattaattaagaaaataaatataaatttgaaaaaaaaatgattaatgattttatttaatatatatccttttataggttaatctattttaaggtagttataggctatattaatttttttcaaaaaaagaaatttatatacttaattaaagaaatacattcagaataaagaaaaaaaaaagactaataaatggcatatgccaaagaaatatatatttaactccatatagctatattaaaattttaattaaatgtctatggaatagagttgagatagaaaatgacctaaatatgaaaactaaattaataaatatctcttctttaaaaaaaaattaaaaaaattatcaaaagtaataaattaactaataaaaatatatttattacatattatcattttaaaatatatataataatttaattaagttatataattttttnnnnnnnnnnnnnnnnnatattacaacaaaaataaataaatgtatataatagtatttgatatatcg

SEQ ID NO: 142859 - DNA, 654 bp, Cannabis sativa
ttggacagcttgccatatctatgtaatctgatccccaagttatagggatttccttgatgattcacgatgcaaaagttgaattcgctaagtctttgtcgctccgtgcggattgctgattgcttcgcctcgagcatgcatatgaggtatcctgttcggactatatcttgcaggtagatactcatagtcgattccacgtgtcaccatcgtgtgatgccacgttagagtgaaaaaattgggataacactcacatatatcattttcaatataagttccaccacgcatactctacgtgctaactagtgtcttacctaatgtctcgaaaacgtggagattccaaatcccctggtgctcatgaccaactgccggtaatcctagtcataatttccaagatttacaaatatagggttaatccctaaatccactttcacatcatataaaattggcatttaaaatatagataaacatataaggctcggaacaagctttccaacgatataaagaacgtcccaaacagagtctcgagtcaaaaattatgaacaaaacaagttcaacatccaatctgtccacgcaagcgggccgtggagcctaggttgaaaacccagaaactccattccagcagctcaaaaaatgcatcaaaactcacccaaactcacc

SEQ ID NO: 142860 - DNA, 685 bp, Cannabis sativa
gggctgagtccaaatccagatcccaatctcgggtcctagtctggttccatttctggtgctggttcacgagttcggtcctaggttcaagttcgggtctttgtcaagtactaagtctcggtcatagttctatttcccaggtccctatccttattctgggtccaggtgccggttattgtgtgggtttcagtcccagtctaggtttgctttggagtcctagtctcggttcaggtttaggtctctatctgggttttgatttgtgttcaggtttgggtttaggtcatggtccttgtcctagtcctagttcggttctaattccatttgcgattctgagttcaagtttgggtttgagttcggggcggagttcgagtcctggtctgagtttgggttccggtccggatttcagtcttggtttagatcaggctccgtgtgtgggttcgcgtcctaggtcttggtctagtccaaagttctaatcccgatttgagtttggattctgttcttggtctaagcccttggttctagtcctggcctgggttcgagtttgggtccgcgtccaggtctaggtttgggtctgattctaagtgtgagtttgagttcaggtctgagtctatgtctgggtttgttgcaaggcctggaccccgatctgggtctaggatcaggtcgaggttgaagttggggtcccgagtgc

SEQ ID NO: 142861 - DNA, 1169 bp, Cannabis sativa
  modified_base (351)..(354): a, c, t, g, unknown or other
ttcctgaggaattaccagggttaccacctcagcgggagatagattttattattgacttaatacctcgggcagaatctgtttcaaaagcaccttgcagaatggcacctgcagaactaaaagaattgaagatacaactttagggaatgctggatttagggttcacctgaccaagtgtgtctccttggggacctccgtttctatttgtgaagaagaaagatggaactcttcgaatgtgtatcgactatcggaaggtgaacaagttaactattaaaaaaatatcctttgcctagaattgacgatttgtttgatcaacttcaaggcaagacggtattctctaagattgacttgagnnnnggatatcatcaactgagaatccaagaagaggttttcacgaagacaaccttccaaaccagatatggcgattatgagttcctagttatgtcattcgggttgacaaatgctccggcagcctttatggatctcatgaacagggtattcaaggattttttcgataattttgtaattgtatatattgatgacattcttgtgtactctcggtcagaagaaaaacacgaacaccatcttcgtaaggtcctgcaacgactcagagatcataaactctatgcaaagttcaaaaagtgtgagttttggctgtcacaagtaaccttcctgggacatattgtcggaacgggattatggtagacccagggaagattgaagtagtgaagaattggcctagaccaaaaacagtcattgtagttagaagttttctcagtttagcgagttactcagcattttgtggaaggtttttccaagattgcaatttcgttatctgaattaactagaaagaaccaatggtttatatggtcagataagtgtgagggaagtttccaagagcgaaaacaacgactgatcaaagctcctgttttagcgttgccgtctgatcaagagaaatttatggtgtattgtgatgcatcaaggcagggtttgggctttgtgttaatgcaagcagataaagtcatagcttatgcttcatgacaattgaaagattatgagcagagctatccaactcatgacctggagctcgcactagtgctgtttgccctaaaaatttggcgacactacttatatggtgagcggtgtgagatctatactgaccacaaaagtct

SEQ ID NO: 142862 - DNA, 644 bp, Cannabis sativa
gaaaaaataaaaaaaataatatttattatggtgtagaatttgattaataatatattttgtgtcaaatttaacataacttttaacatcagcccattatacactactatttttttttttgaataattatggactaaaatatatatattcactacatttataatactttattggagatacatagtggtttttattttttttttttgaagtaaaaaattttattattaaaatatacagtcaacttttattacagaagaactcaaaaatcgaagacgaatacttatccatacattatctcttacaaaactagtaatagcagtagttagtacacggactattctattcgcaaaacgttaaatgatatagcacgaaccactactaaagagtgtatgtgatttttaattgaaatttttacaccaaatatacaaaatacacagttttttacatatatatcttcacacggtgaaaccaacatttatattcatcaactttattttattacacttttaccacttgtacacacactccatgcaacagtacacgtcattgcttgatgacttatatcaatcataccttacatcatttctctctctttttctcttcttttttttttattattattttcaatttcttttcagttttttttt

SEQ ID NO: 142863 - DNA, 549 bp, Cannabis sativa
ttttattctcaattaaaaaattaaaaaatagaaatagttttacagaacatatttttagaaatattttcacttttctaattaaaaaaatattacgaaatgtatcctaaatgggaaagaaaactgataaaaaataattatctaatcaaaaaatatatttcacgcaacaataaacatttaatatcttattaaattttctacattttcactctactttttccaagttccatgaataaagaaacctacatgaagaaaataaatgaagtaactgttagaattatttttttttcaatattttgtcttttagtggtttgtaattaagtttaatagtctgaatttattttaagaaataattacataaggcaccattttctataaaatatttacatttttacgttcaaattaagaatattttttacatttttacagttctccaaaaaataacacaaaacaacataacatcaacaagaaaactacacaaaagtaacatgaaaataacatatagataacaaaagatcaacaaaaaattaacaaaattacaacataaaaaga

SEQ ID NO: 142864 - DNA, 1245 bp, Cannabis sativa
ttccaaaacaaagctaagcagtctttacaattatccccctgttaaaaggatttcgtcttcgaaatctaacctaaatagctctgggtattgagccctcatgtcggactcgaactcccaggtggcttcgtccaccttactgtttctccatagcaccttgaccaaaactatggtcttgttccaaagaactttatctttcctgtctaagatctaaaatggttgttcttcgtatgatagatccggttgtagctcaagattctcataacttagcacatgagtaggatctgaaacgtacttccataacatagaaacatgaacacattgtgaactgctaaaagtggcagaggcaaggctagatgatatgctaccagtcaaaccttctcaacaatctcgaaaggtcctgtaaacctagggcatagcttgccctttccccgaaacatccgatccccttcattggagacacccgtaggaacacatgatctcctacctgaaactttacatttctgcgcttcagatctgcataactctttcgcctactctgagaggcaagcattctggccttaatcttttctatggcttcattagtccaatgcactgattccaaacctagatatttctttttctctcgtttcatcctagtgaataggagatctacactttctgccatacaacatctcgtaaggagccatccctatactactttggtaactgttgttgtaaaaaaactctatcagttgaaggtacttgctctaggagccctcaaaatccataacacaggctcgcaacatgtcttccaatatctgaattgtcctttcaaattgttcatcagtctaaggatggaaaactgtactgaacttcagtttggtacccatagccctctgaagactctgctaaaacttcatagtaaacttcagatctctattcgatataatggactttgaagcaccatgtaacctcactatctctttcacgtataaatctgcatattgatccactgtaaaggttatttttaccgatagaaaatgtgcagactttgtgaatcagtctaccataacccaaattgaattgtacaatcccgtggttctaggtaacctgaccacaaagtccatagtgacatcctcccacttccactcaagaagtgacagtggctgcaataaccctgtcggtctctgatgtttagccatgacctgttgacaagttaagcaccgggatacaaattccaccacatctttcttcatcccgcaccac

SEQ ID NO: 142865 - DNA, 790 bp, Cannabis sativa
aagtatttcatattatcttgggcaaaaactcagagttgtgaagaaaatataagtataacagtggactctgtttcaattcatattctttccatgttttatgaaagaacaagctgctaacactaagtatttcataacattttttattttcattagtgaagcaaaatcataagtgaacctttttttctttaacaaaaggtcgagtagcccaaacagaacaaaaggacaatcacccaaatctcatcaaccagaagcatttcacctcttaaaaaaagttaagaaaaagtagtcaatatatgtctatacatataccgtacccaagaaagaaaagaagaagaaatagagtatgaacaacttccttatatacataaatattcaaacaaagtgtatataatctcctctctaaattaggaacctggtataaaaacaacaacagatttataatatatcttacaaaattattagagtattaataaactacaagaatgtacacatgtatataataaaataaagtaaatatatatactctaaaatacaaatgcagttggagcagagccagtggggacaattgctagagcgaagatgattgtcgaaagcccggagctgaggacgcctaccgattgaaactgttgatcccgaaagaccaaaaaaacaaagaacgtataagagaaatctaagtgcactgaaaaactttttaagaaaaattaatagcaacaaatctagttagatacatataaacacaataataagatctatgagaggagagatcttagcactacaagaaaaatgagca

SEQ ID NO: 142866 - DNA, 826 bp, Cannabis sativa
ctccctattttgctcgatcatccccttctctctgttgcacgtaccaccgtggggtagaacggggaccaccggtggtctagtagtcattctcattgtgggaatcgagaccttaaggtctttagatataacagtccaagaaagccaacacaccctctgcatcacttggtaggttttcttgttttttagagttgcaacttgaaattccgtattttaatatttccaatttattatttaattaattgattaattaaatgcggaataataaaactggtactgaaatagttttttgtagctacagaatacaactctgtaactccaaaagtgtaaagaccgcatacgattaatattttggattattaaataattagggtttattcatgagatttaaatgttatttataatatgcatattgtggaaatttatttaagttaatatatgcttattatgctatttatgtaaatttcgtaaattctgaggttgtgttcgaaagctgtggaaaacgacgttgggcctttagagagtcgcattttatgtgttttagaatattgttattattgcaaggtattggaggtgttagaattcttggggtttggaatgactaaactacccttgaattgtttaaaaccttggtttaaattaaagggcaaataggtctttttctttaattgtttatttggcttttagtgaactctagaatctgaattctttgtttttggataagtattaatcaatgttttttttttaaaaaaaaaaaagaagaaaggaaaaaagggggttttagttgagaaaatcctagaagcttcaatatctctctctctctctctct

SEQ ID NO: 142867 - DNA, 1139 bp, Cannabis sativa
  modified_base (256)..(259): a, c, t, g, unknown or other
  modified_base (542)..(543): a, c, t, g, unknown or other
tttaatggctagctctataggaagctttttggctcctagacatagattttatttatctaaggaaaagtttcaactatttcagaaaagataaggccaaggaaagaattccttaggatcaatggtgtgaggtctcgggtatgctttgcaatacattataccagacacctgctgttgagtgggagaaatgagtaggtatcagattatccaagaaaggaacattggaaaataattaaataaatcttaagatcaagaagannnnctatatgttagtcgataaggttgatgttttaatactcttagactacactaaatgagacttctagacttgcttgatgctagaaagtttactaatgagatggtgattactctaggggtggagaagtgattttggagaagtgtaaaaacctatttgaatctctaactctactagtgagactgaatgttaaagtggcaagaaagatacttattcaacctttagaaagttctatacagtttttggcattgtaccaataatgaattaactactagtgttgctttctgannaacacagaagtagttgccaaaaagtaaagaatttagtatccctagaggagtagatatatagagaggaattttacaatatcaaggattttgtgattaaggatatgtaatggtggagaaaggttgtattgaatacaaaatgtcagatcctattacagagagaatatgtaatggtggagaaaggttgtattgaatacaacctgtcagatcctattacagagagaatatgtaatggtggagaaaggttgtattgaatacaacttttcagatcctattacagagagaatatgtaatagtatagaaaggttgtattgaatacaacctgtcagatcctattaaggatatataatggtggagaaaggttgtgattttgtgattacagatatgtaatggtggagaaaggttgtattgagattaattgaaatgcaaatttagttttatattagtggaagtgggagtttgttgggttgtcttccctaactaaaacctacttcaatataatgagattactaattaataaaagatcagaaatcattctttgttgcatggttcacattatttatttcatgattatatttaatgtatgaattctattaagt

SEQ ID NO: 142868 - DNA, 741 bp, Cannabis sativa
  modified_base (467)..(469): a, c, t, g, unknown or other
tttgagttaaactatattatatggtagttattttgtaagatatattttaaaggacaaaattgtcattatatatttaatattaaaattaaaataaaaataattaaactccattaccctataatggcatttcttacaaaattggtgggggaagttctccctttcttttctcccttatttagtcaagttttcccttttctaattttaataatgtaagtaaataaatgtaagggaatgattaccttaccaatgattccaattacttattagtaaacatgccataagaggaaagagaagatggaaaaagaggatgatgaatatttttgttttaatttattcttttttatcttattttaattcaactatcactattaaaaaaattgctacttttagtgacaaccttttagtcacaacataaattttttatgacgaaatatgatttttagtcacaacaaaaagttacttgtgannnaaacataatatttagttacaagctgtcactaatttaattttagtcacaataaatattgtgactaaaaacacatttagggtctgtttggaaacaactgtgtaattactatgcagtgtaattacactgtatgcagtgtaattacactgtatagtaaatacattgcattttaaaatacaaggtgtgtttggatgtcaagtggtaattacatgtgaattcctaatatcatgtttggcatgatagttagtaaatacacagtaaattaatattataat

SEQ ID NO: 142869 - DNA, 741 bp, Cannabis sativa
  modified_base (26)..(28): a, c, t, g, unknown or other
  modified_base (443)..(443): a, c, t, g, unknown or other
  modified_base (535)..(549): a, c, t, g, unknown or other
  modified_base (611)..(625): a, c, t, g, unknown or other
  modified_base (693)..(694): a, c, t, g, unknown or other
aaatgatatttaagtttaaatatatnnnaaataatattttattttgaaatcggggtttgaaaatttgaaaaaatcaaaatttggggaaaaatcccacaaaaatcgcattttggaggtggctgtgcagcccgggacgcgcgcacaagaaggagagacgccgaggatactcgacatttgcaacctccctaatcgagaaaactcggtcagttgcagggttcctcaacgcgggacgtgtctgaaggaaggttgcatgccgagtttagacagtgggctgtccgagcacgtgcgcgcgcggatccttcttgtccaaaggtctgtgcatgcggatgcacccatctcgaccttgattcaacccgaaacttccaaaattcataacgtttgtaatttttatcggaatcgagttccgtaaaaaccaaaattacttaatttttcacaaggaatcnaaataaaatattttaaaaaacagaaaaagtattttttatggaaaattcatatttcatgaaagaaaataattgccatggctctgaggccagtnnnnnnnnnnnnnnntaccaagatctagatttactaataggtatgtttaattaacatcctaatatgaaattctaaannnnnnnnnnnnnnncataagggtttaagaaaaccttagtccatcggaatataatgagttcttccgttcagatctctagcccnngattcttttctgtagcagagcattctcaagatctgaacctggatctc

SEQ ID NO: 142870 - DNA, 698 bp, Cannabis sativa
taattagtattttcatttagttggatgagtaattagattttatattgttatatatatatatgtatatttaaaatttaacattaaaattttactcattttttcttggattggatggatccaatccaatccaatataatggacctaaatattggatggatccgatccaatccaaaaatttaattacattaacatgtcaatatcgtgctagcggagccaacccgaacacgacccgtttattaaataggttagaagagtcaacccgaacacgacatgaacccatttaagttaaacccaaacccgctaattctcgtgcaggtttcgagtcatgttatcgtgtcaaacctgttttgtcagccctactaccaaataaggctttgatcaagactcttgttttcaaggtagttgtaaacaagagcttacctctgatggggttacaatgttgcactacagatattatggcgatttcatctttgaagcagtcgagtgctgctttcagcatggtggcaatctttgccatcaagcagtttttaacatcgttgtctgtgcacgcagacagatggaccgcaattattgaccatctatgatgatgatatatggtcattttcagggccagccctgaaacaaagtgggtcatagggaaaaaaaaaatttgggcccttatgttagaaaaaatgtggtatttttcaaaattggtaaaa

SEQ ID NO: 142871 - DNA, 824 bp, Cannabis sativa
ttatgtaatgtaaatgtcttcatcattttattttaactaatcgtaatataattattttttttattttcaatttttttttaaatcaaatattttttttctaaaataaaatattatttatatacattacttttgtaacgaattctttttaaaattttattatttcaatattataagaaatattgtattaatttctactcattttaatttacttataatgttaattttgatatcatatttattgaattatattttgaactgtttttggtacataaaggaaagtgatattatgttctcagttctcatattttcttagtttgttgatgtatttttgttttatttattttttaagtgtataaatttttggagacattaaagattattggaggatcaatgattatcataaataagtttttcttaatattttaattgctatatatatatatatatattggaaatttagtttattttctataagtgaattccttatctcatttatcttttttggtattctgtaggttgtttatttatacttcaaaacatgaaaagttcacatattgcagaaaatttgaactcattggttacttctcagtcattcaaggtgaagcttcagtctaaatgatagtgctggattgactttacacgttgttctttctctttgttatgtagagtctgtttatttagttttgatttctattagggataagttgaaaaatacttttttttttgtatctattaattaaaaataccctcatattgttttcatattaaaatatacctacttttttgagtatattgcctaatataccctcactctctacttaaat

SEQ ID NO: 142872 - DNA, 889 bp, Cannabis sativa
  modified_base (56)..(56): a, c, t, g, unknown or other
gggtatgccagcgaggcatcctgttcgggctataccctccgagcagatactcaaanttgattccacgtgtcaccatcgtgagatgccacgttggagtgtaaaaattgggataacatttgccccccgagtctgtacgggactttcgaagttgcgtgtagacttcatctgagctgcttctgcctttggatggggacacgtgttgggcgcgtctttttgagactcgatgtgaggctgactgggcgtccgttcggttttcggctaattaatgctctgacaattaatatgtcaaaatcccattttctctcaccacggttgattgctgcacttgattatattttatttcccatattcgcttttagggggaactgaggcgtctgaggtttctttcaaatgattagctctttttgtgacatgcctataaatatcaaccagcattggcacataaactcattttcaccatccttctttgctaagtgagttcagagcgaaaagagaagtttttggcttcaagtttgctgaagtgtcttcatcgaagctgctcgttggtttgacgtcgcttgaatctagatatctgactcttgagtaagttttttatttcctttatgcttatttttgcatgtttatttattcgatgcacctttgacttcgctgtagaacattcataggaaaccctaggttcagaaactctgcgattgttctttgtcatggtttcatgcgattttacagtccataatgcttgctttctgaattgcataatgcctgtctttcatcttgcttattctaagcttgatgaaattttttttccctaactcgagaaaatttcaaacttcttgagttttgacttttctttgaacattcttgttctttaatttgttgagtactcttggtc

SEQ ID NO: 142873 - DNA, 773 bp, Cannabis sativa
ttatctggaatgggtcttttcttagtaccagatggctctagaacatcacccattactttcttagcaatacgcttcaaccccatcttaggatcgactttagatgaaatagttattggaggtttcgtagaaattttagtatttttcttagctggagatggggacttcgaaccactcctagtggttgctatttatataagaaaagaacacaatgggggcgaaagaacttacagatacaatcgagaaaaatggggatatcggcatagaagggaggttgaggaaaacgtgggttagggcttggagtgggtgatcgtgtgatagagagggtgaagaagataggaaagagaagcagagaataaaaaaaattaaaaaaaaaaaaagaaaatggaagttatgaaaagttggcgtgtacaaatgcataaaacatgacatatgcatgctaaaaggtcaaattgtaattatgaaacttttgaaaaactaaaattgaaaatgtaaaaaagtttaaaaaacagtttgacaaaaaagtaaaaaaatggtgaaaaagggcatcaactgtaaaatgcccaaactattaatccaaatttaaactaattatattttatataggaagaattttattttattattaatttatcaaatgaaataattttaacattatttttagtattttaaataaatatgtatataattttaataggttattgaaacacgacacgctaattattttttttagaataattatattactacgagaagcgcggtatagtaaactagtc

SEQ ID NO: 142874 - DNA, 722 bp, Cannabis sativa
aaaaacttttcctcttaaatttcaatgtaaatctaacatatattggatgtaaataagtttatcatatctagctaaggaaactaaacccacacattatttcattttgtctaaagaaattattaaaatatctaatgggcaatgataaatcataaactgaaatcaaaacaactacggtagatgaatacaaaaataacacaaaatacaaaatgaaaggatgctagaaaaagaaaatacctttcaacaaagattatgagaatttaatttcttaaaaaaaattcataataaattgtgatcttcgtactcaatgataatgctttttcttaaaatgtatatgtattatatataaaatgtaaaattgatgtaggaaataattgattactagatattgtcacttataaatagtgctaacaatcttcttagaggtttaacaaattttttagaagacttagcaaatattgtaggatgaccaagtaaaatcgattacagtggaagccaaatatagattaatagactttgatgattgagaatacaaaggtaaaagtcaactaattataagaaaaaaaaatatgaaagaacgtgaagtaaggaagtaataaaggttaatatatatgattatatggaaaacttctcagcctatattgatttattaaaaaaaaatcaaaatagcaatagcaataacagctgccttttttattcttttaatttattctcatctttttatt

SEQ ID NO: 142875 - DNA, 524 bp, Cannabis sativa
  modified_base (484)..(498): a, c, t, g, unknown or other
tgttggaggctaggatttttgctctagagagagaaatttgttagattaaattttggtaggattatttagctaaaattaatcaattataattaacgctttctaatcagaatattctgttgacattttgacagaaaaataaataataacattaaactaaaaattctgttacatagccacattttatataaaaaagaaaatatttttaaaaaaagtcactaaataatttctcataaactaagaatttgtttatatagtcacattttatatattgagattcagatgtggaggcaaacaattataacctgatcgagccaaaaaaaacaaatagaaaaattctttagcaatatatatataatatataaatagtagtaaattcttattttgaataaaatccaaataagtatatttagaaaagccaatagtagatgtacaaagcaaacatccaattgtattttttttaaatttaatgggatttattttattnnnnnnnnnnnnnnngtgacccatgaatttctcataaacta

SEQ ID NO: 142876 - DNA, 831 bp, Cannabis sativa
ccaattcggttttaagtctccaaatgcaaattttgccagtgtcccatttcgtaggtactcatacaccagcaaacgattctgtccatcattgcagtaaccaagtaaccgaacaagattcttgtgatgtgtttgagctattacattgacttcatttttgaactctttctcagtctcagctaccaaaaaatttagcttcttaactgctattacaatgacacttgaatccatatccaatatccctttataaacagttccaaaagctcctcttcccaactcatctctaaactcatttgtggctttctcaagctcttcataagtgaagctacgcaaattgaagtcaggtatgttttttggggatgaaatctttttacttctactactcttctttttgcgtatgaagaagaatcctacacaaactgtggctgccaacaccaaaaccgaagcacccaaaagagctgcaccaattctgatcaactcgttttgttttttcctcttctctttttctacataaggaattccatctaaggtgatattgtctttaagaattttgataaacgccctcgagttaagactcgagtcgaacatgccattcgagagagggagcttcttcttccaacatgatccttctctaaagatagaaacagcacacaaacaatctttcaagcaagaatctttgcaatcgtctccattaataggcctcaatgccacataagctgataagggccaatctacattgggaagctcctcaacatcatagagatcttctatgttgggattaagcttgtgagtaagctcgtcttcagcgcagccttgaatgaaatcgggtttgca

SEQ ID NO: 142877 - DNA, 824 bp, Cannabis sativa
aaataattaatatatgtaatattatttaattagagaagtgaatatgtttgggaaggtgtgacattgagatctgttgtccttattatttgttaagaagtggccatgtgggtcatcacatgttagtggaaaaaatatataaaccaatttttcaataactcatataaaaacaaataaataaaaaaataaaaaataaaaatatgataataaagcaaatgctaatccatcaaggattatcacctaccaaacaagttgcctaaaagagaataataaaaaagaaaattgctctattatcattccttgtttttgttccatatttctttttcttttttttttatgtaaaactatctaaaatatttgtcaaaaaaaaaaaataataaattcaatatgtaggaaaattcttaaatgtagaatatcacttttacttataattttttaataagatagcgtacattataattataaattgcgatgagtgtagtgtagattgggcggaaaattaataaaaaactaaactaacacccaaagtatagttaagtaaaaattttaatggtaaatttcatatatgtcttaactgcaaattacatcgcacttatgtatggtgcaaaataatgtgattaattatagttaaaatactaatttataaaataaagattgcaaaaaaaaaactccaataaacatatatactcataaaagttttttgcctactcctagagaaataagatttaaaaggtaaagattgttattatcaataatataaagaaaaagtagtaataaatatataatgtctgtattttttatacatagatgtaatatgttttttaatt

SEQ ID NO: 142878 - DNA, 508 bp, Cannabis sativa
taaggtcttaggcgaggaattaatgtacaaactggaacttagtgtattagcgagaaaccatatgtcgttaaaggtgaatagcgaggcaccagagaagagtgctgcataccttagcttgtaataagaaaactaagggtaagagttggatcggctcgaagaacaagtatgcgagatgaccatctcactatgagaagacttccttcatccaactaacaacagcgaggctcatacacctggcaagttagaagatttctttatacctgtgatcgacatacattgtcgacctcggaaagaagaatggtcccagctcaccattgggatcactataatcaagtttctgtcgagacatctccagattcaacaattaaagacgtgtttaatacacgatatttttgaccctataaaagcgggtaaataatagttgtgcgattttcaaaatcatacaccgcatttacatttcgtgatatgtaatcagatcccacgattttagggataatggctgtaaaca

SEQ ID NO: 142879 - DNA, 1292 bp, Cannabis sativa
  modified_base (642)..(646): a, c, t, g, unknown or other
aaattaaaaaaaaaaattataattgattaattgaataagactaatttaatcaattactcatgtaagaaaatacatattttgggacaaattaaaatactatgacaaaaattaatttatagtgtatatataatgtcccactgtactttctaaacaatgtgggattactacagaaagtaaacttagttgaataatcatattttcttggtacattaacatggtactgacaaaaaattaaaaaaatatgaaaaaaaaaattatacaaagccacctatatccttgtgtgctttcctttatattaatatatagattaatatatacatatatatattgatgattgattgattttttagtatttgacataaacaatgaattattcgcgaaattatatttattgtgttatatttttcgtttgattttttttaaaaaaaatattttgtttaaaaattaaacatactaaaaaaatatttatttactataatactttttatactatagcaaataataatgattagattttcataagaaaagcttatttatagattggatatagaaaaccacagtactttctaaacaatgtggatttttttacaaaattagtagattttttttttttcattagacaaaacttgaagctctcacaannnnngtaaaaatactatgaaaaaaatatgagatgccacaacatcacttttaaactctcctttatataaatatagattgatattgattgttttattttattaatcaacaatgacgaaaatagataaaagaatatcaattaaaattcacataggatgccacataaattattttaaagtttatattcttatttttaatttataatgtatattacaaaaagtattttttaagtaaaaaaaatgtcaatttttatctctaataattttaaccttttaaataatttaaactaaatttacaaaatataaaaataagaaaaatgataaaataataataaaaaaatcaatttattgaaatagatatgttttgtattctaaaattgatataagaaaaaagtaacaaaaaaattaaaaaataaataaaaaatgtagaaaaaaaatatgataaaaaatgctcaaatatatagtcataagtgtgtcactttttaacttttgaacaaattaaaatttaagagaaaatatttagttgtaaaaaatgtttttaacttgaacaaataacataataaaaatttagaatattaaaataaaattttaaactaaattgatttcataaatatataaaattaaaaattagtataaaaaaattaattattaaaa

SEQ ID NO: 142880 - DNA, 718 bp, Cannabis sativa
aattacaaagactattgacttatataagtttagacttcctctaaattattgccccaatcctttgtaatgcactttatgaatctcacttctgaaacaccttcaaacagcgaactcctttcgtcttaaaaatgtgagtgcttacttcctcccgaagtaaggcttaaacaagtcttctcccgaagaccactctcttgttcagtcaagtcattctaacaaactcttagacaaagtaagaacagatatgaaaaatactagaacctagatgaacaactaggttttcacaaaaataactctcttatcacaaataagaaaaatgcacaaaatgaaaaactagaagagccgatttgaatggctactctttaggttctatttatagaacataaccctatagacatccacaaagtcgaatctacagttgtacaaaattttcctaagataaacttgatttgcaacatcagaaacagattctaacgcatgaaatcagaccagaaaaggaaacttgccataaacgagttcaatcttgtattgggtattgatacctgtcaaaaacagtgtgtataatctgattgtatcaagacacaatcgaatttagtaagtaaaatagcaagagtcaacgtttcctttaaaaacaaactttccataagagaattgtttctcttacaagaagtttccatacaagaaaagtccagctgaaaatacatctttcctaacatagaaa

SEQ ID NO: 142881 - DNA, 636 bp, Cannabis sativa
tttccaacgaagaatggggttgggtacctgagaggaaatcaacaagttgcaccttgccctaaccaaggctaaaaagtaagtatccactagttagagtttggtccattggaagaattagaagagatcgaagtcgacccaaatgttccgaccaggatgctcataattggaaaaggcttgctgctcgaagtaaaatcaacattggtaaaatttctgagagtaaacctagacttttttgcatggtaacatgaggatatggtcggaatcaatcctcctataatttcacatgtcttgaatattgaccctaatttctggcctgttcaacaaaaaagaagattgttgggcaaggagcgagccctagcgctaaaagaagaggtagaaaagctatgtaacaataatttcataattgaagctttctacctggcctaagttgccaatctcgtactggtacccaagccgaacaagaaatggcgagtatgtattgacttcaccgaccacaacaaggcgtgcccaaaagactgctttccacttccaagaatagataaacttttggacgcaacagcaggacacgaaatattaagcttcatggatgcctattcggggtacaatcaaatcaagatgcatccatcagaccaagaa

SEQ ID NO: 142882 - DNA, 558 bp, Cannabis sativa
tatatatataaacacatatataatctaggaataagagatcatgtgggctatacccaaatttcaaaaaaaaaaaacacaaatattttaagtaaaaaaaactgtgacaaaagtaacataggcaatcaatcaaaacttttacaaagtttttatcaggggtgtacataaatttttataaaccgcccaaaccaaaccgaacctgacaaaaaatacaaactgaaaaaacccgacaaaattataaatcgcccaatctgttaattgggcgagttaaaaagaggtccaacccgcccaattaaaccgaaacaacctgcccaacccgactatgagtttactttttttttttttacatttcacttctattatatataatatattctatttttgcatttatctactattgtagtttgtagtactaattgtattgtgctaaaatatataatctattttgacatatgtatatatatatgtagggatataattttgtcccgtgatgtactttcacaaaatgtattctgtggtacattagatgggtctcagggtacattaaatgagtgtcagggt

SEQ ID NO: 142883 - DNA, 629 bp, Cannabis sativa
gcataaaacccaacactcatattattttgtaaggggaatatgcaatcaatccaggttataaagaagtgtctggatgagttcaaagatatctcgtggcttcctataaatacaggtaaatctcagatgtactttggagggattggagaagaggctaagcaggttataaagagagaattaaatctgtctgagggtacttttcccctaaagtacctgggagttcctttgaggccgactaaatggatatctgaagattgtagtgtgataatcaagaagatcaaacaaagacttctttgttgggcaactagatacttttcttttgcaggaagagcgcaactaattcattcagttcttcttaggcttcgaaattactggatgagtatttttatcctgcctcaaagcatcactaaagagatagaaaagctatgtagagggttcctttggggttggaatgggaatagaagtaagctccatgtggtaagctaggagtaagtttgcctgcctaaacattatggaggttcgggattcaaagaggggactaaatggaatgaagctatcatagctaaatacctttgggccattttatccaagagtgacttgctatgggtgaaattgatcattaatatttatct

SEQ ID NO: 142884 - DNA, 700 bp, Cannabis sativa
  modified_base (535)..(536): a, c, t, g, unknown or other
tccttctcccacagattgggcacctccacgattgagtacttcatcgctcgttctggggttctgaccattcccacgctgagttctcctcgggcgtgttgtccgcgtactaggaccaacgtcgggtcgagttcttcgggaacgtgtggtccgtgcactggggccacgctcaggctgagccctcctggaatgggtggtccttctggactgtggattggtagatcttttggagcccatgggctctttcccagaacgatgattagtttcctcatgtggggtgttaacattttctggattttcagccatgaaggagatggtttttcttcgaaagaagggaggatttttttctgagctttttcgcagaggctctcaatgaaagcaccaaactgttaatgcagattttcgttaactaaaattgagtcttacaatattgatctcacatagaaaaaatgaaagcaacaaaaaaaaataatatatgaacagagggtttttttacgtggttttgcagttaaaattctacatagtccacgagtcaatnntattcagatttctgattgtgttttttaggaactctcttgtatgatttttcgtcccttttcaggtcttgtttgtcactatttatatttacatagtggacagttaattacaaagttgaccagaatatgtttgcaacaattatccctaaaatcgtgggatttgatta

SEQ ID NO: 142885 - DNA, 616 bp, Cannabis sativa
  modified_base (379)..(390): a, c, t, g, unknown or other
aaattttattttgactaaaagtaaaattttttgtagtaaataaaaaaattaattttaattaatattaaactattagattttgatccaatgacgaataataataaaaaaattatgtttaatttaactactcaattaaaaaaaacaatcaaaaaatatttctttttataatatattaaaaatataattatatattaaatatttaattcaaactttatttttcttatttttttttatcaaaaataattatattatttttcgtcgataaaataacacatatgaaaaggaaagagaagagtacaatctatataaatatatataaaggagtattatgagacgatgatgtggcggactaatatctctccaaagctatttttctttnnnnnnnnnnnntctctcaattttttaatattttattaaagtataaatttacaaattaatattttactattattttaataaactttttataaaaatatctatcttaaattaattattttataaaaaacacataataatcaatatcaatatatatatatataatataaaggaaaacacaaaataagtttaggtggcatcttagattttttttctcctatttttaaaattttgtgaattt

SEQ ID NO: 142886 - DNA, 1146 bp, Cannabis sativa
aagattcatcaaaccaccacattatatctatgatatttgcatcttgttcatagtggtttcgacaagatcactctctgcaaagagaaaatatgccaatatccacttggaagtagaatcatatttattcgaacatatggatgtacatttaggggtggatatgagttatcgttaaattcttaagacgatcactctagattatacgttgaataaagaaatttgaaatgtttgagaaatttcatgaatttctagcaatggtggaaacaattaaggtaagtgattaaaaatcttgtgaactgatatgggtggagaaatatttggttatgcaattcaaagatcattaagttgaactttgaattgtatccaaacttacctccccagtaattcggattgcatactaatgaaaatgaaaggtctatgattagttactagcagctgcttaagtccttctaggaaaatatggtcgtatacttagtgtacaccaattctagcttcatggatgtcctgatcgtgaacttaagaaaagctaaaactgttaactaagatttgcatgtttgctagctattctaaagtaattaggggtggatcatcctatggtcatcaagataaaaaaagtgtttgtttcaacaaatactacttttttaagaatatgacttaatatgaaaacaaagtagcaaagtagaggagatattttcaattccaaagtgttctatcgtcttattctatataagatggtcccactgcctctgttttctaggcacaactgatgaggataataccattaatgttcctagaaagaaaagtcacggtaccttgtcatagtgggaggatttcaaggaacccaccctgttatgacttgggagacacatgtgataaaaatctattgttagtttaaacaagtaatggatcgtcagaataaggaactaagaagcaaagccaaaagaactatgattaaaaccattcagatggagtaaccaaaagttttctattacagggacaagaagggaaattttaaaaataagtctattcaatggacttaacaaaacttttcgatcctagtatcaacggtttgagattatttaaacctgtagcttgtggtatacctggtaatttacttactctagtggaagcaacttactttagtaagat

SEQ ID NO: 142887 - DNA, 801 bp, Cannabis sativa
  modified_base (476)..(493): a, c, t, g, unknown or other
tttttaattttgaataagtaaatatattattctattaaacaattttaataagggaaatttttataaatatgagaattgatggtatagtttatttttttatggcataaataaatattgtaaaaaaatatgggattaaaaaataattaaagtttaaaatatgggaaaaacaataaataaatttaataaaacttgtaataataagttctgccagaaaaatcaccggcaccgaaaaagtcactggtaccagaaaaattagtgtcgccgaaaaagtcatagtcgccggaaaagtcaccgacgccaaaaaagtcactggaaaagtcacctgaagtagatgtctcagatataactaaaaatagaactggttctataacataatgaataaaaataaattactcaaattggttataattaaaatatagccggttctgtaacataatgaataaaatagataacacgaaataactcaaaccggttannnnnnnnnnnnnnnnnnttatataatataatgaatacaaataagtaacacacaataactcaaactgattacaattaaaaaataaagaggaaataagttcctaaaacattgaaacataaattaaaaacaaaactagttccacaacaaaatatctcataacacataatacctcataaaatcgattataatttttttttaaaaaaaaatagggattgagtcataaatatgaaaataatagattctataacaaaataaataaacacaaataataacacacaataacttaaatataatataaaaaaccagttatatttatcaactagtta

SEQ ID NO: 142888 - DNA, 527 bp, Cannabis sativa
aaattaggggttgttagggtttagcttttgtgtagttcgaagtatgggtttcatttgagttgaatataacttcttgcagctggttttggtgtctgggattggatttatgcaagtttgaatttaaagacctaagctttgatctttaatggcatattatgattcagtatgctttttagggaattactggttggaatatattgtatattaccctaattaggtactctagaaggtttggttgcatttggtggagttttgaataagaaatggaattttttgggtgaactggtataaactgtctagccaattttaccagtacctgtaaaatcggttagtcagtttttgtagggttccccaaatgttccattttctcaattctcgtccattttagtgtcgtagatgggtgtttccttgtttcctgagttagtgtaatcactagagagtataaccgaatctagagttgtgggttcaggtttcccggattacggttttgatcatgtgatttacccagtttcattatgtgattaggg

SEQ ID NO: 142889 - DNA, 514 bp, Cannabis sativa
gaatacaagcatgtataatttttataatttttggtatctgtaactggttttttttttttcattaagataacaactctagtgaatatactcttattatattttctacttctttttcggttaatattatgctttagcgaatagtgaatgttttggtagtgggttgatggtctagtagtagattttctaagaagtttgtaactggttttaatattagtattgtattaatgatcaagtttttgaacttataaaaaatatgtaaaatttatatgagttttggtatatgtatagctggatttttcattaagaaaatggttttgattatataaaagatactgttacttaatttattgccttaacaaaattatattactattattttagcttttgtaggtttttttttaaaaaataattttttatagttacagttgttgaccgaggtttttggcaactagtaaaatattataatactattgagctgtaagaaagtgagaggaggatttttacgtggttgggg

SEQ ID NO: 142890 - DNA, 984 bp, Cannabis sativa
  modified_base (854)..(864): a, c, t, g, unknown or other
aaaagtgtaataaaataaagttaatgagtgtaaatgttgatttaaccgtgtgaagatatatatataataaagtgtgtattttgtatttttggtgtaaaaatttcttagttatatctacatatgctaaaaaattatttatatttctttatatgtaaaaaatattaagaaatatagatgacgtttggtaacatttttattttttaattttaaaaatagaaaaataaaagtaatttttttgtttttaaaaataaaaaagtgttctgtaactacttttgtttttaaattttaaaaactgaaaaacaaaagtgtgttctctaaccacttttgttttgtaattttaaaaataaaaaacaaaaatatattctataactatttttattttttaattttaaaaacaaaaaacatgaattttcttttttgaataaaaagttatgaatattattaatttttatttttagataaatatataaaaattataatataaaatcaaataaaatatactcattagcatctcaaaaaaatttaagtaatttgaagaaaaatattaaaaaagtcctaacatttgataaatttcactcattatcttcatcgatttgctctctatacatgatcagcaatttcatcatggacattagtcgtttcacgaatttgatctcttgaaatgctaaactcaacactatcattcagaatttcgtggatgttttttatagtagtatcttgtgtttcaatatgtcttcatctccatcaaaatatgtctttttccgcattctttcttatggaaatcacaatataattctgtatgttcaaatcatatgaaagcattgttggaaattttttaccaggatctagatttnnnnnnnnnnntgtttcattaacatcctaacatgaatttctaaaataatgacataaacacatgtaaagtttaaaaaaccttactgttgcccctgattttgtccaaaatatgtggaccaaccggatgatgac

SEQ ID NO: 142891 - DNA, 947 bp, Cannabis sativa
tgggtttgtgtccgagtctggatcctggtccggttacagttttgggtctgggtccatgtcctggtcctggtcctgttccagggtcttgatccgcatctagtttcggttcaagtttcaagtcacgaggtacgggttcggggagaggttcaggtccaggtttcagtcttgagttgggtttgaggctggctctggttccaggtttgggcctgggtgtaggtatcagtcccgttcaaagatctcggtccggttctagttcaagttttagtttttgttcccaagtgttggtctgggtcttggtatatgtccgggtcctgatttgagtttgagttcgggttcgcgttctggtctaagtcctagatgtagacatcgacaacgaatcgggtccaaccatcgagtcctggatcccaggtcgcgaggtgggttctatgtccaggtttgggtctagggtcaggtccccgatctagatccaagttctaaggcccaagttctagtcctagttttggggcccaattcataggttagcgtcccccatctatattcgggtcctaggtcccggtccaggttcgggttcgagtcctgtccaagtccaggtcccggtttggctttgggtacgagttcgggtcccagtcccagtctagctttgggtttcggttcctaggtccgagtctggttcttgggtcctgggttcgaccccggttatggggtctgggtttagatcctagtcccagtctgggtccaggtcccagtttttgtttaggtcacaagtcacaagtgctggtatggttcaagtcccggtatgggttctggtctgagtttgggtttaggttttggtcctgttacagtcctagtcctggtcctattcgggttctaggtccgggtccggtatcgggtcggacctgaaccagggacctgatcccagacccagactcgaacctagacatggatct

SEQ ID NO: 142892 - DNA, 986 bp, Cannabis sativa
actctactttatatgtattaaaggttgtatatgtgtagatgtgctctttttaggatgttgcgaattggggcttcaaaatatggtgggcatattcttcttttaaaggtttagggtagcatatgacatgaatgaaatatatgcgagtactgtgatttttgtctccttttaccgccttaattgtgtgtgaatttatgttcattatattattattttatgtaggtgatatgatttactttcttatctaaaattgcatgccgttttctatctgaaactatgtaatggtatttgcagacctatacagggaatatattgataggggctaaccctttcagaagactacctcatttatataataatcacatgatgcataacaatataaaagggctgcttttggtgagctaagtccacatccttttgccattacagattatgcatatgtgtatttttatgttgttgtctgtttcattttacttattagagtggcttatttgttggtgtcgttgatggttaaaaaacaattcagattgatgattaatgagagagttagctaatcaattttggtaagtgaagaaagtggagcaggtaaaacagggtaaaacagagagtacaaagatgttcatgcggtatcttgcttatatgggtggaagagctgcaacttataggcgttccgtggagcagcaagtgctaaaggtaaccatgtaattatttggttctaatgggtaattttatttgatgatgatgggtcaatcaggtttgtcttttaaatacaatgtacttttataaaactaataatagtttaaataattatactacttagttactaaaattgaaaaaaaataacagaacctcaaataacactaacatttacgtggctttggcacataacattcacctagtatatacatatatatatatatactaggcagatgttacgtgccgagccacgtaaatgttagttttatttaagattttttttattaaattat

SEQ ID NO: 142893 - DNA, 533 bp, Cannabis sativa
ggtttgggggtttggggttaagttattttacattaggtgtttggggtttgggtttggggttttgagtttggggttttgggttctaaggtttgggatatagggttttggggtttgggattaggggtttgggggtttgaggtttaggatttggggttttatgactagggtctagagtttaggatcttggaccaagtatttggggtatgaggctttaagttttggtttggtgtttgggttttagggtttcgggtttttgggttagggtttggggtttgggatttggggtatggtgtttttgtgtttggggtttataggtttgctgttttggggattagggtttggggtttagggtttgatgtttggggttttaaggttttacggtttatgggttttgggtttaggggttgggcttcgggatttgggttttagggtttcgggtttggcgttttgcagttttggcattttggttttggggtttggggaatcgttatgggaatgggctggggaatgggaatgggaataggaatggaaat

SEQ ID NO: 142894 - DNA, 979 bp, Cannabis sativa
  modified_base (906)..(915): a, c, t, g, unknown or other
gaaggagaaggtcaatgccttggagacagccgatcttgagctcttcttcgatttttggaaggctaatcccggagccaactttgactacttaggcaacgctaaggacatgtaccttgagtgctgcgcgacccaagtggcttatggtgcaaatgaggcggctgcttcaacctccaaccaggctgctttaacctccggtcagactgctgaggcttctcccattcaaacaactgatcctcctgctccagttggcctagaagaatcgaaccaagagcctgggactccagctgtttaaacacttctttttatctctttttttttatatatatatatcttatttggccttagggccttttctaagacatcatgaccagccaagaggtctttaaacatggaattatttttcattttttggacaacgggctgaccgggcaacttttaatcccggtattacgtgcttttgtcatccttaatgattttcattctctgtttataattgccgggaattgtgattgttttattattaccaaatgctttgtacaggtatgggtgccccccaagtgaccgagcagacgtatgactcttggtcaattgtctttcacaaatatattgcttatctattcggtgttttaggtttgaccaaaccttttgtatgcactgtaggcctggagagtacggtctttgggacagctgggcatcttttgtatagtcgccaggtgacaacttttgtactatgcactgtaaaatttttgtaaatattttgttaacatgatccttgtttaatataagtaaattatttttggtatttataaatagttaaataaagttttaattattcacgattttcaataaagtaattgattagcaatgagctgcaccattaagttaaaaatcacgttaacacgcctnnnnnnnnnnggtgttacaatttggtattagagccgccaggttatcttctgaagattgtcatgacatgtacaat

SEQ ID NO: 142895 - DNA, 644 bp, Cannabis sativa
aaatatatattgatagtggtaactggttactaccatatcatttttgaaataactaattaaccatttcgaattagttatgtgtaaaatttatagtacacacagttaccatcatatcactaataaagtatataatttgatagtagatgtgtgagaccgttaatctcttattataattttttagttaattttcgtgtttgaagacgcatattagattttttttttatggcgatgttcgttatgcttacacatttactttaacgaatatcactttgaaaaaaaattttgacatgtgatttcagatatagaaattgactacaatattataataaaaaattataattaacactctttttttattatttataataataactgattactgccacatcaaatgaaaaactaaaataaagaataaaaacaactcacttataattttttctattattttagaaaaacaaaatgtaaaaatatttactttggtaggattatcttttgtccatatttttgaaaatctatgtttaaatttatctattttttttttgtaaattttctttgggaaatttacatatatactgtttttggaccaaaactttacaaaaatactgggacacggcaaaaacaacttttttactgtcccagcccat

SEQ ID NO: 142896 - DNA, 922 bp, Cannabis sativa
atacggtgttgataggcaacattggttatttgtgactcggtgcgtttttcttcaagtagatccaaggacatacttagaagtttttggttttgttcttgattttagaattcatgcatgtgggtcgcaatatttacctctataggtaacattgcttccgagccaaacaccaatgaaaatggagtgtgtcccgttgttgttttctccatggttttatgggccagatcacttgtggtagctcttcaatccatcttcctttggtagcgtctaacttcttcttcatagtatccttcaaggtcttattaactgcttcttcttgcccatttgctttaggtcttcacactaacgagaagctcttaataactttattcctttcacagaactcagtaaataaatttccatcaaactgagtaccgttgtcggatactatcttcattagaatgccaaatctacaaataatgttcttgatgacaaaatcaagaacttttttatatgtaatggatactaaaggttcagcaactgtccattttgtgaagaagtcgactacaacaaattttgtgccacctcgacctgtgggtaacgacccaattaagtcgattccccatattgcgaatgggtatggcaaggtcatcactcttagctcggtgggtggtactcggggtatatgtgagaaccgttggcacttatcatgtccacgccaacaaacaacaataacacattaacaacaaattcatgtccatactaccaacaacaataatacaccatcaacaacaataacaacaacaataacaacaacaataacactaaaatctagtctaagacaatgataacaataatagagagaaaaaactcagataagacactgttacgaaaaatatgaacaatacgcaagtgtacgtactcaagtagtaaactcacacaggtg

SEQ ID NO: 142897 - DNA, 551 bp, Cannabis sativa
  modified_base (63)..(84): a, c, t, g, unknown or other
  modified_base (523)..(523): a, c, t, g, unknown or other
tttcttgctggaaacaccaaaaacaactagcaaatcctttggttcctagctggttcgaagagnnnnnnnnnnnnnnnnnnnnnnagagagagagagagagaagggaaagagaaagcttttttctttgattttctttgtttttctttttttttcttcaagtgaaaagagattatctaattaatctcttgctgaataaagagactaggtgtcaacacctaaggcaacaatcaaatcacccaagtggcaatttattaaaatgccccttaacttataacttaggcattttagagactaggggtaaaatagtcaaaatctgtaaccacgctcaaaccatgtagtttattccctccaatatacattttaataagaaataagattcgagacctacccatgtgatcaaactagccttcatcgcattttctattgtcacagagcaaaaattgtaattgcataattcaaatatcatagaaataatacacctagagtttaataaattctctggaattgagaaattataactctnatgcccatttctaacaatgggacccaca

SEQ ID NO: 142898 - DNA, 621 bp, Cannabis sativa
aaacatacaatccttaataatttcaaaagtcttcaacaaactgatatcagtgtcccatttaagcgagagtaaaagataccatcaattgaatagagttgtcagctcatctaaatgaaaaacattctaaaaaactttttattcgatcaagatgagaatccaacgttgtcccgtttaggcgagagtcaatcccattctatcttatgagcttctaccattgtttcatacttttgtaagtcttactaatagtcgtcaccattagggtgatccatactaaaaataaaacacttacaaataatacttatctttcaagattctactgcgttaaattgctaatgaacattcacccattagggatgattactcactaaaacaagaactatgtagaaccaacaatgaagatcgaatgccattataataaagcacattatttaaagtgtattttcttctaaaatttattttaaatatatatatttatttaattaaaatttcttgtttaaaccgaggtttcctgttcgaaaaatatcaagagtcgtgaatcatcacacaagcatcctgatgcgcacgcggggacagtatgcaatgcatactgtccgtacagctcgtaattttttcgtttttctt

SEQ ID NO: 142899 - DNA, 1773 bp, Cannabis sativa
  modified_base (43)..(61): a, c, t, g, unknown or other
aaacatgcaaacctcagttcgcgcttctagtttgccttctttnnnnnnnnnnnnnnnnnnngggcacccccagattctataatggcataaattaggtatacgactatttcatagttctacgggcgttttagggactactttagatggaacaacatttagaatgtcattagcagtctgtattgcatatccccaaaaggacgttgacagggttgaatagctcagcatagacctaaccatttctaaaagtgtgcgatttcttcttttcgcaactccattttgttgtggaatgctaggggcagtatactgcgattcaattccaagttcagttaaatgatctttgaactgtatatccatatactctccatcgctattagttcacaacatctttaatgttttacctaattggttttgagtcaaaggatgaaattcctaaaacttctcaaacgtttcaaatttcttttgcattaggtaaagaaaactatatctagagaaatcgtcagtgaaagtgacaaagtactcataacctcctctgccttttacatttagaggtccacagacatctgaatgcactaaccctagaggttctttgacacgttctccctttgcagagaaagaatgcttagtcatttttccttctaggcaagattcacaaactggtaattcacccaagatgaaattttttaatggaccatctttggttaacctgcaaagtctatcatagcctatatggcctagtcgtaaatgccatagatatgtttcatcattattatcaatatcttttcttttatggtttttaggtttaaccaatattgaaaagttcgttattaagcgcaatttgtatatctggttgtaaaacataaagcccttgttccatgtaagcaacacataattgaaatcctttacgagaaatagtgcaaataaaactcgaaaaattcaattgataaaattgtgtttgtaaacatgaaacacttatcaagtttctactaaaattcggaataaacaaaatattgtctaaaactaaaaatttcttttgaaacttgaggcgagcttttcccttagcttggaccgatactaattcgttatttctaactttgagcttcaactcccctggatttagataatcccaagtttcaagcagctacaatgaagaacaaacatggttagtagatccagaatcaacaaaccaaatgaatttgtcaatctctaaaacacatgattcaaaaacaaaagcattaccttcgttccaattgtctagaagtctgggacatctttcttcctgatgtcccttctcatcacaatacgaacatagaagagtacgactgcccattgttttagtccttgaacttgaagaagcaacattgttaaaagtatcattctcaatcaccctcttcctttttcgcatgtctgcaaaactggagggaggcctccttgcaggtaaagtccgctcgtaagcacgcaattctgcgtctagcttgtctacgttggatgagttaaaattgttgatcatgtaagatacaacaaatctattatactcaggtggaagactattgaggatgaattgaacccattgttgttttgatgaagcaattcccagtaagttagctttctggaacttcagattcatcattattaaatgtgacttaatgctcttactaggagataatttcacattatagagttcatttgcaaaggcatgtagagggtgacagttgggaggagggtagtttattttgacactacaaatatcaataaacagaaataaatcatttggtt

SEQ ID NO: 142900 - DNA, 1618 bp, Cannabis sativa
aaatctgattatattgaaaagggttttatttagggcacaaaacccaacatcttgctcttgtttggagcctatgttgtatgttgtttaaatctgaattttatgattcatctatgttgggatttagagcttaaaatgtgtgtgatagctttctggtatatggattattattgtcgagtcgttgcttgtgtttgagcatgtttttgttgagtttgggtgtgttttggcttgagtttcaaagttggaaaaatgggtcttctgggtttggaacccaggggccgcgacgcagctacttgggcgccgcggcccgcctttggttgttgtcttggcattcgaaccaaggtgtcgcgaccccatctggggagtgtcgcgacccgccttcgtttttgggcagattcaaacgtgttattcgaatccttataacttttgtgattcaaactccattttcggagttctttatatcgttggaaatctcgttccgagatatatgtgaatgtctatgagttgaatgccaagtttattttatgtgaaagtggaattagggattaaccctatacttgtaaatcccagaatttgtgactaggattattgacacttggtcaggaacacgcgagggatttggaatctccacatttgcaggacatcaggtaagataatagttgcacgtagagttatgcgcggtggtgcttatgttgaaaatgatatatgtgattaattggaaaccgagattagggttattaccctaacatgagcggtttaatgtcctaagattattaccctagtggattgctagtatgtaattgttatgccatgagattacaatctatgtaaagattcagggttatgcgttcaaggcataatcaagttagactcggtaaccataaccgagatgaaccagtctaaggcctgattgtatatagacatgtgagcgtaacacgtaggtctatgccacatagacataaataggcatgtgagtttaaccgagatgaaccagtctaaggccttattgtatatagacattgtatgatatgttacttatgattatgaataatttatattgtcttgctgggcttggctcatgggtactctacaatgtaggaaagggtaaatctgtctctgatcagcaatgagtgtgagagttgggcgatgtatgtacatgttagggcaacactagaccaagcgggttggggtctaccagtgttgaactattgtatctctggtttttccgcttaggtcgactaatggaaggacttgtaatactttttaaaatatttttaggatctcgaaatatgtattttcgtttgtaaagttaaagttattacaagttttattttcattctatttcattaaaagtttaaatttcccgcgcttatctttttagtaatcctgattttaggggattagggtttcttaataacaatgggtagtgtgcctaattattagggcattacaacacagttcatccatttgtgcaagcacaattggatcaactgaaaaaatagggtacaagcccgtcaacatggttaaccagttcatccattagttttgtttttgccatttttctcaactattttatctatttttaacaaataccactttttgcaacttcaaccctataaat

SEQ ID NO: 142901 - DNA, 652 bp, Cannabis sativa
  modified_base (33)..(39): a, c, t, g, unknown or other
  modified_base (68)..(74): a, c, t, g, unknown or other
  modified_base (102)..(108): a, c, t, g, unknown or other
aaataatgtattttaattaatcatttattttannnnnnnttaatcatttattttaataatgaaaattnnnnnnnatttattttaataatgaaaattacttannnnnnnttgatccaaaattaataaaaaaaattattttcaactttaaattaattttcaaataataattttgaaaatccatttataatttaatataaatttcgaaattatataaaatatattaaaataaatttctaaaaaatatctaatttaagttattctaaaataacaaaattttcaacttaaataatttttcaaaatttaattaaatattaatttagtatctggaactaatcaccttgatttgaaaaatatccctatttaagttgattcaaaattaacaaattttcaacttaaaaatattttaaagaatatctgaataactaattttcaagaaaattcaacttaattattaatttcaaaatattccaatttaagttgatccaaaattagtttaaaaaactaatttttaacttaaatatattttccttgaaaatttaaataattaaatttcccaaagaatctaattagttatcacttcttttctttaattaaatacagaaaaatacatttagtttatcttgaatttgaatttcattaaactaagtgtgtt

SEQ ID NO: 142902 - DNA, 555 bp, Cannabis sativa
ttttttggttttgaaaacaatatttgtaattcccttcctttatttaattgatgcagccaagctaatttcaaagcttatgttgttgcacatgcagataaatcaaaagcatatgtgagtgacttggagtgtgttatggatcttttatttttgatcttttatttagcgttctttacttaatcgagagtcttaattttgcaggtccttggtagttttaaagagcattttaagctgcttagtgaggaagagattgagaattgagcttcatatgaagttgaggcttccccttcgaaggttggtgttagagggaaaatgaagaagttaaaggagacattatctgttgagtcaggaattgagaacaatgaagggggtacgggatgttcaagtatctagtcattgctccttcgaacgtttgggtagtttagtcccacttctcaatgacgctcaaaaagaaatggtctgaaatgccggtttctcaacattattaagggaggatggcccgtacattgatgctaagatagttagttggcttatcgatcacgtggatccaaccacttc

SEQ ID NO: 142903 - DNA, 575 bp, Cannabis sativa
attaaattctttttaccttaacacaaaaatataattcttttactttcaaattttttcttatatttttttttaatattttttatctcctacaaaaaattaagagcagtcttcctatatctttctctcttttacatgattaataaaaatagtatttttttttttttatgattaatagtttattttgagttttatgaatgatttgtatattttaacaaggttcatgtcttgttatctttctattaatttatagctgtttttttattattattattttatagttatttttatgttgttgtttaggtgttctatagttcttaattttttttattacttttatgtattttttttgtataattgttatttagtttatgtacattttttatggtgtatatttttagtttatttcacataacttttttgttgatatttttattatttttatgcatttatagaggaaacgacacgtcgtacgaagatcaactcctaccccagccaggtcaagaagacttgtttttctacatgtgggcagggacggagggactttagcctatatgtaggtttaagccctcactcaa

SEQ ID NO: 142904 - DNA, 540 bp, Cannabis sativa
ggacatgcgattcgcataagggaggccatttcacctgttcgcgcatcccctcccgtgttaagaaaagggaaagttgttttatctgaaataagatcgatattaggtgatgatggactttcgagtcttgtttgggcagtcaccttgcatactattttgtcttgtttttgagcttcttgacttttatgccttatgttttttatgtccgttatctctaaccatgttgtttttctttctgtacagacatgtctcggcagatgcttgacgctccgaagaagagaatgggcggtgaggggtcctcttctaaggaaaagcagcctgctggggtggtcattgatctttccgaagagttaactgctacaaaccccactacctgaaaaactgctaagtgcaaggattctcggggaggaagcttagacaggtctggaccaccaaaggttgggtatgagctggttaggagtgaacctgaacgggtgcgggcacctactccacctttcccagtgagcaaccggctggttcctaaggtcagtgagcaactggctg

SEQ ID NO: 142905 - DNA, 950 bp, Cannabis sativa
  modified_base (44)..(44): a, c, t, g, unknown or other
tagtatattatttatttaagataatatttagtttttattttatnatatataaattttttggtatgtatgcatattttaatagtgatatatatataatttttttcacaaaatatatatattttttgagtattaatttaatattgttataatttctttgttttatacccgaaatttggctagcacatcaaaggaggacatgtgtcaaactgaggaataatacgaatcagcacacgtaataataattatatttgaaatggaataactcgtcaaatgcgaaattgacagagtatatttataactcgattgactgaatagtcttaggcgagataaaaatataccaactgttgtctcgtgcattaacgagaaaccatacaacgtcagatgtacaaggcgaggcatcaacctcgctatgcattaggagacgagacatggagactggtaagacacttagtgtataatacaccttatttagactaagtataacattcaggtaaatccaaacaactaatagtgaagcacctatctctccataggaagatgcgctcatggtatcttcactaaatagctccgtacatctttcaatgagatccacagctccgttgagtcagctctctcaaatagaagctgacactcaaatgatgttggctgctagagttcaccttatcaccaagaactgtgattgtcagatggagcgttatgtcttcaatagcataaatgacgagattcacattatcaacatcgaagagacataggaaaaactctagctcgctatgacggttattgttgttatgttcccaacgagattttccaagacgatactcgttacaacgtatttaatacacgtttaaattgacacggtgaaagcggacatatcacagctgtgtgattttcaaatattaaccacatttattttacgtggtatgtaatcaaaccccacgatttcaggggat

SEQ ID NO: 142906 - DNA, 913 bp, Cannabis sativa
aaaaaaaaaaaaaaaaaccttgaggagttcttttattcaagaaaactttgtcttttctattgatcacttcataagatgcatcaatttgttattaagtacatttgacactacaaataaaaaaaaataacgcataaattctaacaacaataaaaagaatgagaaattactataaataaaataaaataaaagatataagcacttgaacggggaaagataaataatttttcaaatatgataacaaaagaaaaaaaatttggacccattccatttatcacataaaaatatgaaaatataaaaaattaaaaccttagcaatatactgataagaaagctaagaaacaccgtatgcaatacaaccaatataaaataaaaaaggaataaaatatcatgatattaatcatcaataatgggaaaaaatgaacatacaaattaagaaataagaacaaacaaaaatacctgtaaaagactttcattgtcttattatcttgtttatatagagaaatcatagtttttggcatgcacattgacttcttgtagaaaatgaaacctaggaaaatagatttataaaatttgggagtctttttaagaaatgaataatcttcttcatctttaataatattgaaataattaggagttacaaaatagaagcctaaaagatatttggtagaaattaatgaactatagggagtggaagagtttttttaattaattaaaaaaaattataaacatttataaacattcatccatcagtttttaatctttaattagttattaattaatagttaaatgggataattaaattttcaactattaaaataaaagaaaaattgagaaaattagaaattgggaaagaaactcattgaacttgccacatcaaactctctaaaacactcctttatatctattctatataa

SEQ ID NO: 142907 - DNA, 577 bp, Cannabis sativa
aaaataatttccaacattaatttctatagaaattaattgttgagactatttgcgtattattggtgatattgttgtgtattgtgtattttgattgttcttgaaatattgaggagttattttggtgatttgggtgatgttgaaatattgtggtgtgaattttagtaagattgaaattatgggaattgaataaattaggggaggtgctgtcaaaatttcccgaaaattttgttgtgtgaaattatttttttgccattatgggaccaaagagaacaagggcaaatgaagagggtggttcatcatccaatccttctcgggccaatcgaagagaatcttttgataggacccgatttgtaagtgaagcggctcaagaacggttccttaagttgaaggataggccctacattgaagaccaggggattgattacacgaataccccgttgagacgccaaccaaggtttgaaacaatctagagtcaaattgaaagtatgaactggggtagctttgtggatgtcaaagaccgagccaatgtcaccatggcttgtgaattcttggccaactggcctgaaaggaaacatgg

SEQ ID NO: 142908 - DNA, 888 bp, Cannabis sativa
acattccaactgcgagactcattgttctcggcggggccgcgtagcagcacccgccattggttcgtcatcggacattgaaggaacaacagcatcttctgaggcaatggctcttgcacgcttgagcatggtgcgcatagagcctccaatctgagcattctgacgcaagaaagttggcctaacaactgagggaatagcagcagtgggaggagggcaagaaacattgataacaagtccagtttcctttcgagagggtcgagtagtgggaacaaacataggggcttttccttttcctttgtcaatattggtggagacggagatagagtcagttataataggggcggaagatcgaacagggaaagacggcatagcatgggtaatagcagtgttattggattggtcagtggatgaggatgaaacgaactgaggagattgagttgaactccgaggattggggcgagattgaggagaatcaacgtggagaaattggtcaacagcttgctgcagatcttgtgagtctggagtagggtggagacgaggaaaaaactcctcaaaaggtgttgaattggacagctgaaaaggatttttcttgtgtggggatgaaggggtggctcggagagtatctttgtattccaaaagtggagggtgcgggaaattgtcacaacggagaagatatttggagcatttgttgtaagtatggtcgagcaaaccacagaagtaacagaaattgggaagaccttcatacttgaagctgacccatcgtggctcagaaatgcctctgaacctaatggtcatacctctacggaggggcttagtgatatcaaacagaacacggattcgcaggtaaggtccaaagttttccacaagggagagaggataaatttccaggag

SEQ ID NO: 142909 - DNA, 1652 bp, Cannabis sativa
  modified_base (299)..(300): a, c, t, g, unknown or other
  modified_base (1411)..(1419): a, c, t, g, unknown or other
aaaggccaggccttagcagactttgtggtagaatgcacaggcaaggaagaaagcatataggaaggcaaccccgagccagtacaaatactcagtcaagtaacaatgaagacaaagcgactgggaaactacatgtggataggtcggctacagatcaactatccagtgccggaatcgcccttgtctcacttgggaggcaacacctgcacgctgcagtcaagtttggatttaaagcatccaataatgaggcaaaatatgaagctttaatccctggtctaaaactagcccgggagataaaggcnnaacatattgaaatctgtagtgattcacagctggtggtaaatgatgtatcaagggaatacgaggctcaaagatgatagcatatttgagaaaaatgattgatagttccccaaactggatgacgctgatagtgacctacctcaacactgtggaactcccagataatcgaaatgaagctcgaaagatgagaaggaaggctgcatgatacatcatagtagggggaattatgtacagacgaggattctccatgccattgctcagatgtgttacccaagaagaagttgcacgacttttgtctgaggtggaagatggattttgtggaaatcacgccgtcgggcagagtttttctaagaaaattctaagccaaggttatttctgatcgacaataatcgaggattccaaggcctatgttaaaaaatgtgacaaatgccagagatttttaaagataccgcaagctcctcccaacgagttaactcagatgcaaagtctctggccttttgccatttggggaattgacctgattggacaattacccaaggccaaaggttgagtgcagtatgtagtggttgcggttgattactttactaagtggatggaagttgagccactgacaaccattacatccaaaaaatttcacgactttgttgtgaagaacataatctacaggttcagatttccgtacaaaatagtctcagacaatggcaaacaatttaacaggcagtcctttactgacttctgtgcgaaccatggtataatcaaaagtttctccgcagtagcgcatctccaagcaaatgttcaagttgaagcagcaaataagacattgaaggataccctaaagaaaagacttcaggacgctaaaggaaactggccggaggaagttcttgaaattctattgtcgtaccgaacaactgtgaaaacgacaacctgacagactaaatttgccatggcatatggataggaagcaatgctgcccgtagaactcgagccaccatcccacagaagactgacgtacatccaagaaccaaatcacgtactccttgtcaaatcacttgatgaaatcgaagggacgcgaaccacaacaaacttaaagctgatggcccatcaacaaaaagtnnnnnnnnntttcaacaaacaagtgaaggctcagaaattctttgtgggaaatatggtcctaagaagagtatttctaaacaccgaagacagtacgacaggtgtactcggacctaactgggaaggacaataacaggaagtcaaagttctcgaatcaggcgcatacaaattgggtaagtatgatgaaaaaatgcaaattgttttggtaccaaggtattggaatagagaacatttaagaaaatact

SEQ ID NO: 142910 - DNA, 1773 bp, Cannabis sativa
tttatgcaactataatgcaactgtaatgcaactgttgtgagacattaaaaattagaacagtgtttccacgtacgtcactctatctacatgtttctttatgatttaatatgagtaaattaaccattagaaatttggaaaacaacaaaaatacaccaggataaacatattactatagtattgatgtaatttttttgttggattatacttgagttggattgtttgggagctccagtttaactttttgagatctgtctttcatggatctaaaaattgaagtcaggacattagttttatgcaaattaaactagatttccagttgaattttagtttagtattagttttttttacacttttttttattgaattcgaaacaacccctattttgattgattatagtcgtcttctcaagtgaagtcgccggaattaatggtagttctcattctagttgaattttcttttcggttgcgttgggttggttgcgcgatggttgcccgatagtttcctaggaagcatggatcttaagttgaaggtgtgtgtaagtggtatttgtgtaattttttgtatttaggctgtatatttatttatttgactagctggaagtatttttgtaatattgttactttttgttgtgatattttacacacgcaagtgtacgtatcgttaacaagtagtaaactcaccaagagtgaggtcaatcccacgaggattgtagttaagtacattaaaattaaacttttacttctatttggttgaataaaaattaagaaaggattaaaactataaaataaaaaacagtgaaagagtaagcaattaaactaataaggaaattaacagttaataaaaactaaggttttgactagggctgaacatttagaccccaaacccgaaaaacccgaccacccgccccgacccgtcgccaaaagaactgaaaacctgaaaactcgtgtggtcgggtcgggttcaacccgaaaatacctcacacgggtttcaggttcgggtatgagacatattgatcttttcggtcgggttgtaacccgtaacccgagatgtatcttctctaaagtggtgaccgtgactttgatagttgattgattgggctgggcccttgttagttgttactgggctgactttgtttattattttttattttttgtatgtaataggaacgtatcaatgatacggtatcattatcattgattatctcaatacagttatatgattttatatataatttttgttttatatatacattatttaattaaattttatataataaattatttttatataatttttattaaaataatcataatatcatattatcataatcttacctaaacggcccaaacaatatgaaaaataaaaaaaaaatgatatttttaaaaattaaattttatttcagcccataaattaaatattcgggctcagcccaataagacccgaacccgactacgcccaacctgactacacccgacccgttacccgacatacccgagcacccgaaaaccaggttcggttacacatttccaaaacccgaggcccgataacccgaacccgactacccgaaaacctgaaaacccgacccgtgtgcagccttagttttgacttcaattatttctattgattatggcctaatatgattatctccttattatcaatttctatgtcataacaggtttactaaggtaatttatagtcttctcagatatataaatctcaatcacatgcaaactttctacactcgtgataaatttaacatgcaacaggcattaa

SEQ ID NO: 142911 - DNA, 811 bp, Cannabis sativa
atagagtcatgttggaaatagatagcttggtgtgtgtccaagcgattcagagcggtattttataccttcacaatttgtgttttataaaacgatctgcaattaagttagctcattacttagcaagagactcttgtttctctacaggttgtgtgcttcagatagaggaatgttcctctaaagtgtgttttattgttttgaacgaatttatttattaatagatcttatgatttttattccaaaaaaaaaagtaatttagaagaaaaaaaataaatgtatttttaagtgtataataaataattcaaatataaaaattagaaaaatattttggtgagagcattagtttcacttttaccataatttgagatatagagaaattttaaaccttattttgttatatgaggtgtatattataattataataagcatttagtttttagaaaaatctaaataatttcaaacatttagttgtacaagtgtctgttttattttactggcatggaacgaattattttgaactttatttttaataccgtaaagtattcagaatttctcaaaagatgtacccttatctattctggtatccgaaataattttttagtcaaattttttctaatgttcatgtaagttatagttatttaagacatcatggaaagttttaagaaattcaagaaaatttaacacgccaaatcagtggcggacctagaatttaattggagggtggacgcaaatttttttcatatataaaaatatttcaaaaaataagtaaatataaagaaaaacacaattcaatatttcaattcccaactaaaaa

SEQ ID NO: 142912 - DNA, 1517 bp, Cannabis sativa
  modified_base (710)..(717): a, c, t, g, unknown or other
  modified_base (1272)..(1274): a, c, t, g, unknown or other
accaaaattgtaacgccctaatgctaaggcacgctacagtgcattttcaattactgtgtaatctttgctaataaaagaattttctcaaaaaaattgtcaaattgaaacttttatattaaatattaaacttaatattatatcaaaatatttacaagtgtcgggatcccgttttcaaacttctaaaacataatattccaaaatacatattaatcaagtcgcacaacgactacaaaataaaatcccagatgtcccgagaccgaacactccaggtcgcactactttgacatgtacaatctcatcctagttcaggttcattcatgttcagcttttgcctttcctttaccaacacatggaagcagaactctgagtcgatagactcagtaagaaaagcatataacatatcatataatttccgaattttatttaagctcccatacacctatttacaaggctcaacagatgagtaagaacgttccataccagggtatagccactataccacatatactacgtacctccctgtacgagtgttggtagggtttgtttcataccccgagtacctctgagtgatgtaccacacatactcagtacctcaccgtacttatgctggtatcacggtacgctcagacaacattcactataccaatacactctataccttaaccatataagtgttggtagtgcaattaacattttaagcatgcatatannnnnnnnatatacatacactcagatattcatatcacacactatattcagttcttaacttctttccagattcaagtgtgctggccgacctgaacggaaaatctcgtgctagatggatgcccttggctttaagaacccttgaatcactactgaatttctagaaaaacagctaggaatgagttggttcttccttggtttggtgctgcacgaagagaaggggagaaaaagaaagagtttctctaatttttggctttattttccttttaattcttcaaaatgaaaagagttatttctaacttaatctttgctgaatttgacttgctaggtgtcaaataattgggcagccacctaactctcccctttacaaatgactaagataccctttaagcctaaacttaagcatttaaaaattagggctaaaatggtcaaattccacaaccctgcttaacctcggtatttaattttctccaaaatatttcccactaagaaataaggttctaaacttaccaatgtgatcaagctagccatccatcgcgttctccgttgtcgccgagcaaaaattannnaaataacatatttcacatataaatcaaataatacccctagagtttaataaaatctctagaattgagaaactgtaactctaatattcatttctaaatattgggatccacaactaattaaattcataaataattataaaaataacaaaaattagaggtaattgcctttactaatccatattactaaagcggtcattacaactatccccccgttaaaaggatttcttcctcaaaatctaacctgaa

SEQ ID NO: 142913 - DNA, 578 bp, Cannabis sativa
  modified_base (37)..(38): a, c, t, g, unknown or other
catgcccacccgtaacaagttagtcctcaatcatagnntgtaagactgtgaagaatccaaacaactgaaggagttttgggctcagatcccggtgatactctgcgacaaatgagttgactactctattcaactaatgttatctttgactcttgcctatcgggacaatgtgtataattatgttggaaaccttggaaaataattcatatgttttattttggtatttttgcaaacatatttggtttacttgttattttttgaacttgtgtatgaatttaattgaaccaataatttatttctgttttttaatatttttagtgtcaaaacatacaacccacaccctcgatcctcatctagtataagcctttaggaatgaactccaaagtgtgaagatgactcctggtcagagtatcacttcacactttctcctgatgaaaatgaaattctagaaagcagctatggtgggaattgttttatctagagagcaaatagttcattttgttttcagcagcttaccacctgagtttaaccaattcgttgttaacaattggaactcgtccaacatagacaagttggacgct

SEQ ID NO: 142914 - DNA, 541 bp, Cannabis sativa
  modified_base (132)..(140): a, c, t, g, unknown or other
gtcaagaagcttaaaaataagacgaaatggcatgaaaagtgattgcccaagtaaggatcaaaagtccatcatcacctgacatcgctcttatttcagacataacaactctcttttccgaacacgggaggggannnnnnnnnaggtgagatgggctcccttatgcgaattgcatgttcaacacgcctgggcgggggcggaagtttcttcctcctcttgagcggagtcacctgttcttccttagcctcatcttcaggattcaagggctcttgagcatattgcttggcccatgcacctcccttcaacttagcctcgcgcttcagttgaatcagctcattctccgaatgagctagttcaactcgtccagcatcaaatttcctcttcctccccttcactggtttgggaatgaagtcctttggatagagcccgtacttcacaaagttatcctcggagattaattggatgatattccagtcttcccccggtagtcgagcaagcttttgagctctatcccggagagcaagagtgaggggagggcagtgat

SEQ ID NO: 142915 - DNA, 642 bp, Cannabis sativa
aaatgtttaaaattccgtaaaactgtatttttgttgttttttttttgttatttttgtgcatttgtgaaattaaccctttttttttgaaactagaacgaaaatatttcttttatgaatattgtaaggttttgatattgtactattttattttatttgtacaaaaaaatggactatgatttataagaaatattttaaatgtatgtttattaaaattttatttatatattatttaaactgtatattaatattatccctttttttaatttgcaaaaaaaaattataatatatacgaaataatatatatactttattaaaatttaatttatattaatgtatcgaagttattttctttgatgaatatcatatttttttttcatcttcttttgtttgaggattttttattttctttaagtactcatcattgaaacaaaaaaataattatgaggacctttaaaaaaaggattaatggcatgaaaagacataaattgtattttatttgcagatacatgacattttattaaatttaagcatatactgaataccactcatcttaaattcataatcggtatactttatacattcaaataacaatatgttttttttcttaattgttgtctctctcctctcttttaacatatgttg

SEQ ID NO: 142916 - DNA, 647 bp, Cannabis sativa
atcgtcacaatagcttcctctccttcttcttttactttttggggctaatctctgataattttcgtcatgaaatgcgagtctcttaaatagaaaatatggttgctatctctgaatggtaacaattcaaaactgaccaaaaatctcgtgtttcgcccatggtcgcgactataaagcctagtcacgaccataggcaaaaatgaaaaatgcatgctctctgtctggcctcctagtcgcggcccaggtcgcgaccatgggcataactggtcgtgactactgacgcattcttgacagcttcagcagatttttctccaaaatgcctcgtcttttcaataattgatacagtttgaactctaatgcctcgaggacctgaaacaaggaaaatcaagcgtaaaaccattctaaaaggtaacattaacagagaaaacacctatgaaattgacccagaacttaggctaaaaatagcctaacagttttctttagacactcttgctgtagtgcctaagccttcgtcgcggtgagagcgtgatttttgaaattcaaaattttatttttaatttaaatcaaatggatttttatgggatataaataggacttcatggttcgtttctaagactttaagactgcatttttgagagagagagagagag

SEQ ID NO: 142917 - DNA, 1063 bp, Cannabis sativa
  modified_base (147)..(165): a, c, t, g, unknown or other
tgcatcttatttttcggtagcccatcacaaaagaacttcaaggttaagcgtgcttggcctggggcaattttaggatgggtgatcttctcggaagttttcttaagaagcgtgcgagtgaggacgtcagtcatcaatccatgaagcagnnnnnnnnnnnnnnnnnnntataagagccattattctgtgggtgtaagggctcaatagaggcttgaagcggggacgttacatgttttaacaaggttgatatcttattattttttctattgatttataacagtcttttttgttattttatagttattttaatattgttgtgtaggtgttttatagttattattctgttattttatgttttttttttgtacaattattgtttagtttatgtacattttttatagtatatatttttagtttattccacataattttctattaatcatatattacacattatattatatatttcattttaaaattataagatattattatttctattatcaatgtaataatttatttaacttttaaaaaataaattatcattttaactgtcaataactcaaaaagaaaaagaaaaaaaaattaaaagtataaaattctaacaacaaattccatgaaaaaataatatagtagtataaaaaaaataaaattgtcataaactaagaaaaaaattgtaatacaaaaatatattaaaaagttgatattatttcgtatattgcaattaggttattgttttgttgtttatagttattttttttattattatttttttatgttgtttgttacgttattcaagagttgtttttttttttattttactgaaaaataatatttttgtaattttaaaactttaacacagtatatttacaacttagtataataaaatgtaagaaaaaaaaagagtgccacaattcaaatgtagaaatgataaaaaaaaatatttttgtcagtttccttttagggatattttcaaaaatatgggaaaaataaaccattttatgataaatatggcaagaaaactaaatgccacaaaatatggcattaactaaccaaccaaactaca

SEQ ID NO: 142918 - DNA, 680 bp, Cannabis sativa
  modified_base (647)..(655): a, c, t, g, unknown or other
cacacctttccccataaagataataccgccaaatcttcaaagaaaataccactacggccaactctaggtcatgagtcgggtattgctgttcatttttttttcaactgacgggaggcataagcgataacccggtcgacttgcatcagtacacaccctaggccttgcctggatgcatcacaatacaccacgaacttttccttgtcagaaggcaaagctagaactggaactgtactcaatctctgtttcacctcctgaaaactagcttcgcatttatctgaccatacaaaccgctgattatttttagtaagctcggttaagggtgttgagatgttagagaaccctgctacgaaccgacgataataaccagctagacacaagaaacttctaatttctgtcactgttttcggtctaggccaatccctgactgattctatctttcctggatccaccttgatcccatccttactaacaatgtgccctaagaaggacacttgagatagccaaaattcacatttcctgaacttggcataaatcttgtgttctcgaagccgttggagaacaattcgaagaagtacctcatgctgctcctctgattgagagtacacaaggatgtcatcgataaacacaattacacagatatcgaggannnnnnnnnatactctattcatcaagtccataaa

SEQ ID NO: 142919 - DNA, 650 bp, Cannabis sativa
taataggttgaacttagtattaaccttctccaccatcacatttttttactcacaaaattcatgattttgtgaattcctcatctatatgttttactcctcttaaggtacaagattcttcactatttggaaattgcatttatgttatcacagagttacactagcaattattcaatgtctagaattaggcaaaaaaattgtatcgaactttctgagtctgaataactctctaattgcctttagggcaaccttattattcagttatactggtagagttagtggttttgaagtggtttttattcttctccaaaattcactactccgcccttagagtaatcaccatctcttaattagactttctagcattattgcaagtcaaaaaacctaatttagtgtagcctaagggttttaaaataccactcttatctactaacatatagttccgctcatctattttaggatatgtttaattatcttccaatatttcttttctggatttgaactaatacttattcaagctcccactcaacaacagatgtatgggctagtgcatgcaagagcatacatagacctcttactattgatgcttagggaattattttcgtggcctttgtgaattttttgagggttagaaactgttggaaattatttta

SEQ ID NO: 142920 - DNA, 923 bp, Cannabis sativa
  modified_base (872)..(890): a, c, t, g, unknown or other
tctaggttaatttcaaatttattaattatttaatttatcatataaataacatttcaaattaaaaagatagtgttatctttaatataaaatataccaaatattaaaatatctaaccttataattaaataatatataaatattaaagaacttaacaaatttttaaatctgaccataatttaaaaactaaaataatcaatttttaaatttaaacctcaaaatatcaaaatttaataataacctattaaaaattaaatattattaatttaaaattgatatttaagtttaaatatattaaaaaaataatattttattttaattttaggatttgaaaattgaaaaatccgattggggagaaaatcccatgaaaattagatttttggtgcaaatctcccagctgcccactaaaaaggctgcaagcagcccattccgcgcgcgggagacgtatctggcagggtgctgcaccaagaattctcgacagatgcagccttaggagatgtgggtgggcatgtctgaaggagggacacacgggcttcagacaggagtgtgtcccttgtcctgcgcgcgaggatcctccttgtccaagggtctgcgcgcatgtttctcgagtgcttgacactcaatgctctgaaaattttcaaccaccataactctctcatttttatccgaattaagttctgtaaaaacgagagttgcttaatttttcacaaggaatccaaataaaatatttcagaacgaaaataaaattattttcatggaaaaatttcgtaaatcacattcaatcatcaaataatcacataaaccaacatgaacacatccaaattacacatgcaaacaatattcatcgttctaaatccatatttcatgaaagtaannnnnnnnnnnnnnnnnnnggccagttgttgggaatattttacaaggatcta

SEQ ID NO: 142921 - DNA, 645 bp, Cannabis sativa
gttgggcagtccaccaccacaaacatgcagtacttgaaagtgctctggggtgtgtccgcacacaaggtgactgggagcatcacttttcccatagggataagtgttgttccattgaaccctgtgagttgggaaccacttggtgataggtctcggtcagttaggcctattgcagtgaaggcctctttgaataatagattcacggaacttccattttcgattaggactctagccacgatcttattggcaatgggggtctttatgaccgacgggtcatggtgaggaaaacacactgttctatggtcttcttccgtgaatgtaatgggttcatccattagccgggggctttaagctgggagttgagtaacttcccaaacctcatcgtgtttcacgacccctgcgtaccgtttgagctccttgtgggtagttcctctaatgtgggggcctctcgagatgatagccactctcccgttgggtctaggtggcaggccgagaatatgctgggcatctatagggggaacaactggagccaatactcctgctacaccccttggtgctccttgcagcaatgctccagccgcctgacccgggttgagatggggcaaccggtttttgatccactcatagaggtgtcccaatcggatcaag

SEQ ID NO: 142922 - DNA, 710 bp, Cannabis sativa
atagtcactagtcaacctttttatgattatctctattattgtccttattattatcattttgatagtgaaccaccttattgcccagggacatgttatatatatatatatatatatataaattaataagtcaaaaaaaaaaaaaaagtgaggacaataagcaaagttagataatatggagctctcaactgtgacgtcgaaacttggtatagtagtagaactagtacaacttgttcgtcaggatatgcatgaacaaatattataagccttgctagttcttaattaaggccggttatataatttacaaattcaaaacaaaaaacaatataaactacacatcacaccataaatttttttgacttcatttttaatttatatcataataattaagaaaatagaattttatcttttaagggatagatgaaactgaatatataaatgttcttaaaattaagtaagatactataattttttcatcttattttatttttagtttttatgtcgaacgagaaattaggcaattaattaattatttagttcatttttttaattctaactgatcgtgtatccaatagaaaaatatccctattggattgcatgctattgctatatattaataaaattatatgatttattcaatatctttatatattaaaagtgcctatttaacggcatttcttggtttaacagaatataccttaaaaataaaagaa

SEQ ID NO: 142923 - DNA, 627 bp, Cannabis sativa
agtggaccctatacaaaacacaccataatatatcaaatttgatcttaattctaccgaaatttcggcagcataacgactgtaattgaatgcccccaaaaatatgaaacatgcctatataatgacaaataacacaaatatatacagttgtttattcatccatcccaccgcagcacatgtattcgcagaacctacttcactatggctgaatattgaagatattcaaactccacgaatcattaataattaatttataacaaaagttacctcgggtgttgcaattaggtattcaggccaaggaatgaacatgtttgctacttccctaacatatatgcacccttcaattgagattgagattttagcatcctcttgcagtatttccaaaatgaaaacccgggcatgtgaatcatcgtagtccttgtagtgaactttgattggaccctcatgctagtacaaatacgatcggtctacaatattgtcgatattgtcagacaagagatatacttgctgatcaagagccttctggtcatcaaaattgtacaagagaggtggcttgttgagggaaacaaactcctcgatatcatctaccccctgctttcctaatgtatatggaatgttctccatgccaat

SEQ ID NO: 142924 - DNA, 576 bp, Cannabis sativa
ataacaagctcctcctccatggccttttaatgcctcattgaataataaacacattagcctcagccttgagctccccctccatggcctttttctcatcctccaacctacaaagaagggtgcggagaccgtctctttcgtcttgaagacttgtaacgtccagagacaaagaatcaatatcagcttcaagttgctcggttgatggcgtctcctggaatgccttggtcagctcgacaacttttgtctcggtcgctagaagtttcttattgacctctcccagctctatccgcatagcttgaagttgaacccgagcatcctcggcatcctttttggccaagtccacttctattcgtattgtgttagaaatggcaaagttcttagcagtagtcgacttagctcgggaataggcgtaggccatcttcaaaccagtctttgcagaaaaaggcattaaaatcaaaattagtcaaagaggaataaaggaaaaatgttagaaaagacttaccctcgaaagttcttttaagacttctcccataacaagctcctcctccatggccatttaatgcctcattgaataataaa

SEQ ID NO: 142925 - DNA, 515 bp, Cannabis sativa
aactctaaattagaaccaaaatcaagaaccaggactggaactgggatccaagattagaccccggtctttgtcccagacccggacccagacgcagacatgggcagggacctaggattcggatcttgacccacgaccgaacgcttcaaacaaactcatagtcggtgtctagatcttggaatcgtaccaagacccgaacctggaaccatttccaagacccagacccgaacctgtacccagacttgtgctaggacctgcgacctaggacccgtgacttaggaccttgaccagaacctagacccgtaccagaacccagacctagacccagaacaagacgaagacccagacccaaacacagactgaaacctagaccaacacccaaacccaaacccagacccggacccgaactcgtaacataactgagactcgaactcaggactcggacctggatcgagatcaggtctaggacctagacccagactagcaccgagacctgaacctaaactgggacaagtact

SEQ ID NO: 142926 - DNA, 501 bp, Cannabis sativa
gatctacattttctgccatataattaacaattcatagagagccatccctattgtactctgataattgttattgtacgagaactctatcagtggtacatatttactccaggagcccttgaaatatacaacacaggctcgtaacatatcttccagtatctgaattgtcctttcaaactgtccatcagtctgaggatgaaaagttgtactgaatttcagtttggtacccatagcccgctgaagactctgccagaatttagaagcaaattttcggatccctatccaaaattatagacattggaacaccatgtaatcttactatctccttgacatacaattctatatattgatcaactgtaaaggttgtttttaccggtagaaagcgtgcagatttcgtgaatcgatctaccacaacccaaattgaatcatacaaactcgtggttctaggtaataccacaaagtcccacttccactcaggaagtgtcaaaggctgtaacaaacctg

SEQ ID NO: 142927 - DNA, 742 bp, Cannabis sativa
  modified_base (56)..(56): a, c, t, g, unknown or other
aaatagctataaataattccataattaatcgtaaacaactgctaatttccaaattnactaagcgggctttacatgtacatggattaataattgagaaatgtatttagttttgagtgtatgcgctgaagagcaatatcttttaagaaattttgctttgatatttttttaaatttttatcaagttacattcatatgtattttgtacagaatattgaacattatacatattaatttgtttatattttaaatacattaagaaacaactattattatatttttaatttctacatcaagtattgatataattatatatacatttctttttttttaaaaaaaaaaaaacaataattgttagttgcttttttaaattattaacaactatttaacaacgatataaaaatattaaaataattgtagatataatttagagaatctacagattttaaccactaaatctcaacgtacaaacaacttagaagtaaaatgctcaaaaaacaacgaaattaaactacatatttacaactttaaaacaacgataaaacaatgaacaatgttattactaaatctaagtaatttttttttttatatttacaatctcttcctatcaatttttctacttgattcaaaatcaacataattcgtgttctttattatttttcatgttttaatgtaagacataagataagtttttattttaacatgcaaaattctatttttttttttttttacttgttgaacaacta

SEQ ID NO: 142928 - DNA, 506 bp, Cannabis sativa
ttacagctctttaatctcttattattttattggttgtcgaaaaccttggtcaacatttttgcacgtggatgccagccgcctccatggctttttgcattgccagtattacctactgcatcttttggttttgtctgctggactcggcaaggaaccggaggaatcctcgcccagtcccaacagcaaagttctagggaaccaagccctataaggtatcccgctgaagggaaccaaaagaaaaaccctacttctaccccggggagaaagaaaaaggcacaggatccacgaaaggtccgctcagatttcccgaaagggaacggtccgcagaggggcaaattccaaaaagggagtcttggccctcaggatcgagaggatcgaaaaaagcatgtccgtgcaccaggagcccaggggtagaggaagaaggggacaaaaatgccctcccgtcgatttgagaaatcaaatcaatgggaatcaaggtgacctctgtgatcaccttgaccaaaagaaat

SEQ ID NO: 142929 - DNA, 648 bp, Cannabis sativa
ttctggagtaggagaacgatcactactcacttcccaatcttcaaagctcgagttagaaagtctgtcacttgaaaaggacggactggcacgaaggcgaggttgatcctcatactcaagttgaagcaaatcctggtcaattcggtgttcgcctccccaaaactcaccagggttcatttacaaaagaggacacacgagattaatgtttggcagagatatcaaacaataaacaggcaaaagtgcttactaggaccacccaacataaaaggcaaaaaatgcacaaaaaattatgtcaaaacccaaaagttcgagatctttgggttaagggttaaatttctcgaagcttcgaggacctttggattaaggattaaatctcacagtagacttggagaaaattctttttttgctctgagtttgtttagtggagaaaatggtgaaagtaaattatgaagaagttcctgttgggctttatgctttaaataaaactctattttaatgtaatctatattatttgaatatcaaaaatgagacagaagtattttcatcactaatttaatgtgtcatttggttcatgttatcatttgtatgtttatttgatttataaattcatcctaacccttatcacagtaatattcttgtttattgtgtcgt

SEQ ID NO: 142930 - DNA, 856 bp, Cannabis sativa
cgggttggggttcgagttctagtcggggttcgagtcctggcctgagtttgggttcgggttcggatatcgatctaggtctggatcgggctccgggtctgggttagggtcatgggtgtggggccttggtttgggtcctggtttaggtccaggtcccaggtttggatctcgagctgagctagggtttagttctgggtctaagtccttggttttgatcacagtttgggttcgtgtttgggtccaggtgcaggtctgcgtttgggtctgattctgggtctcggtctgagttcgggtcctgagttcgggttcgatttttaattcgagtccaggttcgttcctggtatgggttcgtgtccaggttcctgtcctggttcgggtccagggaaggtttcgggtctaggtctaggtctgacttcagattctcgggtctaggtcaggtcctaattcgggtttgagtcccggtttagatcttggtctaggttccggggcctaggtccctggtctaggtcccccatccaagtctagttcctagctcctggtctaggtaaaggttcgtgttcgggtcccgagtcttggttttagtccaggtcctagtccgagttcgggtccaggtctcggtcctagccttggtctgggttcatgtttgggtcgttatcagggtttggatcctggtctgggtcacgggcctcatgttgcggggaggatttaggacaagttcaagtccagatcctagtacgggtcccggtctgggttcctgtcccaggtctcatgtcccagtcctagtcaaggtctcggtccaggttttggtctaagtttgggttatgttttgggttctgttctggtctcaggttcgggtcct

SEQ ID NO: 142931 - DNA, 700 bp, Cannabis sativa
tatttcctttccattccattccatttcattacctccaaccaaacgtcagggtttaaatatttctttatgaaattaattttgcgttttttaattctataaattataatctgaaattgattgttcatatctcatcaataattaatttaaaatgtttctacacgtttaatttttcgaattggaggacacacatagccaaatcaggttctttttgttcttatattttcggattagtttcaataagatgttgtattgttttacttgtttcatcccaaattgaacccataaataggatagaaattcaattccggacaaaatccctacttttaccgttattttcgtcgtgtcttttggccggtttttttgtcttgacccgactgaagagaaccgggtcacacgacccactttcaaacctggttcaaggttaaagacaaccatcccccagcgaagccaatctccgcagcggcgcgtgggggcgcgtgtactaccgtccgacgtcgttctacgatgattctttttcccaacattattagaatttaatttatgattttatatgatttttaattaatttttttggcttctttttaataattactattattttaaatataattatgtagttaaaaattattagaaacaatttttgatgatttttgaaatctgtaaatcatagaaatttttttgggtttcttctcatttcata

SEQ ID NO: 142932 - DNA, 552 bp, Cannabis sativa
tgaaacaacaaatcttgatttggattgctaatctaggaatacatctaagtgaaggtattgtatataatagagattatatatgacatgcactgatatgtaaataaattatctttattaaacatgtcatttactataaagacctaattcatatcacaatgatgatcaatagtagatcggcatggattccgagtaatcatgaactcgtgtttatgttgttagtttctttgattcactcattaatatttcttagaaaagataatccttacaacttctattttaggaagctaataatgtagatgactggaaacttaatgtataatcattatgcaatcctgacttttctaatgaatcgaattttgattccttttaattgttaattttataattaaaaatttttgcacaaatttaaattagatttaaattatactttcaattaatggtactaaaggataaagaagtaattagaaaggtaaaatggtaatttaacaaaaactaattacgatctgacacaaggagggctaatcactaaaattaattatatcaatggacact

SEQ ID NO: 142933 - DNA, 619 bp, Cannabis sativa
taaccttccgtctatttttctatataaaaaaaataatcgttaaaaaaatcgttaaaccaaaaatttccgttaaataagcacttttaatatataaagatattatatatatatataaagtttagatcataaataaaaaactcaacggatatatacatgtatatatcaacaaaattcaaagatataaataaggtagagataataattattttgataccaactgttaaactataatgcaatatgaaaataaaacatatatgaacaatatgtatagcgaaataattacaagcatattgaaatcttatatgcgatgaaaagaccaaaatacctctagccactaatgtttgagatttaatccctgcaataactttggtataaaaattcaggcttcctcgctctttcaactctctttagatagaattttgttgtttgtacaaaaaatgagtgaagagtttggagaacaagatcctatatttataggtgagatactctatcagtatctacggtacattaattgtcaaaatattttgacaattaattaggaaattaaatcgagaaataaatatcgaaatttgtccatatatagaatatcacataattaattatgtccagattcaatgaa

SEQ ID NO: 142934 - DNA, 590 bp, Cannabis sativa
gatggtgcgccatggagttggcatttgaagtttctagagggacttggcttcagtggaagcgtgttctgtaggtatcattgggtacggttggtttgcgaacctcaccccaagaagtgcaccatactttgtccttgttgaaaggagtatgcatgggacaattggcgggtgagctgctatcagaggatgtgttagcttcagggtaattgttgcaagggctacttggttgactggagggacattgtgagggacttggaggagttcatgttgggggaagtattctagtgcagaggcactactccatgggtgattttgaatagcgacagtagagcaggttctttgatcaagtccaaggtgggcgagagagatcgtaaccaagaggatggttctatggagatagagggataagttcagacttaggatttggatgaagcttggagtaagcttaggagtcgagatcaggaagatttgcctgccgtctgtcgatgagggaatcgacatgttgaagtgggggagaatgtaatgtacgtgccaagatggcacgttacaagctaagtgatgcccacaagttgtccaagtggtggtcaagtggt

SEQ ID NO: 142935 - DNA, 1166 bp, Cannabis sativa
  modified_base (942)..(947): a, c, t, g, unknown or other
gtagaacggtaaatttgtccctacatgatgtagatcatccatagaggatcattaattatttggattgaaacaatgagtaattcaaatcgtatctattttttggtaatagagcgttctatgtaattaggagtgcgattctgaatctatatatagtggagtcaggaggaattaataaggaaatttactttgtaaatttcggatctactaattagaagcttgattaattagggtcatggtctccaccctaacaaggataatatttttttgtagtcttaattaattggttttaattaatcaattaaaattctaaataagactatgacttgtttgtgaattttttactaagcaaaggcttatttgagaagaaaagaggattgagggtttatttgttaattaagagattttgtaaggtcttattaataaataagtttaataaaaattttatttgataattaattataattattcaatagatagaattgacatttatagagttacaattaaaatatgacatttgtgaaagaaagatgggttaaataaaatggcaaaattgaaatccataaggcccattaagggttcggcctaggtggattaataaagctattttttatatatatattttttaattctatttaaattctaaacctaaccctagtatcaccatataaatagataagtatagctcttattttcagatgaccctagtctcctttttcagacagaaaatagaaaatagaagagagccacaatctaattcgaattcctcttcttcttcctctgaatatttcaaagcctatggtgaattgagagtatacccactcatgtcaaagggatacctagcatagtcaggaagactgtgtctaaccaaattgaaggagagaagatccgatttagatcttgataatgctctactacagacaggaatcaagggctagagatctnnnnnnaatgagtcattatatttcgctgccatcaatgtaaggatctcttaatctcttatgtgtatattttattattttaggaaattcatatttaggatattagattatagaattatacttaaagatacatgttaaatttagatcctagtaacagctcgcaccactgctcaaacagaccccgcgcagccactcccatcacggtaatctctctctctttctctctct

SEQ ID NO: 142936 - DNA, 521 bp, Cannabis sativa
  modified_base (218)..(221): a, c, t, g, unknown or other
gattagagctgaattggttaattattgtgatgtttgggtagaattggagtttaagagctcaagttggagctctaatagtggattgagattttgtgttaattgttgtattcttttgcttgggtttggtttactatagtgcatataggtattttggaagtttttagaaagtttgggattgatttgaatcaaggggcttgatttttgggttcccagcacannnncggtcgaccggttctgggggaccattagaactggtcgaccgttggtacccaggaagcgggcttccggttggggcttttgcccgaaccctagttttccccatttttgtgttgtttagggtattagcatcctatttatcgatagggttatccttaatttcaattttaaatccccgataagtgttttagcatgtctcttatcgagttatgaatattatggtttagggccctgtaaagcgtcacgctgcgtttccactcaggctgaccagcacacttgaacacggaacgaggtaagatagcata

SEQ ID NO: 142937 - DNA, 2852 bp, Cannabis sativa
  modified_base (397)..(399): a, c, t, g, unknown or other
  modified_base (1378)..(1381): a, c, t, g, unknown or other
  modified_base (2249)..(2249): a, c, t, g, unknown or other
aagtctaattaataaatatgtttgttatcccaatttttgcactttgacgtggcatcacgcgatgttgacacgtggaatcaactttgagtatatgctgagagaatacagtctgaacaggatgcctcgctggtatacccgaagccaagcaatcagcgatccgcacagagcaaccaacacttagcgaattcagcttttgcattgtgagtcatcagccaaatccctataacttggggattagattacaaagatatggcacacccacgatcccatgatcagtgtattttttatcccacgatctttgtattctgtatttatcccatgatcttttctgtttatatccatgataacgagaggggaaagacttcctctccaagttcacagccctataaatagtgannnatgttcactgggcaaaaggtcgcaaacagtttagtcgagactttaccctagagatattatctaagaattcttattcagagatatttttgtaagagctataagaaaagaaacctttcctccttgttcttgagtcagtacaaataatgaggattaggctattaccgaactgctcggggctgagcctctataaaatccttgtgtctttacattgctttactatatatcgattgctataaatcacttatcgcttactaaataagactcattgtcgttggctacaagcgaggtcaatattttggtgctttcattgagagcagaatcaagaatcgctcttcattcaaaatctaaccacaagtacgatggtggtgcaaactcgtaggggtcaggttgatccaggcaattcacagatgctagattcttcattgcaaaacctaggaaacagaagggttccaacagctattaatcctgaacagccggcaagcgtgggtctcggtgtaacgactgctatagatgaaatcgcgcatggtgtgcaagagactgggaataacagttccgcactcaaccagggcattcataacacatccgttccgcccggtaccaacactcaaacaaccattggggatgctactgagttacaaaatctccgtgacgttcttggactcatgcagggtcataacaataccctacctcatgatcaggaagatctccgcgctgcggtgaatctcgcgttcaaagaacaaaggcgtatgtttaccgagtggagagacagagagatggaggcgttaagagctcatcatacagagattaaaaatcgtagtcggcaagctacaatgctaatacgaaaagcttaccaaactgtaggtcagcaacctccgaatgtcgtccccctgggtgagacaaatgaagatccagcgatgaatactttccagactacaaaaggtcaaccgcccaatccccggtcacgagttccacttgtggnnnnagcggtaggcgggtagaccttgtctagtaattcatcaggagagatcatacctgatggttccaaccagattaacggtgccattcaacctgaaccaagcaaatcaatccctaaggcagccaatcgcttctgtattcgaaagattggggacaactcatgacctaaggaatgatctgaatggaaggagaggagtagacgattagaatgtcacgaagatcgtgtagcctggagcccgtgcttaaattcctgcacagaaagatgcagacgtgattcaaattgaccagaatgccgagcaagttagcccacccatacaggcacaactagatgaactgaaaaatatgttccaaggcatagctggacaaagaaacaatgatctcgagctggaccgagcacgtggcactcctttctctcccgagaacaatctcctggcgttgccccacaagtttaaaatgccaacatgggcaatgtacacaggaagagaagatcctctttcccacctcaagtattttgaaatgcatatggattaacaaggggtacgaggagatgtgtgctgcagaatctttcctgctaccctgtcagaagccgcccaacaatggtacttcaagttggccccaggaaagttcagttcatggaaagccttctcttcgaaattccatgcacagttctcctcctctcgtcaacttccattgcatctaggagacttggtcgaagttaagcaaagactaggtgatcctctctgagcatacatcagcagattcatgacggaggcgaccaaggtttcactggtaactgaagatggaaagttatccgcgatactggggggcattgaagtcctcggtgaactttggaaggatataaggaagaaccggcnggtagactcaatgagtgatttcttgaccgtgccgaaggcttcatcaaactcaaagaagccattcaacgagcggaaggtgagcaaaagccttgaaagtcaaaggctccttctcctggaacatccacccaacttccacattacccaaataagtcaagctctagtggtaaaggttccaacaacaaccacaagcaagggaatgggaagaaaggaaaattcgccggtaaatctgaacaagctccccgggagaatcaagcaaagtacactgcgttcactatcttgactgaagacgcagaaagtatttacatggcaactcagttgctggccccatataagaagcctgaacccatgaagaaagatgtcagcaagagggacatgacaaagttttgtcgattccacgaagactatggccatgacactaagaatgcaacaatcggaagatggaaattgaattcctgataaggaaaaacaacccccacttgtagaagtatgttaaaaccgatcagggtcaggggcatgataataaccaagagttgctacctccaccggtagatgggcatctgcaagtcatcattggaggcccgcattgtaaagcccgcttagtta

SEQ ID NO: 142938 - DNA, 920 bp, Cannabis sativa
  modified_base (762)..(764): a, c, t, g, unknown or other
tgagcattcgtcccctgtgccaccattgctgaggctgcctcacgttctaactcagcgttttgacaatgcgcttcttccaaacagtgtcttaggcgacaactttccgtttcataagttctttctcccacagattgggcacctccacgattgtgctcttcatccctggaggttctgaccattcgcacgctgagttctcctcgagagtgttgtccgtgtactaggaccaacgtcgggtcaagttctctgggaacgcgtggtccacgcactggggccacccccaggttaagccctcctacaacgggtggtccttctggactgcgggttggtagatcttctagagcccacgagctttttcccagaacgatgattggtttcctcatgtggggtgttaacattttctggattttttgccatgaaggagatgatttttcttctttgggttttttttgagctttttcacagaggctctcaatgaaagtaccaaactgttaacggggattttcgttaactaaaattgagcctcacaatattgatctcacacaaataaaataaaagctatagaaaagtaaagaatatgaacacaaggtttttaacgtggttttgcagttaaaattctgcatagtacacgagtcaatcttattcagatttctgagtgtgtttcagggcctctttcatatgagtattttcgtcccttttttgatcttctttgtcactatttataattacatagttgacattgaattacaaagttgaccgaaatannnttacagcaatcatccctaaaatcgtgggatttgaaggcaaacgaggatcaattcgcctggagccatggcgatatgatagggatcgaccctaatattatctgccatcacttaaatgttgatccaaactaccccacaaagagacaaaaaaggaggccc

SEQ ID NO: 142939 - DNA, 812 bp, Cannabis sativa
attttggaaaatacatggtccattttattatttaataaaatagaaggtctaattaataacttttataaataagacggtctaaaatagtatttatcctaaatataactagcaatttattctaagataatattcttttaattataataaaaaattacctgtcgtctatcgatactgctcatcgtattcattgaagtgcccacacgtacatcaagcaattaataattattgaatctcaatttcagcaagttgttgaaacctaactatgtgtataaaacattcaacaatagaacaaaaatatagtagaagaaattgaaagaatgactaagagagtataaatatttgaatgaagaaaaaaagataaaaatatatattaatattaataatcgatattcctctatagtttgaataattgattgaattagatatacaatttttttttttaagatataatggtatatataaagttggaatatttagtggggttagatattttaaaaaaattatattttgaacgtaaaaaaaaaagagaataaaattattaattaatataattattaataataaaatgataaaatataaaatgataaataaatatttataaacttaataaaaaattaaaaaaaaaagaaaaaattaaggagataaaagataaagtttttttttttaatataaaagataatgttatttgaagtgatattaggatgacaaatcaccccgttatacttctatatatagattcgaaaggatctgatacgatgcgacatattttttccagttcatcatcttcatcttcgaataatgttttttttctt

SEQ ID NO: 142940 - DNA, 609 bp, Cannabis sativa
  modified_base (74)..(75): a, c, t, g, unknown or other
ttttactcatttattttacaaagaaatcaaacaagggaaaatatcctattttttcactctctctctctctctcnntctctctctctctctcattttcgaactccatagaagcagctagggctgctatttttcatcattctttcaagcttgttgcagcatattttgagtgatcttgagtcttaggtaagctcttggcaactcctattaagtttcttaatttttaagaaagggaatttttgcatgctttgtggtttttggttgccgtggttgctactattgtttgatgttgtttctgaggtttaattatggtcagagttgatgattagagctggtttggtggtggtttttgaggtttgtcaaggtttgagcttaagagctcaaactttgctctcacatggtggtttttatttctgtgcatgtagtagtgttttattgcattgaatatgttctctaggttgtatagaacaggtctggaaagtttgatttgaattggggttgattttattaaattatggaatttttagtcattcctgcactgaactggaattccagttggtccttaggaaaccccaaggaaccggaatttcggttggggaaccggtctaccgg

SEQ ID NO: 142941 - DNA, 644 bp, Cannabis sativa
tagcttgaaattgcctttatacttaatatactttggtaagattatgaatcttgaggaatgcaaggctaaatgcttgagcatatgctcttgtaaaacttatacaaacttggatatcagtggagaaagtagagtgactgcttcgtctaatttagagatcagcttaatattcaaaaatttcaatcttgcggacaattgtgcatttgctatcaggctattagtacaattactttattgtaactcttttagtgtaaatatagcatgcttgagcacatgcatgctactttttttgaacaatcatcaaaactttatacattatttttcaatatcataacattattattattacttataatcagtttcactaacaatagtcatttaatttatagattaaagtagtgaagacaccattttaatttaaatatatattcccattaacaatctacaaactaatactattttcctaattcctttaccactgataataaatagtctaatataaaaattaacagacgtgcgttgcacataaaattctgctagtgtaactatatacgtctacagcagcaatatgtaattctgttactgcagaaacaaaccagaactggcagaatataaaaataattgcagaaaattaaatcacttgacac

SEQ ID NO: 142942 - DNA, 661 bp, Cannabis sativa
atgaattcttgaacgagagagatgatggacagccgataaaacaagagagagggaggaggcgattcaaatctgttagggctcttctttatgttgattataataagaaaaatcaattaaaaaatattaatttaaattattcatagaaaaatattttcaaactttattttatgtataaacatgtatctttaaaaattaaatcaaaattattgaaaatgcaataaataatttaaacaaactaaatttttttgaagaaaaaatcaagcttatttacatttataaactcatatcttaacaaataaagaaaaataattaaaaattcaataataatataaaattatttcaaaaaagatagaatttaaattaaaaaaaaaaagttatatttacttaaacaaatctacattttttagaagaataaaatagattcaagtttgtctgcaaaatttaatttttacaaaaaattgaatttttaatacatatttttttaatatctaactgaattttttagtaaaagataaataatttttaaaattgcttagttaatttcaaaattttaatattgtttttaatttttataatcattcaaaataattttttttagatctatattaattttttaagatttattaaaaaaaatgttgaatttttctcatttttattttga

SEQ ID NO: 142943 - DNA, 832 bp, Cannabis sativa
tttggatattattttcttgttatttttatacaatttttttgttgttttcgtgttgttttaatagaaaactgtaaaaatataaaaaaaaaaatcttaaaatgtaatttttttagaaaaaattatgttttacgtaattatataaatatatagtttataagataaaatattatttaaatattgttattcatagtaacagcgcattcatgattcactatgtggcaagatcccgtggtgtttctatattaaatcaatctaattctaataagttaactaacttaatttatattaaattagaaaataacatgcgctttgctgcggatatttaaaattttttaaattatatatatgaaataaattatgtattttaactaagtaataaaattgtatgaaattttaacattattaattttttatataaatttctttgaaaaatctgagaagttaaatgtaaaataagatcaacctgacttaactatttagaatttgagccttatatgtatcatgtttaagataataatagaatttgtactgacaataacagagtctatcaccgtctcatactttaactttatatataaatatagataaatagatatatagataagttattttcagttaataaaaaaaaaaataagagaattaaagagagaacaaaaaatgttatatcaccgcctcatatatgtcttttatataaatatatatatatgaattcgggtagtctttaagtactaaatgttagataaattaacaattaacccaagatctatttgtatataacatagaacacaatagtagtatatgataattgagtatgtgtacctgattgatccat

SEQ ID NO: 142944 - DNA, 555 bp, Cannabis sativa
tattacatcagcaatgtgagttacatcattaatttactggtggtagggttgcaaatgttccacgttccagtagttctttattagcgaaccatttagccgagccaatttttcaaacttcgattcctactactgcttcgattacatatggaccctcccaattcgggttgaacactcctgtagatgcatctctcgtgtttgcaaatactcaccttagcaccaagtctccaacattgaatagtcttttcttgactcttttgttaaagtatcttgtaactcggtgttgatacgctgcattagtgacttgtgactcaattcgtttttcatcaagaagatccaaagataattttggaagttcttggttttcttcttgattatcaaactctcgtttatgagtcgatatgttcacttcaacaagtagcattacttttgagctgaattctagcgagaaggaagtgtatcccgttgccgtcttctcggtagttctgttagcccaaagtacttgtggtagctcgtcgacccaccttcctttgacagcatctagcttcttcttgatag

SEQ ID NO: 142945 - DNA, 574 bp, Cannabis sativa
  modified_base (548)..(549): a, c, t, g, unknown or other
aagcataaaaacttatttctaatttttacccattcatagtaatacccattagtgcaccctttatacatatatatatatatagattgattcaaaacaatatatataaagtaaataaaataataattttaattaatttggattgatatataaaaagaaaatatatgtaaagatttatatataaaaaaatatataaaagaaaataaaataaagatttttatatataaataatatatacatatataaaataaaaatttaaataatatatataaagaaaaacgtttatctttattattttttttaagtttaattaattttattttaatttgtgttaggaactttattttaattaggaatcagaaaagaaataaagtacagattttaattaatttggtatttacatgcattttaatataggtggttggattgagtttcatctaaggctcataaattgtgttaaaaattatattcatagaactcatccgacatatatataaatggaacatttaatggatgcccatgaatggttactaaataaatttaactataannattaattttaaaaatatcaaaccat

SEQ ID NO: 142946 - DNA, 1070 bp, Cannabis sativa
cgccattctaagtgagtactcgcatatctattttttggtatccaagcaacccttgaatactcgcacaaaattggtgttgtcaaaattcctgtgacagcaatgatcgtggtaccactaagcaaacatctgagagtggttcatcttctaaaaagtctgattcagaggacattgaattgttaaatctaagttgaagttggtcatttctaatcaagaatccttggttgaagactttattttgttgaggtgttttgttgaccttaatttcaagtctgtcatgactgtaattaagtatattcaagaaaaatttaatgtcatttatcgtcgaccttctgatgaggtatttatttacgctgttattgtttcatttttttactgttgttattattagttttttttctatttttgtagttgcaatattgttttttgattcaggttaagtcatctgatgaattggtcacccaagattctgatgatgatgatgatgatgatgctgatgaggatgatgacaagggattacctgatccagagaatattgattccgatttcgatgatggtgatgagttgggtaaagatggtggtgatgctgctggagttgataaggttgtttgtgatgttcctgctgatgatgtgaatcaaactgaggctgttgcaggcagtgaagagagggctaaggatgttgagaatgttaaggccaaagagtctagtttaacgggatatgatttttttgatattttaagtcagcttgaaattgataatgagcaagttgtgttggctagtttagaggatgttggtaaaatcaatgtaagtgtagtttatattctttgttggtaaaatctattttatttcagctgcctggcagttttatgttagttttgcaacttatttacttttttctgattatcaaattttatatttcaagttcctgaatccaatccaagtgttgttgttgaaaagacagttgcctttccttctgatgaagaagctgatgacactgttacttatactcctcttttggataagagaaagcgtgcaccggcattgaaatagccttttgttgattttgggtcggc

SEQ ID NO: 142947 - DNA, 539 bp, Cannabis sativa
ttcttatttataataggcccaaattgggacttaattttttttataacaaattagaagttattcttgaatagggtattcttaaatagatgttctactgtatatagtattaggaaagcattaggatatacattactttttcatttatatctatctatcttaatactactagtagtatattataatttatttaaaaagtagttaactccaatagagtcaaataatagtgtttatcctattggaaatgttaatcaagaaagcttagatttttccaaagttgtttttggatgatctttttcaaacaaggcagtcaacttctataattgatataaataaaaatggatcaaattatagtgtcattatatatggtacgatttaggttctttgctttttattaatttacatactaaaatttattttagatgatatggtcttagtaagggatggttactttaagaaggttatgaagtagagtacaataattcagtttctactagccaaagggtaatccctttggctagttctaataatttttagtgggg

SEQ ID NO: 142948 - DNA, 810 bp, Cannabis sativa
agttgaattagctcatcatcctgatgagctctctcagcccgtcaagcatcagatttcctcttcctccccttcactggcttaggaatgaagtcattcagataaagcctgtacttcacaaagttgtcctcggaggtcaactggatgatattacggtcatcccccggtagctgagcaagctctttagctctatccctaagagtaagagtgaggggagggtagtgatatgtaggaatctgctggaaccgagtgtgggtggtgcccatgccatccaccatgaagtactcatcaacaaaatgcccgacctttctgatggccgaatccccggtgcccgtcaaccactggaagtctggttgagagaaatagaagtaccccgacttgccttgcttaggggtggacttcaaataaaaaaccagctaacctcgtggggagaaggcatatcccacttttgggaggcataaagaacagagagggcagacagacacttaatgcccttaggagtgaactgggttggacagaggcgaaagaagtctgccacattcttaaagtacgggtgcgaaggcaacaatgcccattgttgggcatgagcacccgaccaggcgcacatccccctttcaggggttgtggctcagttattgtgggcgagaatgtaacagtctaattctccctggtagccattttggtagccatcctcgtcgagagcccgcatgcgtgcttcagtaaccttggacgcagggctcacccacctggcacccaaggtaccttgccttttatgagaaaccgtagtagtaagttcctcactgacgtagtcca

SEQ ID NO: 142949 - DNA, 870 bp, Cannabis sativa
acgaataaacaactcaataacaacccattttaaactaaaaattaattagacatcaacacatagagtcaactttaaaaataaataaaaatattactcaaataaagaaacatgtatatagtatattctgttttcttggttaaataacttaataacaacaataaacaattatataacaactttactctaatatgcaaattacatagacatgaaaacaaactccaagaaagaaaaaatatcaataatctataaaataaatttaaaaacaactacaaaacacttgtacaccaacttaaaaatatatgtacacataaaaaattaactaaacatatactttttttttctcttggttaaataacttaataacaacgaataaacaacacgataacaatctcattttaatatatataaaaattaatttgacatcaacacattgtgttaactttaataactaaatatatactcattttttcttggttgaacaacaaaataacaatgaaacaacaaccttggccatataatatataaaaaaattattgggcatcaacaaatatttgtgttaacttaaaaaaaaaaaaaaaaacagactcacacacaaaaagataatcttaaaaaataaaataaatttaaaaaacaactataaatcacttgtacatcaactcaaaaataaataaatatatacttatttagtatactttgatttgatatataaacttagttatattttaggattatttcataaagacgagtgataattataatctcctattgcaatctctttagtcaaccttcacgcctaaaatcacatgtcgaaatatttttgtacgaatctatgtagtttttttaacaaaaatacagaaggttgtttttttt

SEQ ID NO: 142950 - DNA, 645 bp, Cannabis sativa
  modified_base (579)..(587): a, c, t, g, unknown or other
ttcatggaactcaagcttggtgctttaatggcactttttgattcttagtgaaattattgtgtttaagttgtggaatatgtttattatgacatatcatgatgctctggaaagtttggcagtgtttggggtagatttgagagagttttgggggtttaaagattgaaaaatttcgtgttctctgcccagacaaccagaattccggttggttcagggctgctccaaccggaattccggttagagttcatcgggaaacgctgaattttgttttggccataacatttgactcgggactccgttttgggagttctttataccgttggaaagatcttttcgagctctttgtgattatatatgatttgaattccaatcttaaatttttgtggaagtggatttagggattaaccctatttgtgtaaatcccggtattgtgattaggattaccgacacctggtcaggagcaccgggggatttgcaatctctactattgctggacatcaagtaagatagttattagcacgtagagtatgcgcagtggcgctcatattgagaatgaaatgcatgaatgtttagtaaccgggnnnnnnnnnattaccctaataggaacggtctaatagcctagggttattaccctagttatatatgtgt

SEQ ID NO: 142951 - DNA, 549 bp, Cannabis sativa
  modified_base (515)..(517): a, c, t, g, unknown or other
tcttgtcttctattttccattcattaagacaagatcttagtgcctcaagtagtgttggagcatggtgagggcatggaacatacttaaaacacagaatctaattgtgcaagttccaagaatcatcaataaaatgagctgttacagccatatatcccctcttctgatgattagcagtccacatgtgactggttatggctattgtactcctacttttttccaaactttgcctacatttttatttcttagccttatacattttcatgatgtcagatctagctgtatgccttgacactatttgaaatgtaggacacagagtacttgaatattcgatgaacccgctatgctcaaccatggacaatggatactgatgcttaacgataatttgagccaatttgatccttgctaaatcaggatcaaaattgaaaggaactgaaggacttgtaattggattagcggcaagttaggcctttctaactggacacctcttcacgtgagcatttaaatgcgtagtcccnnnagtacttcctcccaccaacttacgcccgcagt

SEQ ID NO: 142952 - DNA, 1014 bp, Cannabis sativa
ttgtggaagaacatcatagtagaaaaagcaacctgggaactcaagacggatatgcaacagaaatatccaaagttgttcaggtaaattttgtggcaaaatttctataaagggaataattgcaataccctaagattaaggagtcagattagcaaaccctaactagttaaatttatattaatgtggaattatattattatataatttaatatatatgaattatactgatacataacatgttaagaccccgtggtgagctaggggcattttggtaattttatcccaagaagggtaaaactataattttaatgttacagcgtgcttatggactatattattatatggtatatatttgttctgtccttctgtaggtgttttctgacatgtcggcacggtatagtcataatggggtattttgggccgaacagggttcggggcccgaaatacattttcgggattttattttggaattttataaataatttaatcatctaaaatttatttacgtttggtgtgtgatgtaatgataattttgcccttgttgtatgcatatgtggtgtattggccctaggggcattttggtcattggaccatttgactttattttcaacaaaaggaatttttgtaaaatagaaaactaatttttttggttttttcatcccttagctgaccccccattttctccctttctcatctctttgaaattttctttattttaagaattctgctttaagttggaggtgaatttatatgtgattcttggtgttaggagcttgggaatttttggtaagcctctaagtttgctttttcagagtttcatttctgttatttgaagttgaaaagcatgtgttgttattgtttgtgtttttgaatgcatgtatgtgagataggttgaatttgaggtgtttaagctaagttttcttactagttgggaattctagttaatgctatggttgttgggaagctttgattgaatttagagtgtgtgatctcatgtttaattttaatttttttgag

SEQ ID NO: 142953 - DNA, 799 bp, Cannabis sativa
tcagcatccactttattgttgccaggactcacggttgctgccttttgttgttgcgtaatgtcttttcggacccattgctgcttcttgggttctttcttcctacattctgtagttaaatgccccaaaccttcacaatgagcacaaatcaccggtttccattcataggaaatagcaactgaagtattacacccattctcatcttcaaaagatatcatctcaggcagctcttgtttgatggcaacttcaatcaaaactcttgggaaacttagcttctcggaataaacttttctctctctctctctcgactccttgcagcaagtgctggagccatggcgaagacaagaggtcgagggcgtgggaaaggaaatctgatgaagccggtgaagaagaaaggtcctaattctgtttctgatgttaggaaaaccaaaacaatggatgcagtgctaggtgttgcccccatagttttctctgatgttgatgatgacgattcggtggacggaaatgagggattacctccgggcacgctggaacctgatcctttgaccccgaagtcctcgctaaggtcgattatgcaacaggaggaggttagggtggagtttgctcatttcttggaggcgtctgagcagtgctctgctaaaatcgcacaaggtacgatttcgaatccccctattctcagatctggatctgttgttaaaagtctttttcctaagtgcaataaggtgaagatcactaatgatgacatacaagaggaagtggatttttggaaaccctcaattgtttgttatgtcttaggagctaa

SEQ ID NO: 142954 - DNA, 1221 bp, Cannabis sativa
aaagaagtatacaagagttatcttcacataatcttcgtcatctttcaacgcaccactgaagaaaacactagcaacttccttcacaaaaaccaaccaaattaaaaaaaaaaaaaaaacacaacaacaacaccgaatatcaacaaaaattaaaaaaaataaaactaaacaacaaaattctaaaccataaaacaaaaccaaaaacacaaaatactcaactaatccaatatgaataaatacaacaacacaaaaataaattcggattaaatttttttaaaaaaacaagaacaacaacacactaataatgttaaaacataaaatgggttgagataattttccaacgaatctcctaatttctatcttaatcctcatatttttctctcaatgaactactctcttatattctcatttttctcactctctcttcggattaagcatcactcaagtagaaaattcaaaataaaaaaataaaaacaaaaatctaagaatgtaataaggattaagaaccaatgcaacttcaacaaacccacaaaaaataaacagtttaaaaaacctaaaatcagagaaaaaaaagtaaaaaacacatgcttaccttgaagaacacacgaacaatggatgctccaaccctaagctcttacccgaagaacaatggctgcaatgccctccaaaaatcgagaaaatcgagagcaaaaaaaaaaaaagaaagaaagaaagaacacagagacgaaacgagagaggaaaaggaaagaggaaaatgaataaatgttgaaatgaaaaaagagagggagagatataatagtataggcggtttagagtttataggcatgaattgaaaactgaaaaagtaagttaaaatagggaagcaaccatcaaatcgtgatgattacatgcaaaacccctctaaaaataaacggttatgttcaaaaaattgaaccaaaaaatttaaacacttaaaattactaaaatgacctaaagaaactacaatacacacaatatgggcttttaacaaaatcatgccagccgtatgggctttaaaatcccatagactatgcccgaagtttaaaaaagtcatataaaaggtccatagttaaatatgtcatatttatcataaaatgtttaaaaaaacccatactccatgtaagttctacattttttttgggaaatttacatcctttactaacttttccttttttctttcaaatatactgtgacacggcaaagtta

SEQ ID NO: 142955 - DNA, 681 bp, Cannabis sativa
  modified_base (618)..(633): a, c, t, g, unknown or other
ggttaggaaaaagcataagaaataaggaaagccataaataatcaggaaagttaaaggcaagatggagtgtcttaaacatcgacagaagcatctgcccgagcaagacctgatggagcatcatcatctgacgagacttcttgctcctccaggacggctttcccctttcctaccacaagaggggacggcgactaggtaaattgggctttctaatatgaatcgtatgtttgataggcctgtgctcggtcagaaatttcttcttccttttgagcagagtcttaagctcttcctcaacctcatcttcctgccgaagatgctcttgagcagactgcttggctcccgcaactaccttcaacttagcttcatgcttgagttaaatgagttcattctcttgatgagctccctcagcccagccagcactggattttctcttcttctccttcacaggctagggactgaaatccttttggtagagcctgtactccacaaagttgtcctctgaggtcaacaaagtgatattctaggcatcatctggcagctgagtgattctttgagccctatcactaagagctagcgtgaagggtggacgacaatatatagggtgttgggttttatgccctnnnnnnnnnnnnnnnnatataatcagatttacttattaagaaagatcagaaataacattttatg

SEQ ID NO: 142956 - DNA, 620 bp, Cannabis sativa
tctgctcgcacaattaaaaagttacggtctcagacaaattccaagagaagaaaatacaactgcagacgcgttagctcgattgtcaagcagcaatgtaagtgacaaggaacacttggtccctatccgattccttgaagagcctaacatcactggcacgaaagaaatcgaaatgattgatacatccccaaactggatgacgccaatagcagcctacctcaactctgaggaactcccagataaccgaaatgaagctcgaaaaatgagaaggaaggaagaacagtatatcatagtagagggagtcatgtacagaagaggattctcgatgccattactcagatgtgtcactcaagacgaagctgcacgactcctatctaaggttcacgacggattctgtggaaatcatactgccagacagtgcttgtccaagaaaactctaaggcaatgttacttctggctaacgatgattgaagattcgagagcctatgttaagaagtgcgacaaatgccagagattttcaaagattcccagaggaccgcctaacaagctgacacagatgcaaaggatgtggccctttgccatttggggaattgacctgatcgggcaattacctaaaggtaaag

SEQ ID NO: 142957 - DNA, 536 bp, Cannabis sativa
catagcttttaagaactgatcatcagatatacaaaagtaagaagtgtaaatttatgagtttataactttagatgtttaatgtttattgaaaaaatctttaatttttaattatcatgtatctttatatataaaatatgactatttaaccgtttttattagattaacaaaatattttaagagtataagaatattctgttaaatttaatatgttagtagaattaattttttgaaatatatgtaaaatttaatattatttattttaaattaatttaaatatatgtaaatattaatatattatttgttatcttattattttttattgttatttgtaatattaagaatatatttaatttaaatacttttacattttatatttgttaaatttaacatgttagtaagattagttttttaaatatatatataaatattaatattatttatttaagattaatataaatatatattaatatattatttgtaattttattatttttaatattagaaatatgtttaattttaatatttttaaattttat

SEQ ID NO: 142958 - DNA, 547 bp, Cannabis sativa
tgataatactagtgctataaacatttcaaaaaatcctattcaacactctcgcacaaagcacatagacatccgtcgtcactttattagagagtttgtggaaataaaacacttgtcctagaatatgttgaaactagcaagcaaatagatgatatttttactaaaactcttaactcgattcgttttatctctctaatgaaatccttagggatttgtattgtttaatgtttgtttcttcatggtccttaatttttgagttgacttaaggttcataatgtcttgtctttgtgtttgttccagaagaaaatctcaaccttaagagaattacagtcattatttttattgctaatgcttttagtgttatggtttcatacaggttttgttcaggaaaattattcactcctcccaggaatatttgggttcttcaaagagtgttatttaagttaccactttcaaaaagtaaaatataaaataaaaagtttaaaaactgtgtgtttaagctccattggatgaatagagctacctatctcaatgtgtgaaagccgtctct

SEQ ID NO: 142959 - DNA, 1067 bp, Cannabis sativa
  modified_base (1018)..(1026): a, c, t, g, unknown or other
atcagagagctagggtttcttacttgcacttaatgacttcagacttagggtttttagggtttgttaagctctttatatagaagagcttaaactcttcaaataggaaaaataaactcttatttacatattaaattagtaaaatataaatgaataaaatgcccctcataaatatatatattttccctctattttcgtgggttgttaaggctaaattcagagtcttgcttgttgtccacgtgtaaagttgtgcaccaaagtcctttcaggctaatgtatggccggtcatgcacctacaagatgcatgtgggctggccttatgatgtccagaagttggccagcctatgttgaccatagggccaaccaaaggtggccggccagcccccttgaggtggctagttcatcatttgtcttcccgcttgagtctttggactcatcgatggttgaattactttttttacatctttgtatttcactcatatctttagaaaagagagtctttgttttgtagagaagagtgtgttcatctcttactctatttatatgtattttgtattatcttgagtctgtattcaagtctacaaaagaaaaagaacaatagtacaaccttcgggagaaggttctacaagctttcaggagattacttttcaagtcttgcctcaggaggaagcaaacactcttcacggagatcgaaaggagttcaagcacttgaagtttcaacgagatttgattagaaggtggaatacataaagcttacagcatacaataagatggagtatatttatgcataagtcaattactttgtatttttgagatcaatctaatgaatcttatctctgggcgtggtcccatggattagtaacaatctgaaaggattattgaaaccatgtacgaaaaatcttatatgtttttacttttatgcactgtttgtttatctagtttactctaaagctacagagttgtcttctgtagctacaaaaaaattattttggtactaattttatgttggaaattattttannnnnnnnntagatctactcacaagtaagttgattaacaccctaaatatg

SEQ ID NO: 142960 - DNA, 770 bp, Cannabis sativa
tcgtatatgttgaaggcagcataaaaaatccacttttctattcttccatatcaagccatatatatataccccttagattttatatctatgccgtaatatatatatatatgctattttctttcgagagatttgatttgtgtaacaactgacaacgacaagtatatacacatacatatatataatattggtttacagtgagtcaattatttctctttttttccttatgcgtgtgaacacatatacgtatatatatgtagagtgatcattatttgtacccatatatattcatgcatttacttcatttttttttacacttttctatggctatgtaggtgtatatgtttgttcacatatatgtatctcttaaattatacatatcatgcgatcacaatatctgcatagatatattttgtaatcctcaaacgccaaagaatcaattagtcataggtcaatgatatttttcttactgcgtagttgatcgacttcacaacacacagtaaactttttaatcattcccttatcaagatatattattatatatatatatataatataatgaatatatgcatccaaactagtgatacatatacatatttatgtatttgtatatacatatattttcttttacagtttttttcctttacaggatatatcttgatatatatatataaaaagtcatatcattggcatatatttaagccacacgaagaaattgttttattcttctctttggttatataccacacatcgacttattttctgaagtctag

SEQ ID NO: 142961 - DNA, 1907 bp, Cannabis sativa
tgatcatcttgaagatgaaatttaagatgtgcccgcaacaaatttacatttcattagtgatgatgattgtgaataatggattttagtattgtttgtattgatgactaattatttttctttcattttgatttaagaaattatcattgtattattatttaataattaatgggttgttcgtattctcttaagtaagggctcatatgattttattattccttttttagcataaaaatgtcagcaaatgttgctaattatcatggtggagatggcggtggggatgacccgttagattctactggggtacctgctgcgtgcgagacttctggtatttttgttgtttttctatttaagtatttaatttgttaattcaaatgttcatacatatatattttcgatgacaacataggcggtgaatcgaggaaaggccgtgggaagaatgttttggtaaatttagaagagagaagaaaaaaagctggtgtctcgttgccattagaagttgacaatgtctcaaacaaaatagtaggattggagagtaaaactttttctcatttgatagggcgagagattacattgcatgtgcctggacattattcaagttgggaaaatgtcccggagcagtttgaacacctccatcttaaccaaacttcgggtagagattttaaaatttatatctaaattaataaatgtcattattacaatgttattttaatattttttttttgtcatacgcagcattattaccagatggacagcaatccaaaactaatagctatttcgatagctgagatggccgagaaatacaaaacgagaaagaatattagactggcacatttcaaaaaatattaccaaaacccagaagactttgaaaatgcagtcaagaaccctcccaatgaacttagtgaagaacaatggcgactaatatgtcaattattcacaacttctgaatttattcaacggtctaaggaaaacgctctcaatcggcaaaagatgaaatattcttcaacacaagggtcgataactatggctaagactcttcatcaaaatgtaagttaatatattaaatttctattttatgaagtttactttaaatacaatttcttaacaagttatatttatcagcaagaaaagagttatgtttgagacttgggaaagattgtcatacaaagaaaggcacacacacctttatcaatgaggctgccaaaaataaatatgtaagactatgtaaaataattacttttaaatatattcaaataattgtaactttggttggtttctaacttattcttattataggaagagatggtgataacccgaaatagtgctcctgaatcttcacaagtttctaagcttgagatacttcggcagactcttggagagaggcgtgcccatcagcgaggagtgggtcgcaaattgaaagggcaatcatcaggacgacactcacaacctgcaactactgatcaacctgacttacaggaaataattgttgagatgcaaaaacaaatacagatgttgactcaacaattgtcacgtgaacgtcgagaaccaatagatgttgagatgaatgatgcagctccaacccaaccaatgcgtccacaactgtctcgctctcaaatgcctggagatggatttggtccatcttttcagccaatgggttttcaacatcagcagccgcagcacactcctatttcgtttcagcaattgctacagcagcctcctgttccttcgtctgcatcattaactcctgaacaatttcacagtcaaatgtatcagtcatacttgcagtttttggcacagtcgccaaaaaatttgcaagtagtgatgaatatgatgatgcaattgcctcagacgtctcatgtgtcacagtctcgaatgccacaaatgatgccgacacaacatatgtcacagat

SEQ ID NO: 142962 - DNA, 668 bp, Cannabis sativa
ttgtcctgcacctctccctggagtctgagattcgtctgtggccatggcagtagccaacaatggctctaatagcaagtggaattattagtaaaacagagaaaataaaagttgcaaatctcagctcaatgagcatgagtaattccattgttatttaagtattacaagagttgatcttatccattgaacaaaggacatatggcagaagattaagcaaagggaatattacaaaaacaacgattacagtgcacaatatttgttgtacagaatttgtacaattctaaaatattccttctgacaatatctccaaaaagtgaggagccatgtaggcatacaagtcatgcactagtaagcagccaagtcaatgatcatttcttcacattagatataggtttaaatttgaattttaaaacttagggtttctatgctaagcttaagaggtcgttactttgtagcttaattttgaccccaataaaattaaaattacgataactcgatttctacataattgatagatcttcgaattatctttccaacaccacttgaatcacctcaatccaagccctagaactccagatatgattgttttagtaaatcagtttttaatcatacgaatttatccaaacctacgaattttttaacatttttttgatgaatcagaaattgtatta

SEQ ID NO: 142963 - DNA, 1150 bp, Cannabis sativa
taaaattacaaagtactcaggttggatgaccaccatctaaagtacaagttttaatttttgcaatttgttttatttcatgttaagctaaagatcagattagaccaaatatatttgatgtaagttacttcgataacaaacacatttttgatcaataaataaataaatatttttatttcaaaattcaaatcgagtcaaatttattagcatgatattaatttaccatccagtgcgtacaaaaggtttggtcaaacccaaaaccccgaacagaaaaaagcgcataattgcaaaaaattataagtgaccaagaatcataagtctactcggtcacttggggggcacctatacctgtacaaagtatttggtaaaataaaacaaacacagttgcatgacgattataaacagatgatgaaattcataaaagacaacaaaagcatgtaaaaccgggattaaaagctgcctggtcagcctgttgtctaaaaaatgaaaaataattccaagtttaaagaccgcttggctggtcactttgtcttaaaaaaaaggccttatggccggacatatattaaaaaaaaagatagaaagaagaagtattcaaatggctagagtcccaggctctttgtacgggtcttcttggccggttggagctggaggatcagttgtctgagcggggggcatgtcgacattctaactggaggtagaagtggtcggctcaaattctctataagccacctgtgaaacgcaatactcgagcaactagtctttggaatcgcccaattaatcgaagtttgccttgggattagccttccagaagtcataaaaaatcttgagacccactgtctctaaggcattcaccttccctccaagcctcgccacctctactttctgctgctcggcctctgacttgtacttctcaacctcagcttcaagctcctcctccttagacttcttctctgcttccaacctgcaaaaaacaactcgaagaatctccctttcttcttggaggctggtcacttctttcgacaaggaggcaatggcagcgtcaagttgatcagaagcctggagatctttagtcagctcggccaccttcttctcgacagcaagaagtttcttgttaacttatcccaattccattcggacggctccaagttgaacc

SEQ ID NO: 142964 - DNA, 536 bp, Cannabis sativa
aaaaactctataaatagagaccttggttaatccttactttacatttactaaaattcaaaaatagacttgtttatttccaaaggcatataatctaaaccctatatgtgcttggtagtttggacaaggtgtagaaaattttttcaacttattggtgatcccccttcaacacttggtgttttgttcttctatttgtctcttcttctcttaactataatattacgtatacacttttatatattatattattatgagaatttctaacatgcatcacttgtgcctagcacttttctcagtgttatatcactattggtataattaagtatcaagtcccatataacttaaaaaaaaatttaaggaatatcgctaactaatcgaaggacgccatctgtagaaattactaggtaccaataacacccaataacaatgctctttttatgttatcatatatagtattatttaatatatatatatatactattatatagatttattatattatagctatatatcatagatactagatagatgttacgtgc

SEQ ID NO: 142965 - DNA, 564 bp, Cannabis sativa
agtctttggcttgcggttggacttcaaggaaagtcatctctgcaaggacaagagaagataagtataaataacaataagtcttaatgcactagtttatacatgcgatatgttacctgatgttggccgagaagtctgcttggaaaggcgtttgtttatccgctcttttcgcttctcaaatggctccttgtacactggctccctctgaaggctcgcgttctctggaattagcttatgttcccgtagctttaaggtcgtgcaaggtagtcaccagtcacgatcttgaacaagaggcttccgagaatttcagcggtttctctgcaagtcgcgtctagcgcaggtcaagccggtctatctgcgaaaataaggaagagcgggttagctcaaggtcacaaggtaacataaaaattaactaagtgaagaaatatgtgacgtactaggtcgacaattaaagtcagtcctaattcctgggaccttaaacacgtaaaactatttagatttccaatcccccatattggaaaccatgccttccaccccgttgatttcagaagtggcccacttgctgaa

SEQ ID NO: 142966 - DNA, 716 bp, Cannabis sativa
  modified_base (268)..(273): a, c, t, g, unknown or other
  modified_base (649)..(653): a, c, t, g, unknown or other
gatttgcatgttagaggagtaagtattgatcttgagagagtttgagtgtgatttcttgatttaattgtggattatatggttgtgttcttggctgagttttcagggaattttctaagttgaaagtacatgtttattgttgattttgttgctggaaaatatggggattgttgagttgaagctcaagttcttgagcttgagttttcttggttaaatgcatgatttagaatagattgtgtaatttgaattttgagagttgttgttgatgttnnnnnntctctgttgtgatgatttttatctgtaagaagttaattttgggtatggtttaattaaggttcgaatatatggaaaagtgagcatttttagaccttaaattctggtattctgggtttttcgaacccagtggccgcggtcagatttttggttgccgcggccaaaaacccagcagagagccatcacttttcccgattttgttttggccataacttttgacttgggactccgttttggatgttctttatatcgttggaaagctcgttccaagatctatatgattatatgtattttgaatgtcatggttatattttatgaaattagaattagggattaaccatatttgtaaaatcttgaattgtgtgactaggattaccgnnnnntgatcaggagcacccaggggtttggaatctctgttattgcgagacaacaggtaagacagtagt

SEQ ID NO: 142967 - DNA, 1062 bp, Cannabis sativa
tataaggaagtatagtagtttatgattgtttattttaatgtgtttccttaaaatccataaagagcggtattaagcttttgtgatcgttgtctgacctacctgacttatgggtttgcaggctaagtcctactaaatggacacctaacgaaatataaggagttagggtaatagggtcgagactggaggcggtaagggaaatcaaattcccagaatccccgtggatgcagcagatgttgtggaaggtttcagggtggtcgacatgaaaacccacctcaaagctcctctggactaaaagcaaagatacacaaaaatgcaagaccgtattcgacaacacgatgaagaaattctgaggttgaggcagcagggtcctcctacagcgcctccaccacaagttcaggctactttaattcctacggtggcggcagaataacctgttgctggcaaccgtatggaaccactgtacgagaggtttcgcgagcaggcacctctagtttttctaggaggtcttgatgtaatgaaggttgagcagtggctcacagtgatatagggaattctgaatttcatgggagtcgttggaaataatagggtgacctatgctacttttcagttccaagaagacgcgctcatgtggtgggaattagtgtccctcacttgagatgtcactattatgatctgggaagagtttcgagatttattcaatgcaaagtattacaacgaggcagtccgcagtgctaagcaaaaagaatttaccgagctggtgaagagtgagggtatgtgagtaatagaatacacaacaaaatttgatcgtctggccaagttggcttcgggtattgtgcctacgaacttcagtaagaaggagaaatatctggcaggtctaaatggaaaaattagacacgacttggtgattactacgaatgaagcgacatcatatgtagaaattgttgataaggctctgcgagccaaaggtgcggtaaagctcattcaggagccccgagtgactccaggtgttggtgggacccccactcttcctactcttgtatatggtaggaatagtggtgattc

SEQ ID NO: 142968 - DNA, 570 bp, Cannabis sativa
taaatgaattgattggtactacttataatatgtaaatgttcagatctataaacacacatgctaatacaagtgtataaacaaaggattttaatatttaaagaaaacctttgttgattcaaagagaagaactcaaatagtaagagcgtaccttaatccatagatagtgatgatcttaatccatctagtagaaatgatctttgtggtgattttgggtaataatcttccaagaaaataaatatttaaattttctaattttctcttttgatggagaaaatgagaatataattgctcttatttcttgagaatcactaccattaattatattatttggatcaaacttcaaataccaatacaccaatatatatgaacacatattaagaatttttatccaacaataaaaccctaattagttttaagacggaatctataaaaggatacatttaatttttcagtcaatccactaaataggaagtaaaaaaagaagttgtatttttttataatttcttttggttaattatgaaaaaattaatctctaattttctctcatttgttgtatttactctaccaaac

SEQ ID NO: 142969 - DNA, 1202 bp, Cannabis sativa
aatataattattaattaatagtaaaaagataagcatatccaaatttttaagctcttttattagattggatcttgtttcagataatatctttatttgttttttttttaactaaaattactttgaattttttgaaagtaaaatatttttttatataagctttatttttaaatgcagttggaaaataaaatggaatattttatgatatttgatgccccatattaaatatgctttgcgctatataacagaattattgatttatgagaaattattgggtgattttttatttatatataataaaataaaaataaaataaatcccaaaaatacataagtgaattctcttttctcactgtaccgggattttatttataaatattcatcttccacaactcacatcagctttcccaaacaaaaccctagattttctcaccaactcccctttgttgttgtgcgattgacaattccaatcatataaaattccaattcagctgtcctctttgcttttgcaggtttgtagagctctggtttaactttggtgccattgtttgttcggcaagagtggtccttaaagaccgatatttggctctccctcatgtttttgtgcccgatataaggtacattgattggtttgaacttcgcaaaaggaaattcaaggatgttgtgtttgataaagataatacaatcactgtcccttatcaattgaatctttgggctcctcttgcctcctcgttggacgagtgtaaagcagtcttcagacccaatattgcagtgttcagcaattctgctggtaatttcctttctaaatttgttaaaaggtttcatgttcatgctgctatttttcttcaatataaagttatattttttattttttatttttttgttagggttgtatgagtatgtccatgatggttcaaaagctaatgcacttgaaaaggctattggaattaaagttataaggcatagtgagtatttcttttcttaattgaagatttgaatctgctgcaagcttttacgtttattagattttctaacttttagactctatattgattcattaggccaggacccctctggtgttgggagccaaattttaacatgaagtgctgacttttcttagctttttatgtggttattttaatgtttaacctataggagtgaagaaatcagctggtacgactggagaagttgagaaacactttggag

SEQ ID NO: 142970 - DNA, 832 bp, Cannabis sativa
  modified_base (750)..(767): a, c, t, g, unknown or other
aaaatatacctattaaaataaaaataaattatgttttaaatattataaaaagaattatataaaattttcttagaaaaataaaaaaatatatatatgatttagaaacaattatgaaaataaaatcaaaatatgtattgaaattaacataaaataatgcgaggcaaaaattttaaaaatatattaagagtaattatttaaatatttttctaacagagtgtagttatcattttatggggagcaaatagaactcataaaaacctataaatttagttttgaccctataaaaagataatgtggcaaacttaaaataaataaatgaaaaaaaaaaaagacaaaacacaacaaaaaaaaaaaatttaagcaaccccagtacagtaaaatagaggtgctcgaaaaaaatacaaaaatcaaactaagtattctagttataatattcaatctcatattatagaaatcttgttataaggcaactatatattaaaaaaaatatcaagatatcattcttgttaaaatatacaaatcatttataaattaactttaaataaactacaaaacatcaaaaaaaaaaatatatatactacttttattaatcatgtacaagataaaaaaatataagaggagtgatcttaatttttttgtaagagagaaaaggagtattaaaaatgagatataaaaatatacacttattatatatatatatatatgtatacaaagatgaaaaaaaactagtttcagaaaaaaaaaaaaaannnnnnnnnnnnnnnnnnaaaaacaaaaaaaaaattgaaaaaaaaaacaaaagaaaaaaaatagatatatatatatattatat

SEQ ID NO: 142971 - DNA, 552 bp, Cannabis sativa
  modified_base (346)..(354): a, c, t, g, unknown or other
aatgaacctatggcttaatttacccttcttcctgaagcgtctgatacccttcactggtgaaacccgcaggaaacatgttctcctgcctaaaatgtaatgtctctgtgctttctctgtgcttcgaatcagcataaaatcagcataaattttctgcctgctttgggaagcaagcatccaggcgttgaaattgtctatagcttcattggtcctttgaactaattctggacctaactacttcctttctccaatttcgtcccaatgaataggggaacgacatttcctaccatatatcatctcatagggagccatccctattgtactttggtaactgttgttgtaggagaannnnnnnnnaggcaagtacttactccatgaaccgtcaaagtccatgacacatgctcgtaataaatcttccagtatctgaatagttctctctgatttcccatcactccgagagttaaaagctgtactatatacttcagcttggtacccatagccctctaaagattcacccaaaattttgatgtaaactttggatccgtatctgacaca

SEQ ID NO: 142972 - DNA, 521 bp, Cannabis sativa
agattatagaatatataagaggaacaggttactccttctattgacaattgattttgagatggaacattcactttattccaaattctaacatatataaaattgttttgacatttatattttcaagattttttagaataatacaattaattgtatgtatatacttacacaataattaatgtgtgccattaaaagccatcactatctatggttaaaacaatatcatcctattatagagacaaaacaagtatttttatcatagaaattataatcaccaccgtagaattattttattattaataaatgttcaaatcactaaattaattatattttggttttttttttttttttatatatatatacgtacatgtaaaagtttatattcatttttacggtaaataatagaataattcatgtaggaattttgagataggattttactatcttgccccctacaccaacaaacaaataaatcaatttctcagggtcaatttcgacctttccctgtttccctgacttttcaa

SEQ ID NO: 142973 - DNA, 641 bp, Cannabis sativa
agtaacaatctgaaaggattgttgaaaccacgtacaaaaaccttgtgtgtttttacttttctataatgtttatttttctggtttcttttggagttacagagttgtcttctgtagttacaaaaaaaattgtttcagtaccagtttcattatttcgcattttattaagtatttaattcaataataaaactagaaatattaaaatacagaatttcatgagtgattgcaattttcttctattatcacattgttgcacaccattgtttgggtagttgctaaaaagaattatgtttctgtgttgctgaatgtgttcacacataatggatattgcgtgaaattaatttccctggttaataactttatgtaaaacatcagacttttgtcatccttgagttggagtggttggcagccttcctttagttggcatttcagttgtatttgaattgtttcactattgcattgtagtttctccatcattatctacactacttcaacaaaagtgcaatctcttgatattagttttccacttgattcataatcagcatagtgctcgttatcatcttaatgattattgttcagtacaaaaatttgtagaggctccataactaaaactaatgtatcaatttttcaattttgttaagcaa

SEQ ID NO: 142974 - DNA, 793 bp, Cannabis sativa
ggctggtcggttgggtgtggggtgagatcgttcgtgactcgtgaggtctggagtggtggaggctgaatgattttttagtgctgctgaaaatgtattgtaaatgatttagggtttttaatttttttaattaataatttaatatataatatataaactgtaataaaaaataaaaatatataatatatttatctaccgggttggcgggcgggttcaacccgaaacccagttccctaaaatctcaacccgcaaacctgcccgaagggtatcgggttgaacccaactcgcccgaacatttttttaaaaaaaaaaattgcgagttcaccagtttgggttcgggcgggttgctcgggttcgggtcgaacccgctcaaaatgttaagtcctagtttacgtggacgacatgctagttaaatccaaagcatgcatgggccatgcggacgaccccgcagaatgatttgaagtagtccgaaggtatggaatgaaacttaacccaaagaagtggacttttggagtcaagtcaaggaaatttttgggatttatcgtcagccaaagaggaatagaggcaaaccccaaaaaaattcaagctttgttgaacatgccttcccccaagatgcacaaagatgtgcaaagcttgattggaaggttgttgccttagtcgattaatttccctatcaatcgacaagtgcattccttttttcaacattttaaagaagtgtcaaaattttgaatggactaaagaatgcgaggtggcattcagaaaactaaaagaacacatggctaaaccaccgattcta

SEQ ID NO: 142975 - DNA, 975 bp, Cannabis sativa
agggaagcaactatgtcgttttcatcttacctggcctctgtttggttgctgagaaaatttgagttaagtctgaaaaaataatttataatatacaaaataagatattggcgttatcagaagggtaatagccaatgagttgataactactcctcttcccaacctaaaatcattcttggacaccgatatgatgacccaatatgaccatccaagcaaaactagcaaatatttatttatatttttcaaacaaaataaagaataagcaaaaaattaataacaaatatagtgggattggctcctaactttctcaataatcaaacacagtctgaagattgagttattcaaataagccaaaacccacataagcaaatgattagttataaacttttttaaaaacggtaaccaacataaacaactactctttcagataaatttttaggagcaaaaaccaagcatacaagaaattccggcattgtttgtgtttctcaacaactaagaaattacaatccaaacaaaacaaaaagcagatcattttgtttgattatggtctcaaattcctttaatgtgtttctcagtaagcaatcgaatcaatccaccacaatgttaaaatgggagaatagtaaggtaagaagtagagtgtggaatcgaacctgagcaaccaaatctccgcctgaaaactctattcgcatggggaaaacttgcgccaccaactccgtcggaatcgaaccactagcttcgccggaaaagggaatcaaaccctaactccggttgagaagaaaatcatacctgcctgagaaggaaatggtaaacagagaggtgaaaatgggagcagcctgagaaggaaatggaaaacggagaggtgaagatgggagaagacggagtgaagaaaatggaaaaccactagttttctatatctggaaaaaaataaaagaaacttaaaaacatgaaaaaaaaaaaaaaaaaaaaaaccacataaaa

SEQ ID NO: 142976 - DNA, 897 bp, Cannabis sativa
  modified_base (140)..(140): a, c, t, g, unknown or other
gtgcctaagccgaacaagaaatgaggagtttgtattgatttcacagacctcaacaaagcatggcccaaagactgttttccacttccaaggattgatcagctcgtggatgcattagaagggcatgaaatattaagcttcanggatgcttattcaggcaacaatcaaatcaaaatgcatccaccagacaaagaatatacaagtttatgaaaagatatgggtctatattgctacaaagtaatgtcgttcggtctaaaaatatgcttgagctaaataccaatgattggtaaacaaaatgtttaaagacaagatcggacgaaatattgaagtgtatgtggatgatatgctcgtcaaatccaggaaggctggggagcacatagacgacctggacgaatgcttcaaggtgctcagataatataatatgaaactaaatccctcaaagtgttccttttgggttagctcgggaaagtttttgggcttcatcgtcaatgctcgaggaattgaagccaatccagagaagattcaagccctcgtagatatgaagtcgccaactaaaaccaagggagtgcaaagtttgacaggtcggatcgcggcactcattaaatttgtttcaaaatcaacagataagtgtgtcccattcttcaatatcttgcaaggaaacaagcatttcgagtggacggaagaatgtttaaaagctttcccaagagctaaaagcacaacttgcaaaacctcccgttctctcaaaacctctggacggagaagaacttgggatatacttagctgtaacggaacatgatgtaagtgacatgctaatcaaagaagagaacagcttacagcacccagtctattacatcagtaaaagactcattgaggcccaaggccgatacccattgatagaga

SEQ ID NO: 142977 - DNA, 571 bp, Cannabis sativa
cgacatactgagcgtaagtacggtactgagcgtaagtacgggtgtcaatgatatatgatgggtgtcaatgatatatgatgagtaccgagcgtaggtacgggctcacccaattatgtgatacgattttcctggcaacgtactaggcgtaagtacgggcgtcagtgacatatgataagtacctggcgtaggtatgggctcgtctaattagatgatgcgatatattggtgccagattgtggcatgggctcacctgattaggtgatgcaattatatgatacatgggtgcagggttttggcacagactcacttgatttggtgaagcagttatgtgatatttgggtgccaggctatgacacgggcttgcctgattaggcgatgcaatacaagattatcagattaaagcatcgacttgcctgattaagcatcgacttgcctgattatcagattaaagcatcaacttgccagtttactcctcagggcatcaaatatctgtctgccctcttcgtcctctacgcttcccagaaattgggtatgccttctccttacgaagttgcctggttctttgatttgaa

SEQ ID NO: 142978 - DNA, 964 bp, Cannabis sativa
aaaaaatctttttttaatttctatatttaaacattacaagattaaataaaaataaatttatttttataaaactattttaatatgtttataaaataatttgtaaataaattaaataccatctgaaacatcaagttacactaaaaaaagtaatctcatgggaacttaaacaataaaataacataatatagcctcaaaatataaaaaagaaataaaaaagtttcttttaatatttgtcatcttttttggagataaaaaaatatatgttttttttcacatattaaaacagttattttattatttatatatgtgtaaaattttgaaataatttttgtaataaaaagtaaccaattgatatcctattcacatcaaaagtaattaaatgattacttttttttcaaaactctcaaaaagcgaaaatttctacaaacgagatttttccaatttttttttcgatttttagtaattattttaaattttggtatgtatgctgacgtgacacaacgttattagtgcaaataattttcttaaagatatttttataaataaaatcaattttaggtataatattgaaaaaaccccaaataaaaataagaagattcaatatgtttttagtaaattttaaaaaattaatttagatctttaaaaagatcattttgaatgattaagaaaattaagaaagaaattaaaattttaaaatcaattaagcaatttaaaagattatttattttttattaaaaaattcaattagatataaaaaaaatattaaaattttaatctttgtaaaaattaaatttacgggaacaagattgagtctattttttattttctccaaaaatccagatttatttaagtaaacttaacatttattaagtttaatttctaactttttttggaaaataattttatatttttattgaatttttaattatttttctttatatttttaagatacgagtttataaat

SEQ ID NO: 142979 - DNA, 816 bp, Cannabis sativa
  modified_base (26)..(70): a, c, t, g, unknown or other
ttaatttcattgttttagaaattcannnnnnnnnnnnnnnnnnnnnnnnnnnnnnnnnnnnnnnnnnnnnggtaaaacatattccaacagcctcgcccaatgttaatgcgagtgcgattatgccaagacttgcaatgctatcttcggtgaatccacaaagattcaccatacaaggccttaatttggctttctcaagccccatcttccttagtgtttccttataaaggatttactgagctcccattgtcaattaacactctcttgatccttttatttgcgagttaaatggttatcaccaatcgatcaatgtgaggatatctcacgtttttctcatcttcctccttgaatataatgggaggttcttcgtttttcaccttcttggagggttctggggcaaatgtagactgctcgttctttatctctttgatatatcttttctaggcgttattactttcccatgcgatatatggccctcccaaaataaccaggatgtcctctccctcaatagggagaggttgtaacccctgattgtttgggttattgggcagactgggctggttgtatccacgacccttccttttacagtactgtttaaaatggcctcgagcgatgagactatctatctcacctttcaattggaaacattcgtctgtcgtatgcccaatatccttatggaacttacaatacttattaggatctcttttgatccttgcactcctcatgggctcgggcttgtcgaaggcaaccttttcctcatgtgcgagataaatattctctcgagtttcattaaggtcggtataaatagtatacactggc

SEQ ID NO: 142980 - DNA, 554 bp, Cannabis sativa
aaccttgattcaattaatatgtaatatttcacgtgcatgaaagttaaaagaaaatacagagctggatattgctccaccggagctgtggcaggagggcgtgcgagagcgagaatactaacatttcaaaacttttttaatctaattatgtatttatttatatttattactttgtataaattcctaagtagaaattacataaattataaacttttttgtagtgtttattccaaaatcaacctctgacggagcaagtttcgacgatcgcggaagagatcttcggtctgacgatgttggaggtcacagacctgatggaagtcttctgtgagaaattgggtgtaacgctctatcgcataggaacgtcacgtgtgtgattttataaactaatttaatactaacaaattaattaattattaaaaaacgtataatattaaaaacttaactaatataaatcactaagggtctgtttggaaacaactgtgtaattactatgcagtataattactagggtagtaattacactgtatagtaattacattgtattttaaaatacaagg

SEQ ID NO: 142981 - DNA, 745 bp, Cannabis sativa
  modified_base (439)..(442): a, c, t, g, unknown or other
ttattaagttgatcattttgatacgtgaatagtgtataatttttaccatcaccaaataagatatttaaaataaaaaaaaaatcatttagtttcttttataaattattcaaataaaataacaaaatttttaaactcaaataaaatcaaatatgtaccatactaaaagtattttctttttattgtgactaatccagagaatatttattttatattatttaagagttactagatgttatcaaaaaataaaaaaataaggtactacaatactaattaattttttttaataagttatacttagtatctcatatgcatctttgttacctaccaataaattacttttaaatcatattttttactagttagttacttttaaaactataattttattactaaattatattattgatcaagatacatttatgttatatatatatatatnnnnatatatatatattatatagctactttatgtgcctccaaacatatttagaattaataaattataatataacttatttttattttatattttttaaaatataaatttaagatactatatgattttttttataattaattttaaaatttattaaaattgttctataaaaataagtatataaaaaatacaatttagttactttcagtaattaaaaaaaataatttttttagtaacttatggaattggttagtatatttaattttgtctaattaaatttaatgtttgacttagtgtaacttatatgat

SEQ ID NO: 142982 - DNA, 876 bp, Cannabis sativa
  modified_base (507)..(508): a, c, t, g, unknown or other
gttttatatcactcggtgcatgtagaaggggatttactttgtgtcgtcctattttgagtatcaatggcactttcttgaagacaaagtatggcggtataatgttagttgttgtggcatacgatgcgaacagccaattgttgctggttggttatggtatcgttgacaatgagaataacgactcttggacatatttcttacagaagttgagggtagcaattgggatagttgagaactaagtgtttgtgtcagataggcatcaaagcattgatcatgttgttgaactcattttccccaaagcagtccactgtgcatgctatcaccacattgttatgaacgtgaactccaagttcaatactgatgtttttcacaactaaatatataatgttacttactcaaggtcaaaaattgaatgtgatagagagttcgagaagcttagaaagatgaattcagccattgctgcatatgtggagagtatagggtttgagaagtgggctcacccgtattgtnngggcgatagatacaatatcatgaccggcaacgctgctgaaagcttcaatagtgttacagaagagtttaggaaatatccaataactactttggttgaatttatcaagttcacgctgcaatcttagtttactgattgcctcaaaaatgctgacaaatgtacaacccctttggccacgctctttggaaaaaaacttggcaaaaaatcatgaaaatgcaaggttcagacgcgtccaacgaaatggagccaatttgtaaaacggttgtaggggacctaacgataaaagatgtggtgatgtgaacctagttgaaaggacatgcacctacggcgtgtttacgttattgaaactcccttgccttcatgcatgtgcc

SEQ ID NO: 142983 - DNA, 563 bp, Cannabis sativa
tgtccagttaattacaccaggattgttattcattgtcaatccgtttgtacattgattcataataattaaactaaaaacataaacattaataaatgaataatagtttcgattcactaaatatagcaacgtatgcgacttctattgctcgagagcgctgttcatattctggtataagctcgcgggcttaggatagacctatcatctgattaagcctaacatgtctgcgttcttagatagtcgcatttatggacatcgtatgacgagctgataaaacctagacatgcgagtctatattggtttatagaggctgtttggtcatcgggaccagctcgcactatagagaataaatctctatgtttttgcaggagtatagaaaggatacctgcacttatcctggtacatgcgagttggattcgttctttggtcccacataatgcgagttacacgaatacgagtagactttgatcatactcgcatcatctcgctgattctagctcaggcgaggtttaaactcgaggagtctttcatggatatctgagcctttcttggaaagctgaatacac

SEQ ID NO: 142984 - DNA, 780 bp, Cannabis sativa
gttttgttctctcagaatttgttcaattttaaagtaatcggatctttccaagttcttccgaacattctctaaatactttcccatttttaaacctttagcctggttatccttgaggacctggttcacaatcagctgtgaatcactatgataaatgagatttttgactttcaatgcctctgctatctttaagccggcgatcaaggcttcatattcagcctcgttattggatgcgtcaaattggaacctcagagcatagtgaaacttaaagccttctggcgatattaatattacccctgcaccccaaccctgttcattggatgcaccatccacatataacttccaggtttctgcgtctcactgattagttggaatttcttctggagttataccttctatcaagaagtcagccaaaggttggcccttgatggatgttcgaggatggtatgttatgtcaaactgccccagttcaatcgaccattttatccatcttccagaagcatctggttttaacaaaacttgtctcaagggctgatcggttaaaacttttatggggtgagcctagaagtatggccgtagtttacgagacgcatggactaggcacaacgtgagtttttctagagggggataactagattcttcccctagtaacctcttacttacattgtaaataggttgttgatgcttgccctcttctcgcactatagttgcactaattgcatcttccgagatggctaaatagagaaacaacgtctctctagttattggcttcgccaaaactgg

SEQ ID NO: 142985 - DNA, 1033 bp, Cannabis sativa
ctatgtccgagttcgcgtcctagtccagttacagttttgggtttgggtcttggtcctggtcctagtcctgttcttgggtcccaatcctcttctggttttggttctactttcaagtgatggggtacgggtcgagtccaagcatcgagtcctggatcataagtctcggggtgggtcctagttcaaggtttgggtctagggtgaggtcccgaatcttgggtccgagtttggttctttgttcctaggtccagccctagttcttgggtctgggtctaggtccgggtcacggtcttggtttaggtcccaggtcacaggtcctagtctgggtccaagtctcagtatgggttcaggttgagttttggtttaggtttgggtcctgttacagtcctaggtctgggttctcgtcccagtcctggttcgattccgattctgggtccaagattgggtctggatcccggtttgggtatgggtctgggtcccgattcaaacactaattatgggtcatgttgaagcctcaagttcagattaagatctcggtcttggatcttagtcttgttatagtttgagtcccaggtcctgggccgagtcctaagttttagtttgggtccgagtttggggttgtgtcctggtagcgaggtcttgggttccaagtctaaggtcgggtcctgtgtctcgagtctagggtcaaattttgggtctcagaccccgcttttgaggcccagtattgggtccatgtcccccatctaggtttcgatcctttgtcgaagtctcacgtctcggccccgggtccttagtcccggtcccaatccaggttctagtcccagtcgaggttcaaggctcggtcctagtctgtgtctaggtcccagtcctgatctcagcccggtttgagtcttgggttcgagtccgacttctggtacgagtccgactcttggtctgggtctgggtctgggtccgggtccaattttcggtctgagtttaggtcggggtcttggtctgggcctgggtctaggtttaggtctaggttctggtccgggtc

SEQ ID NO: 142986 - DNA, 630 bp, Cannabis sativa
ctctataactaatcatcaatatctagtacatcatagaatccgtacatttttcagattataatttttagaaaaacatataaataataataagtagtataaatttgagtaaatttaaaaggtggtgacattaattgtggctaaatctttccttttagaaataatggggttaaatttttcaattatattttgtgttaaatttaattaaaaaaaaaatagattgtgcaaaatttactttacatttaaattattttaaagaagagaagtaaaaattttagataatgcttaagtattaagtagaggtattaaaaacgactttatataaaattattttttaatatatgttattgttttttagatttttttaaatattatactaaaattgattttatttacaaaaatacctttaaaaaaattatttgcatcaatatcgttatgccatgtcagttcagtatacataccgaaattcaattaccgaaaatagaaaaaactcgaaaaatcctatttccagaaattttctttttttgggagttgaaaaaaaaaacaactatttagttacttttgatgtgaataaaatattaatttgcactacaacattaagcaccaatagcggcgggcccctcggccgctatt

SEQ ID NO: 142987 - DNA, 585 bp, Cannabis sativa
ctatgtaaggcctctttttcagcattattaatcaataagagatattcttctcctctgattttatctctgaaattctcatatggtatcagacgttacccttcccatttcaatggcaaggccctctacgagatcacaggatgaggttcttccacctccacctgcaaatctttgatcagaaaatccatttgatgttaattccgcacaaacagcagctcccatgactgcttctcgacgcaccacctccagagttcgaccccaaatcaacaatgaaacccacgaagaacactctccaagaacagagaatacccttgctcctgaaaggcgaacccatcccattcttgatcaacatgccaataaggatgcctcaagccccttcttcctcagttcagacgaccacccaggccttgttctggtttcgactgttcttcatggtatcaattaccaatcttggaagcgcgggataaccatggcgttggctgccaagaacaagctcgccttcattgacgagtctcttccacgacccgaatctggtaactctcttctcccttcttggcttcgttgtaacaatatggtgatgtcctggtt

SEQ ID NO: 142988 - DNA, 799 bp, Cannabis sativa
  modified_base (68)..(75): a, c, t, g, unknown or other
aaaacccaagcaatagaaccaagctttaaacacagaaacacatttcaccatgtgagctccaagctttnnnnnnnnaactcaaacttggttaaaccccacaaacaagcaaccaaacctggcttaaactactcaattaagcatataataacagcagaaaacaacactaaacaagtcccacaagcacagcaagctaattgaacaatccaccattaaaatcaagatttagctcaaaacttcacacttgcttaaaatcaactaaacaccaacaaaaaattgcttgaatcaacattttaaatcatgttctaacttcagaaatcaacaacaacatacaacaacaagtacaacaacaaaactaagcatgcaaccaattcttacttgatttttcaagaaactaaagaggaaaagagtaagagctatacatagagcttgaattgcacacaaaatcagcttgaaataccaaagaaacaccaagaatcttgctgctcaaagaggggccaaaatagagagagtttgagagaaaaaaggattttttgcttttcttgattttttttctaattttgtaaaaagtgacaaaataatttcattttcttatttcagccaaaataaacttagaaaatcaaatttaaaactaaatattaaaccttcactaaagacaaaactcataaggcaaaaagaccaaaatgcccttgcccacattaaagagttaaaagcactaaaaggggtattttgggaaaattctaaattctcgaccaatcccgacattcccaatgtctaataaactgccccaataaactaacat

SEQ ID NO: 142989 - DNA, 811 bp, Cannabis sativa
  modified_base (564)..(571): a, c, t, g, unknown or other
tttcatgtcactcagggggtagtaaggcataccacacggataaatgtaaaacaggccaaatgtttaacaaagttaaaaagcagaatatatattcaagcataaatataaagtattcaaacccaaagaaatgcgctaaaaaagataagggcctagggacggggcttaagtgtctcctctaaagaaaatatataataaattgtcttagaggggggaagaaggactaaatatataaaagaaaaaaaaaagatagtgataatagcgatggtgatcaacgattggcttaatcaatgcggggtggaagacgaggccccctgcgctcctccagcaaggcatcgagtctcttcttcttctactagaagcggacgagaaccttctcaggctttggatagaagtcaagcttaaggttttggtcgttagtctaccaggccataaacgcgccatcatcgaagcgtttggtgcagtactggcaagtaacgggagctaggagctcatctctttttgctttcttttcagcctgagccttgaagtcacgaagctccttcacctcaacggttaggttggctnnnnnnnncaagtccgcctgatgcagctcctctaaggacttcagcttggctgttaggtcttccactgtctccttggcctccctaaggtcgcgcctcgccctagccacggcctcatcccgggccttcaactcctctgcctctgccttcagcgcctcctgatgcctccactccgtttgagcctcctcccggaacgccttcatctcagccgccaagtctctcagactcttcatggcctcgtccatgcgccc

SEQ ID NO: 142990 - DNA, 882 bp, Cannabis sativa
aataaatggccctgtaagtttcaaatcttgtactaatataccatctaactcaaataaatttaaccatttaacatcagaagtggacatcttgtacatactctccaattaaataggattctcacttgtatttataaattttccacttgatgcactttgagtgtgaatagagaagagttagcatttgcacataagacaaaataaagtgagttagtggtccaagacttattaaataataaccaatatacttttaacttcaaaagcatacaacaaactactcttttttcttaataaaaaaataataactatacatacattgtaatttattttttttaacagaaagagccttaacttgtttaccatacactttacactcaaaaacaaaaccacttattagagacgtcaattcaccatacaactcaaatacaaacacacacaaccttgccttcaattaattaatagaatttttgatcaacaaaacgtgtggctaatactttgtagtcttaccataaattctcattaaaaatttcacgtcaacatatataataggtcctatattatatatgtacatcaataaaagtagaaaaatacagtttgtttcattcagtaccctcaaagactaacaaaactataccccacaaacacatattccaattttcactattttcccatgtgatacggtcaaacaaaatgacaaaaaaaatgcctaaaaagcattcacataaccccaaatattctcagtacaaaacaattgaagcctttaaaatggagctattggtacaagtgtatttacacatataaacaaaactatcatccacaaagaaatccatggtgttagacatacataataaatagtataagaataattaatgataaaagtcatac

SEQ ID NO: 142991 - DNA, 723 bp, Cannabis sativa
  modified_base (103)..(109): a, c, t, g, unknown or other
atatgtgtttatttataatcgttgtagaagttcatatttagggtgtctggtaaaataattccaacagagaacctaacagtgaaaagtcgagagcagctttcgnnnnnnnactctaagtgggtccacattcacaagtctcttcgatgccctggacttcttcttcatttcagtgtactcatcgaaccacctaggccgtttctcttcctccggttctccactagttctagagttgtctctaacacttgtacctcagaatcctgagtatccttgatgttggtgatctacgtgttgtcaggtgtacagaacatatcatcattatccggtctataaccatttgggagaatgattttatttctggtgactaaggctcttcttgtggttgtggctgtggctgtgactgtgtatatggtgtcggccttccaggatcttgcaatagtctcactatggtcttcaactaatccataatcactgtctgtgctcttaacagagcggtatagccttccctcaaagtaatttgctccctctccacaatctccaaccttaccataatggtagggtatactggttcgcaagccactgaggtgttgggaatatatgttgacgggcaaagaggaggatcctatgatgctacagatggggcaacactagactcatctggtagtgaagacgatgctcgtggtggagacagtgcaggtggtgtagagtctctaaatattcgggctg

SEQ ID NO: 142992 - DNA, 1797 bp, Cannabis sativa
  modified_base (800)..(824): a, c, t, g, unknown or other
  modified_base (1762)..(1769): a, c, t, g, unknown or other
tcgtatttgcaaatactcgccttagcaccaagtctccaacattgaatagtcttttcttaactcttttgttgaagtatcttgtgactcggtgttgatatgccgcgttgttgatttgcgactcagttcgtttttcatcaagcagatccaaggataagtttagaagttcatggttttcttcttgattataaaactctattctgtgagtcaatatgttcacttcaacaggcagcattgcctccgagccaaatgctagcgacaaaggagtgtgtcccgttaccgtcttttcagtagttctgtgggcctagagtacttgaggtagctcgtcaacccacctgcctctggcagcgtcgaacttcttcttgatagtatcctttaaggttttattaacagcttccacttgtccattcgcctgagtcctggacactgatgagaagctcttgatcattttgttccactcgcagaattcagtgaccaagtcatcatcaaattgggttccattatcggatactatcttcatgggaattccaaacctacaaacaatgttcttaacaacaaagtcgatgacttttttgtaggttatggaaactagggcctcgacctccgtccatttagtgaagaagtcgactgctactactacatacttagctcctcctcggccagtgggtaatgccccaattaagtcaattccccatatagcgaatgggtagggcgaggtcatcattgttaattctgttggcggcacgcgaggtatatgagaaaaccgctgacacttatcacatttcttgacaaactcatgggtnnnnnnnnnnnnnnnnnnnnnnnnntatccttgtctaatgatctttttaaatagactttgccaacctgcatgatccctacaaaagccttcatgaatttctctaatgatttcgttcgcttctatagggagaacacaccgaatcaagggcatcgagtacccccttctatacagtttgccttcaattattgtgtagtgaggcattgaatacaatagttttcacgcctcgtttttgttatttggaagttgtccgtcaagtaaataattaataataggagtcatccatgtaggagagttgtctatcatcttgacatctcccatttcacatatgcttcgctcgcttggcacttccaccggaactaagttcaattcatccaagtcactctatgagaccaattttgctaaggcatcagcgttggagttctgttctctcagaatttattcgatcttaaagtaatcgaatctttccaagttctttcgaaccttctctaaatacttcgccatttttaatcccttggcctggtattcctcgaggacctggtttacaatcaactgcgaattgctatggcaaatgaggtgtttgactttcaatgctttggctatctttaagccagcaatcaaggcttcatactcagcctcgttatttgatgcatcaaactgaaatctcaaagcatagtgaaacttaatgctttcgggtgatattaatattacccctgcattcaaaccttgctcgttggatgcaccatccacctataacttccatgtttccgcttctcggtatacaggcggaatttcttctagagttataccttctattaagaagtcagccaaggcctggcccttgatggatgttcgagggtggtatgttatgtcgaactgccccaattttattgaccattttatcaatcttccagaagcatctggttttcataaaacttgtctcaaggtgtaaagaccgcttagttnnnnnnnnaaattagcagttaattatggaaaattat

SEQ ID NO: 142993 - DNA, 536 bp, Cannabis sativa
aaatttaaaatagtttaattaattaaaattaatcttaaaattaaaaagagcattataaaaactgaatcttgtgggatcctgaactaatagtggatctagattgagcatgccatcgctggggttgtgggaaccaaagaaacaactgtctcgcgctcagggccggcccaaccaatttgggggccttaggcgaaaaattaaaattaggtcttttattaaaaataaaatcattaatcaatacttcataattttaactttaaaaaaacaatgcctcataaattcttttacatttatttagtaaatttaaatattctaaataaaagtacaatcaaaatattattcaaatttgttgatcgatctatcccaaaaatatgtcttccttcttcaagtttgtcatatcgaacaatctctaatctataaaacttaataataccattagtttattcaaaattattagaaaaaaataacacagattgattcatctaaaaatttatctttcttgctttttgggatgcaaatttgttaatcaaatcattgta

SEQ ID NO: 142994 - DNA, 1771 bp, Cannabis sativa
  modified_base (203)..(209): a, c, t, g, unknown or other
  modified_base (387)..(393): a, c, t, g, unknown or other
  modified_base (606)..(614): a, c, t, g, unknown or other
ataattatgccccttctgttaggttccgtttcttttatcgttaaaaattagtttttttaccccttgaactttgaccaatataaaattttgtcccattttataaaaaataaaataattttaaaaaattataatattcttttttttaaaaaaaaaagtaattataatattatattaattctgaaaaaataataaaaattattaannnnnnngataaaaatattaattttacttaacaaaaaacttaaattattcctaaaaaaatattttcaaactttattttatttataaacacatatcttaaaatatcaaactaaaattattgagaatctaataaataatttaaataaactaagatttttttcgaaaaaaaaaatcaaacttatttannnnnnnaaactcatatcttaacaaataaaacaataattaaaaattcaataaaaatataaatttattttgaaaaaaaagctataaatgaaattgaaaaaatattatgtttacttaaataaatctacatttttttgagaaaaataaaatatacttaagtttgttcccgtaaaatttagtttttataaaaattgaatttttaatatatattttttaatatcnnnnnnnnntttttaataaaaaataaattattttttaaatcgtttaattagttttaacattttaatttacttttttattttcttaatcattcaaaataattttttcttaagatctaaattaattttttaagatttcctaaaaaatattaaatttttcttatttttattttgagagggtacgatttgataattgtcaaagtttagggggcaaaattactaatttacaaagacacgtcatcattcaaacagaataatgagacaaaacctaacagaaggactaaatttctgtaaattaaaagttcagggggattattaacaagtcgtgtattttagggggcaaaatcaatattgtcgaaagttcaaggggtaaaattgttaattattcatatagttttaatctaataaagttaaatagttaaagactactaattatacaattcataattgccataattattgtataattagtcaaaacaataatttcacaaattattatttttcccttaagaatttattttccatagaatttaattttcattcaaaattcattcatcaaatgaaaaccttccccaatattgtgtagatgtgactcggggaccatgaacctatattttcaagttccaataaattaaagattactatcaatctcatcaacagaataatctagcttattaatttcattattactccactttaaatatggaattgcactctttgataatatagaattatatttacagaattcttaattgtagtctattgatataatcaatataagtagctcgccctctaattcttagttcgtaattagagttagtcaaaatattattttacccttctaatcatctcttgattccttatataccattaattcaaagtgaacactctataacttattatagatttggatccaactgatccaactgttagcactttagcactctcaaaaactctcaaaattaacaaaaattaacactataagggaactaatattcgatcctttaggaaagcttggattccactattgtatagcatgctcatagactctcatgttattaagctcccaagatagaagttgtaagaatcatcttctctaagaaactttaatgagtgaatcaaagaattcaataaacacaaataggagttcatgtatactcaggatttag

SEQ ID NO: 142995 - DNA, 1428 bp, Cannabis sativa
gatgacaacttagactagcgtttacaatatgaaacaatgaagagattcataaaataagaataaatttgactctcgcctacacgggacatcgttggattcttattttaatcaaaattttcatttagttttcctcttagttttttcatttagaatttgcttaatgttatatcattggatgaatggtttataaatcatatacttgtgatgtcattttaatttctcttataaaattgagtggctcaaattactatagtcctgacattctatctcgaaaggatataaatcttcgatcttagaaatctcctacttgtatatgtttacgtaaggcaatttaaacttagagttagactagtagtggtggtccaagaaacaatcattactcattgtatatttggtatagatctaagtctttgactttaattttagattccaaatagaaatttttaaatttcaatttccaagaatgcattagacaacagtatgactttcacaagttattaatatccattttctatcaatggattcaaactacatgttaatgtgtggatttgagtttagtattctgtgatcaggattcacttggactattctaagaactctttatagtaactagacctaggcctcaaaagactacaaccacatcaattatatatctatggcattaacatcttgttcatagtggttttgacaagatcattatttgcaaagagttaaatattcctataaccaattgaaagtaatttcatctatgttcgaatatggatgtacattcaggagtggatataagtttcgttatattcttaagacgatcagtctagatatttaccttacgcaaagaaatttgaaatgcttaagaaatttcatgaatttctagcaatgttaaaaaccattaaggtaggtggttaaagatcttgcgagctgatatgggtggagaaatatttggtggatatgtagttcagagatcataaagttaaactttaaattgtatccaaacttacctccctaaaaaataaaattgcatattgatgaaagtaaaaggtctatgaatagttactagcagttgcctaagtccttctagggatgtaccctagtgataggaaaattttagaatgatggaatgattgtgtacttattgtaaaccattactagattcatggatgtcctaatcatgttgagaaaagctagaactgttaactaagttttgcagttttgatagctattataagtgattaggggtggaccatcctatagtcattaagataagaaagtgtttgtttcaacaattttttttttctaagaaaatgacaaagtctgaaaacaaagccgcaaagtagaggagacatttttcttgattcgaaaagtgttctatcatcttattctatatacgatggtcccactacctctgttgtcttgacacaaccgcagagg

SEQ ID NO: 142996 - DNA, 555 bp, Cannabis sativa
atatatatatatatcatgctaatttgttaaaaatatttcagagttcccaagaaaaaaataatcatatatgcttattattagatccatgtgttttggggttgatttctagttgagtaatttttgtaatacaattggttgatatgtaggtgattaatagttttttttttttttttaattttatggtgattgtatcaatgttgtttttaagttgcttttggcttgggtactaatgtattgatgtttggttgatttgtatattaaaatagagttgtattttaattatttattcgttcatatttagttgtacaattgttagaatatcaaatcaaattatcctaaatgagtatatgttgtttatttttttttttttggtacatatatttttaagttgaattacaagtgatatttagttgtttctaagtttattttatttttcaacaaaagaaaaagtttgtttgtttttcctgaggttattatttagttgtttgtttgttattatttagttgtttaaaaaaaataactttctatttattttttatggatacatatattttt

SEQ ID NO: 142997 - DNA, 666 bp, Cannabis sativa
agaaaactacccacaaggtcagatcttttctctttataaattggagcatttggtgaactactataaatttgttatgtctctcttataattacttaacaactgttttattctcgccaatctagcgaacgagtgtgacttagaagtctagtctagatttctgagttaacatcttcaaattataaagaaaatgtgataaaattaagttttcaacaaataagttaaacattagagcactcacaatagaagatctgaaatagctagctaagagataaaaaatggtgaaaatggtactccatcaaatgagctgttacaactaaaaaatttagctcatgaatagtgcttaactacatgtagaaaagcactttacattgagctataaatattatatatcttcttaaaatatttttagaatgtatcagtatgtaatattattatatttatttatttaatttttaaaataaaaaatatattgaaagaaataattttgggtctttttcatttttacacttcaaaacaatttttttttttttgcatttttacggaattctacatagatacccctattgcaactagcactgcaacctaatttgcaataaaaagtcgtatagaaactcctattgcaactagcgctgcaaccaatttagaaacccaaactgtaaatttaaa

SEQ ID NO: 142998 - DNA, 608 bp, Cannabis sativa
tgatccaatgaacacccctatttaatacacattattgtatacaattagtgtattatttgaatgtatagctagcattactcaaatcaaattatgtagaatatacttcatcaatagtcattaaagattgagatatctttaactattttcttattacatgttgcttattaacttcctttttagttaattaaaaaaaattttcccttttcgtccactcacccacgtgtcacaatgacagagtaattagtacttctgtaataaaatataatatactaaaacattagaaacctaaaacattagataatttttacctgttaatcccttaatggaggcatggttttttttttccttctttttttaaggagcataatattgggaaattgtaacaaatagccttaaatctcacactaatgaaggttaatgtctatttttttttttcaaaaatgaagtaaatggccttttataaatgttaatacctaaaatgcccttagttatatagatgaacctcaactctatttttttgatttgttctactctttgcgcggtgaaaaaaacaatatacctttaatgaacataaaatcaatatacttcaatcaaatataactatacct

SEQ ID NO: 142999 - DNA, 1123 bp, Cannabis sativa
aatcttaaatttttatatcacactccataaataaattaatatatagttttagttttatattttttaataattttattttttttagatttaataattttaaatttatagaattataatattcagtgttatttaaattttataattattttatcattgacaaatacatatattattattattattaaaatataggattttttaatgtttcgtgtcgcgcttttcgggcttgtcgcgtgtcgtgccttttggactagtctattcgtgcttatgtgttgagtctgttgtgcttctcgtgtcatgtcgtgcttaatcacagatttgctatgtcgtctcgtgccaatttatagcacgtgtcgtatcgtgcccaagcccattttttttcatatctagtcgtgctcgtatcttccaagctcatgccaatttcgtgttatgtcaaaaagcttgtctcatatttaaaacactagatgtgttagttagcctagaggtgttcatcaaatcgaatctgcactattttgctcatagtgtatcttatccgcactaagtgtggattttgtattttggatccaatccaatctacataatagctcaaatccaatccaattcgcaaaagtgcggattagatcggttattttggattggttacttttttatattaaattatttaatatttatgaaaaaaaaattccacataattagcaaaaaaataaaacacattgtttcatgtctctaacaataaattaaaataaagaaaataacaaataacaaattcaaaggaagaaaaaaaaaaattgtatgtacaaagaacttgttaatttatttttaaattgtatgtagaaaaaaaattatatttaagaatggaatatatatttaatctattaatttaaaatataattgtgttatatgtattagatttttaaattactatttttttactttaaaatattatttgtatgtataattttttatttttttttataaatgtgtatggattagattggatcggttacttttacatgtcaatcaacatccaacctgcacaagtgcaaatatccgcattttgcagattgaattggattggatcgactattttatgaacacccctaagttagccattgttccaaca

SEQ ID NO: 143000 - DNA, 509 bp, Cannabis sativa
cacggatttttcgaaaaataaatagaattttcaaaaccataatatacacttaactttcaaattgactcacatttagaacattgactcataacacacaaacaacacaaaaaataactaaaatgaaaactaaaaatttttaagttcactcccaaacttaactgacacattgtccccaatgtgacactaaagactaaagaagagaacatacctggggtgcctccaaaaagcattgtcgttaacgtcatataaccggacgctgatttcctcttgcaaaattcaactaggataaagtccacctcttgtattcataaggacccttgtaccaaatgacaaaaaatgtcctatagtgtacaccaggcgtccacctcctccacctcctgtttcgtgtcatgcacctgcattttcatcattagattcggaactcaaagatgatctttccattgcactacgtaaaggtaaacgccaatgtatatatcatatttcttcttttgtttcttataatcatctct

SEQ ID NO: 143001 - DNA, 1539 bp, Cannabis sativa
  modified_base (1478)..(1487): a, c, t, g, unknown or other
cttacttcaggaggaaataagcacacatcaatagctaaagggagttcactacttggtgtgttttagagattaaattagcaaggtggattacaaaagggttgcgacaaatcactgagtctaaatttgtttaagtcaattgcttttgtaaactttgatactttactaattgatttcattctctgggtgtggccccgtggactagtagtgtttaaaagaacactgataccacgtataattctcttatgtcaaatttttaaattctacactatttacttctggtttgtttttgtaaaattatattttgtagtgacaaaactacattttgctgctgtagactgctacaacagcattttcactgaaatttagtataattattggcatttttgtaaaaatttaatttttcaatattaatgattgtaagaaacatacacaaaaatatatgttatattcttctaaaaaaattgattaggcaagattaaattctttaatcacctataaaacaataatataacactaacttagagacaaaataaaaaggagaaaataataatctatatatagtctataatacaagagtcacaatgatttttaaaccacgtggaattttttcttaagaacccactaataagtaaaattaccaaaatttaaaaaaaaaaaacaaataaaatatatatatatatatataaaacaacacataacatatattaaaactttcctaggatgtcacctcaccttcttttttgctttcttttatatatatatatatatatatatatattgatagaaaactctcacaaaattttaaaaatagaacggaaataatataaaaatactttttcattttcctttatcaaggtaaaaaataaaatacttatttttatctctgatttgaccatttaaataatttaaactaaacttaataaaaaaaaaataatagcgaaaaatgctaaaataaaaaaaaatcattttataaaaatattatgttctaatatactaaaattgaaacaataaaaacataacaaaaaatatatatataatcaagagtgttcaagtagtcatataggatattgacaatcactttttatatatataaaaaaaaataaaacagaaaattttaacttttgaacaaataaacattaagagaaaatattttagttataaaatattaattttaagttgaacaaataacaatgtaagaatattgaatagtataaataatttttttttttcataaatatgtataaaaatattaattactaaaaataaaatatttataagatacttataggataaaacattagtcaatcacccatagaagattaaaaaaaaattagactaagaaaataaacgtacgtaactaaagtattatccatatagataatacatacaagtttttaaatatgtgtcataaaattagaaaaataaaatgaaaaaaaatataaaatgtgaccttgattcttttcttttctttttttttnnnnnnnnnnatatatatttatatatgggtatgctcttaatgggtattaccatgtatgggta

SEQ ID NO: 143002 - DNA, 684 bp, Cannabis sativa
aacacctgcacgctgcagtcaagtttggattcaaagcatctaacaacgaagccgagtatgaagctctaatcgctggcataaagttagcctgggaaatgagagccgagcacattgaaatctgcagtgattcacagctggtggtaaatcatgtatccggagaatacgaagctcagggagaaaagatgatagcgtatctcaggaaaatacatgacctgcttgcacagttcaaaagctaaggtctcaggcgaattccaagggaagaaaacacaactgcagacgcgttggctcgattggcaagatataatgtaagtgataaggcgaacttggttcctatccagttcctcgaagagcctagcatcactaacacggaagagatcgaaatgattgatacttcccaaaactggatgacagtgatagccgcctacctcaacactggggaactcccagataatcgaaatgaagctcaaaagatgagatggaaggttgcactgtatattatactggagggaattatgtacagaagaggattctctatcccgttgcttagatgtgttactgaagaagaagtcgcaccactcctatctgaggtgcacgacggattctgtggaaatcatgctgtcgggtagagtttatctaataaaattctaaggcaaggttatttctggccaacaatgattgaagatt

SEQ ID NO: 143003 - DNA, 554 bp, Cannabis sativa
atcccacagaagactgacttataatcaagaaaaaaatcacgccctcttagtagaatcacttgatgaaattgaagaaataagagccttaggaaagctaaagctagtagctcatcaacaaaaggtggctcggtactttagcaagcaagtgagggcaagaaaattatttgtgggagatatggtccttagaagagtgttcttaaatacaaaagacagcacgactggcgtattcagacctaattgggaaggaccatatcaagtaatagaagtcatagaatctggagcatacaaactcggtgagtataatgaaaacatggaacatgttctagtaccaaggtgatataactgggaacatttaagaaaatactaccaataagtgtacaaggtctgatgacccatttaaagtacataatgctcaaacatctactcttaagtagatggccttctgagcagacctcgctcaaaggtttggataaaatgagtggcacgcaggttagatgaccatctctaaagtacaatttagaaaagaaaaaacaattgttttatgttttaattag

SEQ ID NO: 143004 - DNA, 1435 bp, Cannabis sativa
  modified_base (696)..(703): a, c, t, g, unknown or other
  modified_base (1311)..(1336): a, c, t, g, unknown or other
aatattctgacaattaatgtggcacagatactgatggagtatctcacttataaatatagggttggggtaaatttcatctaaagagagttaagagagcgaggaagtccaaactccaataccgaaagctatcgtagggattgaagcacaaagatcaatggctggaggtatatcgatctttcattgcatatattatcgatatggttatagtttttcagcattatatatcgtttatatagatgctacatttcatatactatattatagtataatagttggtatcagagcggtttttatctctgccttgattttgtttgagtttcatatatatatatatacgtatatacggtgttcatatatatatatatgtatattatatatttatttttgtgttcgtatatacattcatattatatatatacactttcatacgtataaacttttatacattcagttcgttcacattaatatatatatattatatacatatatacaatccaaattcatgttaatatatatattttctatttcattacgtatatatatacatatgtgttcatatattcaacatatcatatttgtttatatataaatgctatatacaaatatacacatatatacatttcatgtttatatatatacataccgtacattttttttaggtatatatatatatatttatacatgcattatacattnnnnnnnnatacattcatatattaatatagattgttctaagcatgaaaactcattttaaaaaaacaaagaaatctccaaattttctggaaaaagtttttcggacccgaaaatttttggtgattttaaagtctttattttacgtattttcgatgcatgaaatctatatgaatgtcttaatttttgcatttagattcatttggaattgatttggagtcttttggtcgtcgaaaatgcaatttctgatcgggcttgggtcgggtccgtcggacccgcgtgactgaaaaacaggtcaaaacgacccagtttggcttaggaagatggcccaaacaacgtgtcgttttccacttagtggaaaaacgacatgtcgtttttcatgttatattggttgttgtcgtttgcccaaacaacgtgtcgtttttcgtagttttgggcagcccttcagggtaaaaaacgatgtgtcgtttttccctctgtgaaaaacgacaatgtgtcgttttatacatgcatttttagcgcccgtcaaaatggaaaacgacgtgtcgttttgctttttgcaaacacgacatgtcgtttatgctctgcattttcccaaaaaaaaattccgaattttttatnnnnnnnnnnnnnnnnnnnnnnnnnnattattttcctatttttgtgttaatttagtccataaattgcatttagtcaattttctatttttgtttaatacatatatttaatataaattgaaaataga

SEQ ID NO: 143005 - DNA, 784 bp, Cannabis sativa
tcttcttgttatttccaattttctgttaagtatttacattcccagctcgagtactcgccattttaggttgaatactcgcatttgctcttcaaacaattttttcttattattagaattatcatatacttttggtgttgcgaatttttctcgacaacatttggcgccgtctgtgggaaacgagaagtacattcttactaaattcaagaaggaaaatcatcatggctggaaaccaagcaaacggaggtgttaacaacgaatccatcaacatcggaatgatgaacgttccgttatctagagttagaacgccacctggtggagtagggagaggtaatgtcagacctctcaatctattccctgaaaccactgacccccaagtcggagaaacatccacactagtagcaacaatggggcactttccaccgatcacttcggcggtagtatccgagggaatcttccagctcaccactgaccagtatactgcgatccaggaccaattacgtgccctgcaggtcaaggtggatggacagaacagggcccgacgccccctcgagcccccactactcgcacaaaaaaccctcaggtaacgaattctaggcgtcgtaataaccgtgttcgcagggaacgaaggaccaaccccgaaggtgtggacctgaatcagccaacctcaagagacaaatatgcgaggtatcccaaccaggagacgcggatcgatgaagaccccgaacgacgcaatcctcacagcaggccttcacgagacaacgacattgtaaagaccgcttagttt

SEQ ID NO: 143006 - DNA, 693 bp, Cannabis sativa
  modified_base (387)..(394): a, c, t, g, unknown or other
ttaagaatattgacaacaatactaactaaactatacaatgtgtgacactaactccacaaacctttcaaaactcatattcttttttgttatttacttttccattcaaaatactctattaatgacgcgtttattaaactataattaaaattagaatgatcaattgaagaaatatatcagtttaaaatagaaaataattagaaacaatattttattatgctatttactaaattgtttataaaaaaaaaccaaaatcatattattttgtttatataactatgaaagataattggaatgctttaatttgacaaaattaccattattagaacatatatttattttctgtttatagattatttttaaatgacatatttgtcttttttatttttnnnnnnnnaaattaaaattaaaataaattaacttaggaaatggaaaggtattccctataaaaatgggagaagaaccattccctttattttctccctaatttgtgttggtcccatactttcttcatttccaaaatttagtaaacaattgtataagattgtgtgtccctttattttctccctaatttgtgtgggtcccatacaaaatttattttcttcctaatttgtgtgggtcacaatggtatcagattatgatagtcagtagtcccgtaatccgtaagggaaaataccgggtaagctgtgcaatccc

SEQ ID NO: 143007 - DNA, 651 bp, Cannabis sativa
aggaagtttaacacttctcccacgcaacaaaaccagaaggacaaggaggagaactatacatgcttcaccctcctaatggagaaacctgaggccatcttcatggccactcagggaacaatcccatacagaaagccacttcctatcaaaagataattgagcaagaggaacttgtcgaatttctatcggtttcacaacgactttggccatgacagtaacgacggttaaaatttgaagagggagattgaattcctcataaggaagaacaatccccatctggtcgttatgtgcagaatgacaaaacttaggcacaaggtgactaaaatggagatccaatgccactaccagtggcgggtcacttaggggtcatcatggtaaaccccatattgcaggcaagaccaacaaagctagagagtgctctgcttggacactctgtcatgagcctaaaagtgaaatcctggctgtcaaagaaaggggctctaagcaaccacagcttggggaacccacgatctctttcacagaaggagatgatgctcaagttagtttcctacacaacgaccccctaatcatcactgcacaaatcaagaatatgactatggtaagatgcatgctgggcaatgatttggcatcttgcagtcaagtgatgtatggctt

SEQ ID NO: 143008 - DNA, 665 bp, Cannabis sativa
gaagtgaattgaatttgagccccatggtggttaccatgtgcgactacccgagtttggatgtccttttctatgagtggtattgagagctaggagtctaatggacggtgtgatatgcatttgacgcttaattttgtgattaaatgtggtctctctaccttgtttatacattttgataatggtgatgagatattttattttaaaagctaagcttgcagaaattttattaaaccgaggatcctttgatattagttgttttcctagtgggctttataagatcacccctattttatcccatttcaggaactcagtatgatgctagtggatgaggatggtaccgttgaggaagaaagtcgttattagtttagtcttattctactctttaagctttcaatgaaactgactttgtatttaagttggaatggtgttgtggtaattgcaacacgcaagtatacgtacctttttaacaagtattactcacaaagagtgaggtcgatcccatgaggattgtagttaagtacgttaaaattaaactcttgcttctatttggtagaataaaattagagataaaattaaactagaaaataataagaacaataaaaatcaggaagcaagtaaattaataggcaaattaacaatgaataaaagttaggactttcgatttcaat

SEQ ID NO: 143009 - DNA, 1147 bp, Cannabis sativa
aaaacaaagtttgcttcctagaaaaaaataaaattgatagacacaaataatatcaatcaaagtagttaagtagatatttaattatgatatattgtaaataagaatataggtgagtttccctttcagaatctttaatattaatttgtgacttcaaaattaaatttcttcttccacaatgaatattaagtagatattatttatttattttgggaatattttatctaaaaatagctctagtgatcatttagtcaactaaaaggaccacttaattaatttggtggcattaatctaactaaaaattaatttacaattctaataactaacaactaattccttcatttctagaatatatatattatataacttgtatatattagaaagttttacatagtacactaaaaattttgcaaaaattataaaaatacgctcactgatttttttttttttttttagttttacagtttaaatttttttattcataaaaaatacagattttaataaattattcgatattcttttttggttattttattgtttatttataattgtcataaaattagttttctcattgtttttgattgttttatagtttattttgtgagattaatttatagttttttttactctttactgaaaaaatttatattttataaataaaaattttatatcttaaaattgtaaataaaatataaaaagaaaaactatttgttttttttttaaaaaaaaacctaaattttatattgttttagaaatataattaattaatacataatgtttacgtgtagagtagtaatacagtaattaataaggttcacaaaagttgaacaagatttgatatctttgtctaaaaatttatttctttttaggatcggctctaaaatttagtgggtcataaaataaatttggactcttatttagaaaataattatggtattttttaaaattagtaaaaacatgtgtaattttaaaaaatgataaatttttttggacctctaagctaggtgtgccacctaatttgttacatatatatatatactaggtgaatgtacgtgccgagccacgtactgctagtttcatttaagattttggtctttttaagattttgaatgtattttatttttaaagattacaaattttttgtttgaaa

SEQ ID NO: 143010 - DNA, 538 bp, Cannabis sativa
ttctagagaatttggtgagatttgagatttgagatttcagtgttttcttgatatttggtgtattgacatgctatctatttattgggaaacttttagttttaagtttaagtccccgaaagtgatttagtgtatcatttatcaattttacatatattattgcttaggggcctgtaaaccgtcgagcagtagtttccactcaggttgaccgttacacctgaatttgaaatcaaggtaagattagtataataattacataggtgtttgcatgtttagcatgcatgtttaagaattcctaatagattacatatatgtaatggcgatattagtgtacatagagttgcactaaataccgacggatatatgtttggcatagtacgaattgatgttatcatagtacaactagagtactgagtataggctgatattatggtcaatcgtattgtcgtacgaacattctagactcagtaaacatgggatgcaggataaaattgtaatttggtgtatgggcgcctagttataatttggtttatttatgtta

SEQ ID NO: 143011 - DNA, 816 bp, Cannabis sativa
gatgttcgataaaatacgaaaagagagtgaggatccccaaataggctaccagaggtattgtctcccttttcattagtctagatttaatctatatattttgttaagatcatcgggcttatggttcttattagattaaattatttttaatcaactagaacttaaccatcttaggattgagatcaattgatctaatgtcaattaagtgacgttgacttagaaaagacataacaataagtttatgataccttttccactgccaatattggttcagtccaatgtatagtcgatacatctaatgcaagttttctttgctaatgtcttggaaagaacattccacttataaatgtgtaagtaaaccacatcgtttattatcacgtcagtgtaaattcagtgcacttataaaccgtgagactaagtaatttgaagcatataatctcactatgtagacaatactataatcagaataactatatgttcagagtttaatataatttatttattaaacatataatcatgaaagtaaacatgtgaaccatgcaacataaaataatttttgactttttattaattagtaaataagattattgaattaaattttatttatggcataaaatttcaatacttatgtggcatttaacgaatctagttagcaacataacattcaaaatgactagttgcaacaaaatcataaatagtactgacttttgttgccattttttttattaagaccatatgtgtaataatttgtggcaaatatccttattttttatagggactatgtaatgaccgctttaataatttggattagtaaaggca

SEQ ID NO: 143012 - DNA, 765 bp, Cannabis sativa
taatttcctctttccctagcctaactaagcaccaaatacggttcaaagaaaaatctgtccaatcccataagttatccaacagattaaacacgtccttagtttatcataaattaattaaattttaatcttgacgtcattaaactttaagttaattttattcaagttatttgatttgttcattaccaatttattctacggactagttcatatttatatttagagaatttagagcataattgagtggaagtattaaattataaatatggacatttataatgatagttttatttgagctaagttgaagtatttaatgaaacaacactcattttaataattatattagtttattgataattattaggtcaactgttttaatgataaaatataataaaatagtaatttagtccatattaattataaattatctagaatggatcattgatcgatatgatagaaataatagatgattttgtagtttatctatactttgtatatagagtgttccgtgaaatcaggagtacaatttcgagtctatagtggtaggggtgttcgcagtgcgggtggtgcaatttttgaccattttttcaaaccaacccgcacaggtagtttttccaatttcccaaatcgcacccgtatcgcgaagctaaaaaacctcataaaccgcaccacaaaaattggtgcggtgtagtttttgtgatttctgcagtttggactatcaccaaataattaaactatcacaaatataacaaaacttgagcaacactt

SEQ ID NO: 143013 - DNA, 866 bp, Cannabis sativa
  modified_base (815)..(817): a, c, t, g, unknown or other
tttccctttatgccctcagttagttaaagccttggccctgtataaatatgtgctctgcacatattgtaattcaattattccaatcaattgaatctttctccttctttttcaatttgactctccgcaataggagttaaaaaggggaagagacataatatatttgatgtgttcacagttggatcattttctctacttgggttgatcctaaggccatatgagacagagacagagaaagagaaagaggtgttgagattttgtatgttgagttttcttattcaattgacaatggacacttctattgaaatagtcttgttgagtaaagatcccaactttttgtacttgtttggttctggtttgtactgtttcattttgattcttggaaagtgttatttggattcgagaagcagtaatttattatcacttgaagaaatgccaactttgaaaaagggattggagaaagggaaggaattggaggagcaaagatattaattaccacttaaaatggtgattcagaaatgtttgaggcatcactataaaaaacaaagaaaaatattaaaaacaaaattgatgcaaattgagaaacaagagctcaataatttctcagttaaggaaacagaaagtttgttgaacaaggaattggagaaacgaaaaatcaatcgagacctcatttcttcatcaattcgagaagggcataatcgagaatatttgttggagaaagaattggagaaattgactgtattggaggaatttgagaaagtggaggaatttatcactactacaaaattgggctttagaggcggtttttaagggctttnnncgtcggtattggcgaaattcgctatcgacgctgttccgggtgacgctaa

SEQ ID NO: 143014 - DNA, 832 bp, Cannabis sativa
attatctatcagataaataagaatgtaagtaactgagagagatgcaagacaaacaatttatacacaaaaataagcaagatcgaaagtcttactaatatgcagtgtattcgagcaaccaactggttaaagaacctgcattgatgcgagtattttatgcaatatcatatgagataaatatgcaatatattatgaatttattattgcaaaacgatgtataatcatataatcattagatatttgtatttttgttgaacatattagaacatcaatatttttttttgtaaggagtttattttgatatttagttatattttctattctaataaaatgtttataggtttttttttcttgagtaatattatgtttgtttataaaatttattaaatctttaataaatatttttttagttatatttaacgttggcaattgaaatattattaattaaaaaataaatattaattatagtatgtatttatttatgaatttatttaattaattttataataaatatttactatgaagggttatttagtcaagttaaagtattccgattactttttctagttatgtaaacaaaattaaatgattctgattccttttctagtcaatttagtaaacaacataataaaataatgattccgattgttaaattttttattccttttgatttctcctattcatttattctgattctaattacaatttagtaaatgtgtcattaatgaatagagtattcacgtagtaccttgacaagtttgtggtgatattcatcgattataatattcctcttcccgacttttacactattcttcaagttcttcatgcacttcct

SEQ ID NO: 143015 - DNA, 680 bp, Cannabis sativa
catgctgaaatcctattcagctttgaattaggaagccacaccaagcccacattgagaaaaaaatagaatttttgtatcatcatatgggcgggctgcgacccgtgtgttttttcataaagtggtaattgatttttgaataggcgagccgtggcattcccattcctgggccgcggcccgtgtgcttcattgcccacgtttttcacgcgtataatccttattttctaggcaggattccgatttttcacattgatattttgtgtgatcttttatcttttattctcatcttttttcgtcgatattttttaaatcttcatctattttaaatctgcaaaaataaaagataacaagggtacaaatgctccaaatacgattaaaactaaattaaaattatactaaaattagtactaaaaataacctaacaaaagtttagagaaccttatattatttgcagcagaataatatggcttcttccactcaaatctctaatccttgttcttgtgatagtctatcacagagtaataaaaaaatctgagcctagatctccttcaggtgttgggtttttcacaattttttacactatgatggagtacttgacttgatatgagtgtgcatgtactctatcactatagggataaaattttgatgaagaaagagatggagatgaattcaaaatagagaga

SEQ ID NO: 143016 - DNA, 601 bp, Cannabis sativa
gttcttatattgccaaaaagtaattaagtaataaagagttccataaaccaaattgcaaagtcattttcttcatgatagcttttgcttttttcaaaagtggtgtcattaatatgctattacaaaatttataattatcatcactttttctaatattagatccttatttttatcggatttggttttttcgagaaacttacaaaaatactgaattttgactcaatttttataaaaatactgtcatacggcaaaaataacttttatactgccttgagacttttttttttctttttactgtaaataccaaaaataaaaaatgaggtctctatctttcacaccaacatacagaactacaacagcaacaccaaaacatccgaaaaacaaccattaaatatggtgagatgaagcagaaatattaaaactattaatattggggttgtcatagtttttctaatattgtttttgggttgttctactgttgttttgtatgtttaacaaatgttagttttaaattacacaagttaaaccaatcattgaatatttgtttgaaggtaactagattgaaagaattatggacagtaatagtcttaccttccattgaaat

SEQ ID NO: 143017 - DNA, 549 bp, Cannabis sativa
  modified_base (47)..(63): a, c, t, g, unknown or other
  modified_base (186)..(189): a, c, t, g, unknown or other
ttctagatagttatttctagtaaataattatattttctaatatttannnnnnnnnnnnnnnnnagttgaaaattaattattttttaattaattttggaccaaattaaattaaaatacttttcttagtattagattagaattaataattaagtttttttatacttaattatttaattcttatatttnnnncatttaattaaattgaaaatttaacatttaagttgattttattcttgatacttaaatattagttattttagatcatttaattaaattgaaaattattttttaagttcgaaattttaatttcagaacaacttaaatttgaataattgtcaaaatatattttattaatctttttttttaataaattcaaaattacattatttaaatgcagataattttgaatttttttttgaaaaatatattaaagttaaaaactaattattttaattgattttagatcaacttaaatcaaataaatttttcattaatgattaattaaaataaagggattaaaatatattatattttaattagaaaataagt

SEQ ID NO: 143018 - DNA, 514 bp, Cannabis sativa
agtgtaagcatagtgaacttcctcttcattaccaaccaaggcggcaagttatacatcacaagcaaaactggccagcaactatacttactgctaaggctggcatgtggattgattccgtccccagaaagaccaagacggatattcctaggttcattgccaaattcaggccacctagcatcaattgatttccaagcgggtgagtcagctggatgtctcatcttaccatctacctttctatcgctggcatgccaaattaaattttttgcatgattggcattttgaaagaaccgaaccaaacgaggtattgggggtaagtaccataatacttttgcagggacaccaacctttacctcgtcagaattctttttcttttgccacatagactcaccacaagtgggacacgatattacatccacaaaacatcttacggtataggatgcaatcgttaggacatgcatgcattttttcatattgcatgcctaacgatgaaagtgtcttcttcgcctcatagaaa

SEQ ID NO: 143019 - DNA, 702 bp, Cannabis sativa
aaatatcaaaatggaatgaaaattaagtaagttttgctgtcaaaaaatgagtttatagagttaagtgttacaaatcataaaatttaattagttttactgccaataccctattataattaagaggttatgactaaataaaagtacatacaagaaaatatattaaacaccaaaaagtaccaaatgtaataacaataataaaatataatccttaatactatatcataataaaatcatttttaaataaatataatatttatacatgtattataatttaatataaaataattagttttacataaataaatttataaaatatgtatatgtatacttgatttatatttctgtaagttagaaaatatatagcaaattacaatttaaagagggtaaatagtaaataccattttgaatattatgttttgcaaaagttactaattggactatctgttttattaaatgacaaaatagtccctatatttttcaaaatggtacaaatagaattttgaactgaatttttatcaaaataaaatttaataaaaatctaatctaaatgtgctatgacaaaactgttcacattttctgcttctcttcgtattttgaattgtctttaagttggttatattaaaaaaaaattgtgaaaaattaagctcagggttttatttttactattttagaaaatacaaggttcattttatcatttaacaa

SEQ ID NO: 143020 - DNA, 593 bp, Cannabis sativa
gaaacaatggtggaagcttataaatggtggaagcttataaaataaggtggaagcttataaaataagaatagcttataaaataagaataaccttgactctcgcctactgggacaacgttggacttttattttgatagaataaaaggttactagaatggtatccatttttgataagctgactactctattcaatgaataatatctttgactttcgcctaccaggacactgtatcagtttgttagaaaccttgataattatttaagatatgattgttttgtacttttacatgtctttcctacttgctaaatgcgtaataatttctgaattgtgtaagaatttatattgaatcttcatattattttctgttattaattattgtagtaccaatttcgaatctttattgttggtctaacttaatttgttattttaatgaaacatatctcaaaggattgtcatccgttagacaaatagaatagtgttagatctcaatagataatatttgtaattgcgacatctagttgtacatccaaagatggcaacttagactagtgtttacaatatgaaacaatgaagaaatttataaaataagaata

SEQ ID NO: 143021 - DNA, 1074 bp, Cannabis sativa
  modified_base (1043)..(1043): a, c, t, g, unknown or other
ttaattaatcacgatttccataaacctcgttgattagcatcgagctgcacagtatgttacaaaatcacataatacgcctatgctagatagggtgttacacttagtccagaaggaacttattgtttcagattaagataaaatgtcacaacaagatgttcctaaataccaatagtaagaggttaaatgtacacttgtgtatgcattaaaccggactcctactgttgagtgggagtcatcaatgatgtaatcaaacaaggaacattgggagagaatcaagaaagaatctctaaaattgacctatatgttagatgataggggtgtatttagaatacctaaatctacatcaactcacaattttatgcccgagatggtggttactctggggaggaagaattattctagaagggtgtaagaactcatctataataatttagttccactagtgaagctaaataacttatatgcttttaaaaggcactcaaatgttattcaaatagaagaaagttcttaactgtttttatctctattctattttggatagaattagagttgtcttctgtacattcaaatacacttatcaagcagtaaacaattcattatccctaaaggagtaatacatatagaaaaatgatgttgcataatatgttatgaacataaagaaagtaatgatggagaaagttattgcttactacaaccttaaagttcctattacttgggaatagtcaaacacactacacttgatatggatatcaagataatgaattgattgaaatgcacttctagttttatgttagtgtatgtgggagtttgttaagattttatgccctaaataaaacacattttaatataatctcatttgtcatcaatagaagattagaagtcatttaagttaacctgttattttcatgattatagtttaatatacaatttctgataattgcagagcatatagtaattcaaatttatagtgatgtcagcacaatggaaagtaattgtgattatatgcttcaaagttttatcccatgatttatcagtgcactggntttacactgatgtgataatcaacaataaagt

SEQ ID NO: 143022 - DNA, 1047 bp, Cannabis sativa
attttaaaatgtgtaaaacatatattcaaaatcaaaaataattttttagttttttttttcctaataaacttttttgtcttttttttcaatgttgtaaataaaaagaagggaattatctcatataatttttttttacgatttaagttatttcggtggttgctatgtaaatttaagttgtgatttaattagattgttccattagttgctatgtaggttgctatatagatttccgtaaaaatgtaaaaaaactactttgaagtgtaaaaataaaaaaatctcttaaaaaaatatatttaaaatttactataacacattattaaaaaaaataagacacgaaaaatgctaattggtttgtaaaataatattatcttaatttgttacttattagttaacttttaaaatcataattttattttagttatatatattgttcataaagatacatttatgttatttttttgtttgcttatttttatgtagtgacgtttatgttatttttaaatatacttaaatctaataaagtacaataaaatatacaaaattactaagtagcttatattagcaaaataagtataattttcttttcaaaataagtttatatagaatatatactatataataacttttatataaaattacaaatactttttaataatatgaatcagttgacatattattatttaagttattacttattacttttttttttttattgagaaatataaaaaaaaactataaggttacttttaattctaaaaattttattcggtgaaaaacctataattcttttcttgtaagttatttttaaaaacaatcgaaaatattctacaaaaaaaatttgtgagaatacaataactaaaaatgttacctatttaatactaattgaaaaaaaatatatgtaatttttacgagtagatcgtaatagtgtaatttttcagcacaaataattatttttgttgtgacttgaaaaatataataggaaattaattaatattgtttcataatataaatttatgcagcatacaatttagtaacttttaactatta

SEQ ID NO: 143023 - DNA, 1196 bp, Cannabis sativa
tatatatatatatgtggaattggtgaaaaataaattaaattattacatgtacttagttctaaaaagtaatatatacaatccaaaattgatagtatgcaaacataagtaaatatatgtgtatatctgcaatgaaattttatttcaggaaatagtctaataaaattttgttttatgtttgtggtaaattggaatcattcaacaaatcaacaaggcttactaatttcattttaagcaaatgcatttttaaggaaaaacaatgtcttgctatttggaaactttggcatattttgtttggtgtttgagaacttatcaacacctttactctagttctaattgtaattttttctatattaattattgagaatggttaaaaagtactattggtgtatagtatgttaatggactagcaaaagtcattagaatccctagccagccaaaattgttttatgggaggaaccccttttttgtggttcccatcttttttttttttcttttcttttttgtgtgtgtgttgaaaaatgctaaaaaatattattagtgtttagcatcctcgttggtattatatcgctattggtacaattaaatatcaggtctcgtataatttaaaaaaaataatttttaagaaatatcgctaactaattgtaaaataccacttaaaaaatatattagacactactgatgactaatataaatacttttttttaatcaataaagaaaaaaacatgagagggtactcaaatttcctacattatgccttcacatcaaacacttgcaattcttatttctcttatttttcctttttgtcagtttatttttctttctctcttcttataatgggaaagaagaaattacttctttgtaagagtatctctaataaaagccactaagcctagcttagtggtgagggagggatgggaaaaaagggagaggtcatgggttcgaacccaggacctttaagctattaagctaatatatgattgtaaaaatcattacgctacactaaaaaaaaaagagtatctctaataaagtgttatagaaatagtgtatatgtattttttagtctatgaaacaaattaaactctaatagtagtgtataatatgctctaaatttaacacatgctaaaaattgtgttaaatttaacataaaatataaaaataattacatatgacaccattttttataaaaaaaaatatat

SEQ ID NO: 143024 - DNA, 729 bp, Cannabis sativa
tctaaatttaatactaaaaataacctaacaaattcccccaaactaaacttttactcgtcctcgagtaaaacactaactaaacattaaataagtcaatatcaaaaacatgtgtaattttcaagtagcttaaataacatgattatgaaaaaattcacttatgcgtataatccaatatttcagttcaattacacccttgacagctttcaatttgttttcgtttagctcacgaaaccatagaatgcaattaacaataattgaaccactttatgcatgctaattacaatcatcaatccactaactcaaaattccatatgcttgtaatactcactattctccattaatataaattaatgcacaactaggaatcagaaggtctttttaggcatgtctataccataagcttctccaatcatgtcacccaaaatatttttcacacaatcccaatacccctttttctaattgcatgagagatatatattttttttttcaacaaggttgcaacaactttatatttatctttttttcttgatttcacactggttgtcagatttttttttttctttcaagttgttgccaatcattttttttttaatatattctctcaattttaatacttttttatacacatgcagcaaatttcccatcaaaattcccccaaactaaagatctacttatggtatacttagggttaaattgtggatattcatgggtttatctttttaggctcaa

SEQ ID NO: 143025 - DNA, 701 bp, Cannabis sativa
taatgatattattaattgtaaattcaataaagatataaacaaaatttaattaaaattggtttattattttctccatcaatatcaaatcaaaaaatacaaactaccactaaaaaaattattttattcaaagtaccatatatcaaaaataaacaaaataatataaaatttgaaagataatgaattattctcaattttagtttgtctcttaatataagtatttatgtaaatattaatttaaaaaaaaagtatttatgtaaatatcaaaatatatatatgagattcaccatttttttgtgaagatatgtttctttattataatatatatatatatatatatatatatgatatactaagaatatcgcttacaattaatattattgtctaaagacttaatattaatgtgtgttatcttgagatgtgattaactaatttttaaatttactgtttaattatgaatattgatgtgaggttgttttatttgttttatattcatctggttcatcttttgttgtctcaatatctgctaatatcaattctattcctatactcaatgggacaaattttaaagattggaaaatgaacttatttatagttatgggatgtataaatttagactatgcactaagggatgaacaacctgcatctctcactaaagaaagtacatgtgatgataaaacagaatttgagaggtgggatcgttc

SEQ ID NO: 143026 - DNA, 719 bp, Cannabis sativa
cctactataattattttaaaaagtaagccatttaattataatatttacaataaaatatatattttttttacaaaaattaaacttcttcttacaaattaaatttctcttcttagtataaaatatttttaaataattaattattttcaaatgatatttaattattttgttacaattagatgaactaagtatgagaccccaagctagtcaatcgataacaaaatttgtatatctatctatctatctatatatcaatataattttaattttctaacatctccttttatctcattttaaagttaatacatacattcactacctagtttatcattaatggttaatctattcggtaattagccttatttccctagctagatgttattcttactaaatcttttgtagtttgaaagatttgtcaagttttcacttgaccataatttacaaaagtttaaaataatattactttgaaatgatattttattggatgtttatgaacacaaataaaaagatcatacgaccaattagaacaagcaataagttgcaaaacaactccaaaatagagttgttatatacctgatgacgacacatcgtctaatgcacactataggcatttttgtagattctgaaagaaagggaagaagtcgcgagctactttaaatatttaattcttcaatgagtgtagccattttttttttctgaaaaatctttcaacttatttcact

SEQ ID NO: 143027 - DNA, 546 bp, Cannabis sativa
tgtgcgcttggtcgggtgctcatgcccagcaaggggcattgctgcctttgcacccgtaatttaggaacgtggcagacttcttccacctctgtccgacccaattcactcctaagcgcattaagtatctgtctgccctcttcgttctttatgcttcccaaaggtgggatatgccctctccgcatgaggtaagctggttttttgatttgaagtccacccctacacaaagcatgttggggtacttctatttctctcaaccagacttcaagtgcttgacaagcaccagggacaaagctgttagccaaattgggcattttaatgacgagtacttcatggttaaaggtatgggcatcgcccatactcggttccagaaaatccccacatatcaccgccctcccttcactcttgctcttagagatagagctcaaaggcttgcccaacaaataggggatgaccgaaatatcattcagttgacctccgaggacaactttgtgaatccactcttagaacttacaattgcactcccagacatatatagagcatattata

SEQ ID NO: 143028 - DNA, 1108 bp, Cannabis sativa
agtaacaatgtattgctagttaaaaaacaaattacaaacaaattagagaaatgttagcaaatggtcttgtttctctccttagtgaaaggtaatgtctctttagaataataaagcaaatgtcttttttattttttgctatcaaaaatacccttaactgtatataaagtattatcatgttatagtacatcagttggttttctaattataattagagtatgatatattctattgaatgaataattttttttttttttgctaatcactttttattaacaagtgttaatatacattaattataaaattagttatggtgtatatataaatatgaatttatatatttgatgctaacttagagagagaaaagttatgataatcaattatttgtcctaagataaaaaaaaattgatggaatatattaatttttagtttgtgatatatatattttgtattatggtatatacattttgtgtactaaggtttataacattcaacaaaataaaattataaaatttaaattgtataaaaatatacccaaatcctaacataatataccattgtaaaagaaataatatactagtatagtaaaatatatatatatatgtatatcttaaacatagaaataatataccctaatcaaatatatctatatctcaaacttaaataatattctacattttttttatttcactcaatatatactatattacataaaagtgatatacctgcaatatgaatataccataaaattaatattagtgatgcacttaatttttttcgtgtccttcatgatatactaaatcacataaaatagatatataaatcttttaaattaatataccagttagttaataagtttttttttttattctttccctcaatatttataaaagacatatactatttttttttatttattattcatataaaaatatataccactcttatataccacaatttaatgtagatatattatatttttttttacataatcttatttaaaaattaatataacatcatagtgtgaaataaaaataacaaaaatttagtttaatatttcacaattttttttcctttcctttttcatataccatagaaaataaaaagaata

SEQ ID NO: 143029 - DNA, 645 bp, Cannabis sativa
taattttaataatgtaagtaaacaaatgtaagggaatgattaccttactattgattcacattatttattagtaaacatgccataaaccctgatccctgaccctgatccctgaccctgaccccaaacccttacccatacccctaccctctaaccctaacatctaacccctaaaccccaccctaaaccctaaaccccaaaccccaaacctcaaaacccaaattccagcccattcccttccccattcccattcccattcccattctcgctccacggcccattcccatttctattttcatttacattcctattctcattcccattccccagccattgccattcctactcccattctcattcaggatccctgacccattccatttcccattccaattctcattcccattctccggcccattcccattcccgttccctggcccattcccattcccattcccatccccattcccattcccattcgcatttcgattccctagcccattcccattcccattcccattcgcattcccatttctattcccattcccattcccgttctcattccaattcccaatctcattcccatttcccggcccattcctatccccattcccattgctcggctcattccaattcccattcccagcc

SEQ ID NO: 143030 - DNA, 745 bp, Cannabis sativa
tgtaatttttggtgttgtggttggagtgaaaatactttttgacgccaaatttagtgatagtgtaacactaaatttagtgtatccttggagatgctctaaggggctaaaaattggaagagaagtcaaattgggctaaggcgtggttgtgcctcgacactagatcttagtgttgaggaagaaactcgtaaagagcccactacccaaatttaggggtgttatgcctcggcacagaaatctagtgtcttgacccgtgtcttcaaaagacttgggaaatatcttattcgtacacacggttgcggcataagaattgagtgtcgaggcctgctcccttaaaaattcaaaaattgatattttcatatctttttatcttttttcggctataaaaagaggtgaactttcatattttaaaacaagcaattagggagtacaaaaatcagagaaaagaaatgacctagaaggcttttcaaacatttcttctcttctattttcttcttatgctcttatttaatttgtgtcgattgtttacaatgaacatgagtagctaaacagttattagtgtgttgatggatattatttgacatatatttatggttttaatatgatttgaatactcccctaattttttatatgttctatttcattcgtatttatttcttttaactgtttggccatcaattaattgttgatacgagatctgagaagtgagtatcaattatgctatagtaaaataggaacaaattttgat

SEQ ID NO: 143031 - DNA, 924 bp, Cannabis sativa
aaatacgtcaacaccctatgctagttatggtgttacaacatatgtcaggttcttaccattacttatgccttgatcgcccaactggggatcatgaggctcttcgcaattccgcggcgtttgggaccgcgccctaaaaattgcgttaaggtgatcacgaagatcacccctatgaacttggtacctccctcatcgcggtgtctccacataacctgacctggtataaacactaggagtgcaactttatgaggacgaagaaccagattcagcacatttacttcatttcttggctgagccctactacgtgggttgcgtcgctctgggtcctcttccagctgtacctcgcgatttaaattttgtgcgacttgatctcttggcattggatgattcaagtcgagtccttcctactcggtcctgcattccctgcgagtgcggttagttcgtcgtctagtaatagttacctgagggttgtgtgagcatgttgtttgtacttgaggaggatgccgagtcctagtccttccattgacctcagcctacaaagtccgtatttgatcatgtaatgtgttatattgggatgtggtcaactagataatacgttaagataccacgacaggtgtgataggtgggaatcaccccactgtggccgccggtgtagacgtttctccagtgtgagcggcaatttcagggaatagattaaaaagattaatggtagttcaccctactcctctgttgatgttatcggcgggagccgttccattacctgggagtggaacattcattgtttcgatattaattgatccatttttgttatctcctgtcgtctgatttccagccatagtgattttccttcaaaatcaacgaagtatttctttcccatagacgttgccaaatgttgttgaaggaatttagacaacaccggaataaatg

SEQ ID NO: 143032 - DNA, 543 bp, Cannabis sativa
accaatcttcatattcaagtcttaaagtacaaattaatatctgccattacattcgttcattcgtattctctaaggttgacacacgtcatgctctaaagtgcccgctggattttgggtataacagaaggaaagaccattccaatgtaacatgagaaaaaatttaataatttttatcatttttttatgcattttaaattttatattattttcattcctattctcattcccctaaaccctaaacccagaacccctaaaccctaaaaccgtcaaaccgttaaaccctaaatcctaaatgccaaaacgcaaatttcaaaccccaaaccctaaccccaacacccaaaaccctcaaccttgaaccctaacccctgaacacagacccttaggtggcattttgtttgaggtaatgaaatggaatggaaaataaataattttcattccattcttttgtttagtttcattttatactattagaatgtcattccaatagaatgccctttccaccattttggtggaatgaatattctatttcgaaatggaaggaac

SEQ ID NO: 143033 - DNA, 998 bp, Cannabis sativa
attggatcggatcagatggtaaaatctaacatccaatatataattagatcagatctggatagttagatatagttcaatgaacaccccaagcaagtctaacttattagaggttggcacttgtaatataaattaatgctttaactttcacaactaccaatattttttctctctaatatgggtcagtttggcacagctgtgctgtaggaagcagttggagctgtgttgtgggaaaaaacagctgtagcagaaatgtgaaaaaaagctgagcagagtgtttggtaaattataaattttaaatgctgtgagtggttaagattctattataatgataacgatgatatcataatctagttcattataattacaaatatataaaaatttatgttatatgaaaatatttttttttatatagttttaataattttatcccaaaagtataaatttatatgcatttaataaaaataaattatagtattttataattatatttttgctgtaaaaaaaagatatcagatactcaaatatttaagaaactctaaattgatgtggaatgttaatattaaaaatataaaatataaatatttttaagaaaaaaaaataagattgttaaatattatttatttcaaatatttttcttaagatataataaataagtaaatatatttttagtacaaataaatttattatagagtcttttaatcaaaataattttttctaaaagttaggttgtactagctttagcttttagctgtagtatctccataaattcttcaataagctgattttacactgtttaccaaacatttttttatcaaatctttttcaaaaagtaacttttaacttttttaaaagctgtgccaaacagaccctataactttcacgcatggccgaccattaacctgtacaaacagtgctaatgcacagggcctaaaatttaaaaaggcccaatataatttttcagattttttttaacccaacattccatcaatgtgtcatgc

SEQ ID NO: 143034 - DNA, 881 bp, Cannabis sativa
atatattagattaatttttaagttattatttattattttcataagtaatttttttaattattatactaaaataaaattaaaatagtcgcgcgaaaagcagctatattacctagttttagatataaaatccttattttttctttcttctttagctatctctcaccgctcctaaatctctattttctccgtacactttcatcattttttctttcaaattttttacttttctcactcaaaaatacatatacactataaatgtaggagtttatgatataatacactaaattattatacgacactataacattagttatgatataagtatatattatttttgaaaatttttttatacattaatttcattattattacttattattcctaccggctaactattgctaaattgtacatggagacgtggtcaaattattatcacaaattgctaaaacttactatttcacattgcatgtatcacatcacatatgatccatatattattaatagttgaagtttagaaatttggtcacatcctatatttatagttgtagttgatccatatttatcatcgtttcttaattacaataatttttttttttggatagaaaataattaattatttggtcaagtcaagtttggagtaagcactacaccacaccaccatgctagcttaggggggaagtcaaaataattatcatggccgacaacataatttatttgttacagtaaatctttccttttttttttttttgaaaccaagtaaatctttcttttgaaaaagataaaataaaactctttccttttgataaattatattattctataatttaaattagtgttattaatttatggacattttacataaatgtatacatttttttaaa

SEQ ID NO: 143035 - DNA, 1161 bp, Cannabis sativa
ttttaaagaaaaagaaatttttttatttttttattttttctttttcaaataattaattattttttaatttgtttttagatatttatttacgtggactaataaaattgtgctacgtgtacactgtgtacacgtagacattccacgttaacagctagaaatggatgaaaatgttaaactgctaacagaacacgaatttaggaagttttaccaccaaaattttaaaattgggagttagttacaaaagcctgactattcaaaaaggttatgccgcaaattattaccaaaaagatttgataacagcgttgattaatttcttttttttttttttttgagaataacctgtatccattaataagagcattaagtacaagatacatgttagaaataagattggatagaagggtttgtccagaaagcttcctgctctaagcctaaagctgtcttagctagacaatgggcaacatgatttgcccctctagggatgtagctaagagacacattagggaaataagagagcaagctcttaatctcaatgaaaaatgggttaaggtgcagatgatgagtatcatttttacaaatgtaattgactaacacattacaatctgaaacaatactgtccggataaaatgagtgttcatggcaccaaactaaagctgaatgaagtgcttgtgcttccataagtaaaggtgtagtgattccacttctaggcttggccaaatttatgagaacgtcacctgtattggaatgtatggtcatgccaaagcccattttgaggagttgggaatcttgggcaacgtccacgaaaaggcgatgatggaatgttggagacgatgtgcggctatcattaaatatgaaatgatcctcatgagctggagaaggtgtggggttctgcgtggtgcagatcttgtattgctcaaagtaggtggatgcttcacgaatgatctggtctggggagagggatagaccctcatgaagccaagtattcctgcagttccagagcttccacagcaaacaaacaaagaaaggataatgtccaataataaatttagtggcagcaagatataataaatccatacagccaagtgaagagtgtgtagaaataaaagcattaaaatcagttaatttccataccttctgggcagcagggcatctgaagagagc

SEQ ID NO: 143036 - DNA, 591 bp, Cannabis sativa
ttaatttttgacataggtcacaggcatttaatgttatgtttgattaatgtaagaaaagtaaattgtggcataaatatctaatgttttagattttatacacttaaatattttatctttatttttggaggtaaaaataccaaatattacaattctcttacacccgttactaccacttctgttaactcataaatatagacacatggaggaccagatgcattatatttatttattttattttgaaacttaatattcttaatatcataaattatacttatacttgtttcaaaaaaaatgagagtggtgtaatacttaattaccttagctaagtgaattagtgtagcatatggaacataattatcaaattgaagtgtcaataccatgtgaaaattgttatgaaaactgattttttttttttaaaaaaaaaaaagtagcatttagtttcctatattcatcagtatagactcttttattgtcttatataaacatgacacacataaagcacagattggggtgttcatacaatagtcgatccaatccgcaaagtgcggattgaattggattggaaaattcaaaatccgcacttgtgcggat

SEQ ID NO: 143037 - DNA, 873 bp, Cannabis sativa
aaacatacttatcaaaaaacgacaaacttgacatttgcaatctcaactggatcggatctgttccaatgtctgcatggtgcaggtatgaaagttgataattaacttaatatatattttgcagtttttgttattaattttttattgtttaccagtgtaatgcagcgtgaactaaacaaaaatgagttgaacggtgtatatgcatttatgaatcctgcatctgtggcatctactcatgggttaggatacaacgagcgtgtagctttgctttttcagcgattgagcaacatacaaccagatcgattccttatttgcccctggtaccatgagtaagcacttactatggctttattcacctttgtcatgtcaactactttaaaacccaatatactatgataatattcaagaaaaacattagctacattagtatttgttgtctattataagtatcttaacttacacagatgaattgtggcgtgtatggtgtcccttgtcccttggtatatttgttatacaaataatgagaatgagaaaagttatgtttggatatggactatggactatagagtgagataatgagaattaggaagaaaattaaaaataagcaagttgtttgtccctggtacattgtcgttattacattgttgttgttatgaaaaaagttttatccataccctactctattacataataattggtattagtaatcttataagttttttgattgtgtttagcgaacactggatggttatcttaatccaaacggggtcgtagagtgtagcattttgggattccaaaaacaaaaccattcgtcaagatattaaaagatgtgttcaaacgtatgttctagtagttcaaagctctaaacatattgct

SEQ ID NO: 143038 - DNA, 584 bp, Cannabis sativa
aaagtgcgctgactttgtaaacctttcaactataacccacacagagtcgtactgtcccgtagtcctaggcatttcaaccacgaagtccatggcaatgtcttcctatttccattttgggaggtttaatggctgcaacaaaccagcaggcctttggtgttcagctttaacttgttgacaagttaaacacttagcaacatattctacgttagtgttgttcattccaagtgaccagaacatggccttaagatcttgatacatctttgttgtccccatatgaacatgataaggagttgtatgagactcattcagaattttcctcttaatatcatcatccataggcacacaaatacagttcataaactgtaacatcctagtattatgcactataaagtcactagtcttcccagttgaacccctatctcaagatttcattaactccggatcttgcaattatgcttctttaaattgttctagaagagtagattgtaggataatgttagccaactgccccacaacaaactcaaaattagctcaggtcatctcatctgatagctgcgtaaagatctgtttcattgtattcatct

SEQ ID NO: 143039 - DNA, 769 bp, Cannabis sativa
taactcgcattgctgatgtaatattttaaacttcagttatgaataaagtgaatcatttcttttctttaagtaattacaaagcattgctctttaaaattacttaaggggcatttgagtatgattaaccggaattcatctgggatgattagtgcaaacccacaactttaaaattttctttttgaaatttttaaagtttttgatcaaacctttctgacgagaaagggatcaaaccatcgtaactttttgatttaaaacctgtctgacgagaaaggaaaatcaaaagttataagtgagatattactcataactcgcgttcatagctgaatattaacggctcgcacaatataggaaagtattaaatgagacatcaaggtgttttgatataactacttaaacctagtgtatgaatagataatataactattcaagtaagcaatgaaaatgtagaaagtgatgagatcataaaaagtatattcaagtttgcctaagacagattataactgttattgcaaggtagaattgataactgatcgtaaatcataagcttggtagataataaactgtccgtgcaaatagtagattactaactacttaaataggaaaagtatgagcaatggaaaaaccaagagtactctacatttgatcaaaatataattgtttactttgttaataaaaacataagcaaacataaatgtattaagttcgaatgcaaaagtacaaatcatttaagataataagaaaaggggagctaagtgttgggttttatgcc

SEQ ID NO: 143040 - DNA, 509 bp, Cannabis sativa
ttttaggggtaaaattgtaagggaaaaatgttttaagtatagttttcataatgtaaaaaatgctagcatagttttagtgtactatttatttttaagcatatattgtcaaatttcccaacttaaatttgatgtaaatcaacactaaaaatttattattattaattttttttttcgaataaaaatcataagatctattaattaaaggcatctccaatggagaaacccaaccaaaaaactagtattttaacattaaattttttttcaattccaaccacaacaccaaaaaattgcaccaaatattatattttttcattattctattattttattaacataataagaatatttaaatattaaatatttgttaaatccaataaagtatattagtaaataatctattatttgtggtgcggttttcgtagttttttagtttcgcggtgcgggtgtggtttgggaaattaaaaaaaccgcatgtatggattggtttaaaaaaatggtcaaaaaccgca

SEQ ID NO: 143041 - DNA, 562 bp, Cannabis sativa
  modified_base (145)..(152): a, c, t, g, unknown or other
  modified_base (283)..(290): a, c, t, g, unknown or other
agatcttaatcttgagatggttagattctggcttaatgtattattcatgttctttgacttgttcgttaaagttgaccaagtggatgtttccaatacttacattttgagaatgtggcagtataattaagtgggagcgctaatcatnnnnnnnnaatctatagcttctataactattagaagtgaaacggtgatttccttcgagcttggcttaacgcgataaatgattgagcgctcattctagtaataatattagtttattgaaatatcatttacaagtagctannnnnnnnaaggataaaatacattgaacggtagaacgaaaaatttgtccctactcgatgtagatcatctatagagaatctttgattatttggattgaaacaatgggtaattcaaatcgcatctatttttggtatatagagcattctatgtaattaggagtacaattctgaatctatagtagacttaggagaatttaataagttagaaaatatacttagtaaatttcggatctacttattggaagcttgattacatggggtcatggtccccacactaacta

SEQ ID NO: 143042 - DNA, 530 bp, Cannabis sativa
tatgtaaaattatatatgagaaaggaagatataaattcaaataagaacaaattttctccaaaattttcaataggttgcctaactttttgctttttcaaaaataattaatggttgagaataaatagaggaatcacacaccacaaaataaagtgaagtattacataattagccttatataatttaaggaaaaaatacatattttacgtaatcccataacaatcgtcatcgaataaaatccacactgacactaaattttgagtttaaatcaactaccaaaaattttcaagattagaattttgagctgtttattaaaattttggtgatctggcaaagcacataaaaaaacataacataaataaaagacgcgtattttgcaaaaaaaaaataataaaagacgcgtggggttttttttttttgagtgtaaagacgcgtgggttacacgcgttggtgaaaggaaaaacatataagataaattctcttatatgtatattgttctatatatatcacgtttttccttttttttttttttt

SEQ ID NO: 143043 - DNA, 715 bp, Cannabis sativa
agtaaattgatagttgggggagttttgctgcaaattactcttaaattttttgtttttattttaattttaattttgcaaaatatagccaggtatgataattttttagtgacctgtcattgccacgtgggcaaaattaggacttaatgaggctgaatagacggcaccttaaaaatgtaaacgaaacagtactttggaggattttcccaccaaaatatgaggttggatgattttttgcaaataaattgatagttgagagacttttgccgcaaattactcaggaaattatactgtatactcttttttttttctatctaattatgtgtgttaaaaattcttattttaataaattatgtgaagttatatttagtaatttgattacgaaaaagaatatttatttatgtaattaaaattattttaaaatatatttaattaatatgtaatttaaattattcatgtactacctaatttatgattggacgtaaattagagactatttaaaagcccactccaaaccaaaattatttagaattatgtacttttttaattcataacacaattgtaattctacatcattaattacaattgaaagatgtatatgttaaaagtacaaattaattaatcttgcataaattgaatctcacttctaatttggtagcatatcatattatatagggatattggcggctaaacaacctaaactttacggtttgtaaca

SEQ ID NO: 143044 - DNA, 901 bp, Cannabis sativa
  modified_base (27)..(30): a, c, t, g, unknown or other
actaatcagattgtaaagagttttatnnnnggcataaaacccaacagtatattcctaaatgttccccattccaataccttgctaccagaatgagttgcattttttacttacccaatttgtatgctcctgatttgagaacttcgaccacctaatatggtccttcattagcacaactgtcgtactatctttggtgtttagaaatactcttcttaggaccatatcttccacaaagaattttcgagccttcacttgtttgttgaaataccgagctactttttgctgatgggccatcagctttaagtttgttgtggttcgcttctcttcaatttcgtcaagtgattcggcatggagtacatgattggcttcttggctatacgtcaatcttctgtgggatggcggtttaagttctacaggcagcattgcttcatatccaatgccatggcaaattgagtctgtctggttgccgttttctcagttgttcggtacgaccatagaactttaggaagttcctcttgccagtttcctttagcatcctcaagtattttctttagtgtgtccttcaatgtcttgttgactgcttcaacttgaccatttgcttggggatgcgccactgcggagaaacttttgatgataccatggtttgcacagaaatcagtgaaggactggctgtcaaactgtttgccattgtccgagactattttgtacgacaatccgaactggcagattatgttcttcataacaaagtcttgaactttgttggacgtaatggttgccaacggctcggcttctgtccacttgttgaagtaatcaactgcgactactgcatactgcacgcctcctttgcccttgggcaattgtccgatcaagtcaattccccaaatggcgaaaggctaaggacttt

SEQ ID NO: 143045 - DNA, 794 bp, Cannabis sativa
tatgaccaagtctaattgcattcgaatgactcgcattatgtaggaccaaggaacgagtatagcccgcatatatcaagatatatgcgagtatcctcgcgatcctcttgcaaaaatagagagatcgattctctatattgcgagctagtcccaatgacccaacatcctcgataaatcgatatagactcgcatgtcttggttctatcagcccgttatatgatgtccgcaaaggggactttacaaagacgcagacatcttagacttgactagtctcaaatgcatcctaagcatgcgagcttatctaagaatatgaacagccaactcgcactacaaaagtcgaatacattgttatatttagtagattaaactggaaactcttattcatttattatgtttacgtttttaagcttaattattgtaaatcaatgcattaatggattgacaatgaatgcaatccttgtgtaaatgatagtgtaaagaccgcttagctttaatttaagaattagcagataattagggtttgattatgaaaatttgttattaattctaaattattaatttatgatgatttatttgaattcaaaatgcattttatatgttatatttagaaatttcataattttgcatgattggtgcccgacaacaatggaacgcggtgtatggctcagtagaatcacatcttagtatttatgtatagcagggcagtttagttagacattgggattgtcaagattagtcaggaatttagaatttccaaagatacccttagtacccttttatgtcattttaatgtgaga

SEQ ID NO: 143046 - DNA, 2648 bp, Cannabis sativa
cttactatgaaggttgtattgtgaatggagttcgatttatggctaccaaacgagatgagaagaggagcacacaaaatagtggagtgtttgtggtgggaactaaagttaaccttactgaagatgagaagattttaattgttacgacacacttactgaagtactaaagttaaccttcactggtgtttactctgttacattatttaagttcaagtggtacaatacagatccaagacggaagaaaacaatcgtcgagaatcgggtgttgaggtcacaattacgttgccaggacactacttgaattttaatgatgtacctcaacactttaaagaccaaattgtacaaaaaatgaaggtaaaacacattaacaagtttaatgttgcaaatatttaatttcaattaatacataattctttaacaaatactatttgttcatagtatttgtacgatattgatggccatcccgagcctgaaagagtgatgcgaattctttatcatgagatgaagagaagatattctgagagaaagaatattaggcacacatggttttaggaacattattttggggatccaaatgatttggcaagtgttattgaagctgtacctgatcactgcactacagagagctggaagcaaatcattgacttatttttgagcccaaagtttattgcggaatcaaatcaaaacaagaattatagaggggaaatgcagtatttgtccacgcaaggctcaaagtcgatggcagcatcttgtaatgaatttgtaagtaaaattattaactttctattagcaatttcttttactaaacacaaactaactctatttttgaacaggacgtctctgaagactacacaattcatacttggaaaaaaggccaccttagaaaaggaacagaagacacttggattagcgagacatgtagagaactacatgtaagtttcaattttttttagtaatatttttacaatgaatgcatgatggtattattgtgtttctaatattttatttgatcagaagaaaatacttgaagaggttgctagcatgacggaaacaaaaaatgattccagcattggatcttctagcaaatacaagcaatttaaagctatgaataaagttcttgggagtcggtcagactatcaaagaggagtgggttataaattgaaagacagctcagaaacaagttctagtactcaaagtcgagctcaatcacaaggacctactccatccattagtccggaagatatggaagtcttcaccgagtttatgttaaaaatgcgtgataagattgatcagtctagcacctccagtgacacgtctctgcatgacccgcggtttgacaattttttacaaaattttttaccatcacagtcgccaggtagcgcgcccagttcagccctccctccactgttagtgccacaacaacagcaacaacaacaacaacaacaacaacaacaaccacgatcgcctcagatgcctatgttctttcaacaacaacaaaattctcccaacatgtcagctggctcctcacaatcgcctcagttacattacatgttcgagcatccttcacagtctcctcctatattttttttggatgccgcaggaggatctcagacacaacctatggttggccattttggaggctcatcccaacaacaataccctatgtatggtcaatttgggtcatcccaacaacaacttgtgtacggtcaatttggttcattgttgcagcaacaacctgtgtatggtcaaatgggaggatgtccacaacagcctatatatggtcagattttcagtgcgcagagtcaacaacaacagcaacaacaacaatctactttggttcgcccgcagactcgacaatttgtggagatcttacctacaccggagactggacaaccttattaccctaccccgtcggctcctcaatctcgtgataatcccgacagttcaagacttagctcgaatgcagataaatttctaaaatttactgatttgaacaatgataattaggttttttaattatgtcaatttttatgttttaaagtttatttgaagacaattttctaattttatttaagatagtagtttatattgtaatggacaaattaatattaatgttagatttctaattaataatatatttatataataattataatagataataattataattaattttattatataaataataaaaatagtaattttttttatataaaaaatattaatactggcgaaacactaattgtggtccaccggtattaatgtgtctgcgcgtaaaagtgcaaacattaataccggcggaccccaccgctattaatctgccagtattaatattattaccggcagaagtccattttgaccgctaatagtcattaatagcgacctattaataccggcagattctatcggtattacttattaccggcagtttgaataattaataccgacggatgtctccgctggtactatagaaaattcttgtagtgaatatgaatataccacaaacttaaactaatatactattaaatgaattttattttttcagaagatatacagtagcatacaaaaactatatactacaaccataagcagaaatactataatgaaaaattaatataataaattttaaaaaattatatataccaaaa

SEQ ID NO: 143047 - DNA, 502 bp, Cannabis sativa
gatatacaattatacacataactagtttattaattttaagcgtgaacttagcaataaaattttaattgttaatctgttaattttagtagagattacctcattaaggtcaacattgttatattaatgataattcaatattgttacattagagctataaaacaaatttttatgataaatataatgttcgttcttaactaataataacaagttcttaacaactaatttctcaatatatttgttcaatcaatatattataggcacatgtcttagtaagtatattaaaggtaagttgagatatgttatagtgtgtgtcatatgtttaaccttcttttcaagtgaatatttgtatttgtcttctttggtctttcaaatgaaaaactaaatgaataaatttttattttattttggctttcaattattaattattgtttatgtatgtattgtaatgctctaatctatagggtgttaggttttataaaacacttaagaaatatataaatca

SEQ ID NO: 143048 - DNA, 942 bp, Cannabis sativa
gagagagagagagagagatgaggaagagagagagatggggttgagttatgggagagatagtattgggttttagataaaattgtcacatattttcaattttcatatgtattcaattagggaaaaaattatcccctaattaatgcatagatattcaaatttcccttatatatattggagaattatgtggtgtacatagaccctaattaaatatataagagaatttcgtggtgcacctaaaaataaaaaattacattaatattttaattagtgatagtttttttctttaatagtataaaatatataaagataaattatattttagtataagaaattattcaaaatttatcaaaagattgtatagcattgtaatgtgcatcttcagttgcactctcttcatttttttaaaaacaatttgttgatatagtttataatcaaaaatttatagttgtcttacaaatatttatttgattagctaaaattagtcaaaattttttatatatatttcacaagaacttttaaattgtacaaaattaattttacattgttagaaaattatataaaatataagaaaatacaactaagaaagccattggtaatatttactataatttgagtatttttttcataaaaaaaaaaagaaaaaataaatttgaaaaaagaaactccacaaagatatttataaaaagaaaaaaaaatatgtatcctactatataattatgttataactttttttaaaatatttatattagacaataaaaatttaaataatttaatcttaaatttttatcatcttaataaaaataatattacaaaataatttttttcctaaatatatatatttatatgcattttaatattgtatataaaaaattagaactctctgtctaccaaaagtattaatgtatttatcaaaattatttttttaatattatttctaataat

SEQ ID NO: 143049 - DNA, 650 bp, Cannabis sativa
  modified_base (300)..(300): a, c, t, g, unknown or other
agggaactcaatttcgatttaatttgaattagttataattttttgaagttttgaaaaaaaaaagataggggtggtgtcaccccatgcgcgcgcggatttgagtgttcactcggtcacacgcgcctcggacaagatggggcttcccgcgcggatgaggctgcttgcagcctgtctagccaatgtttctctgtgatgcactcccctctacgctcgtggatggtatgcattcggatggtatgcaattcataccatccgcatcaaatccaattttttcagttttttttttcattttttcatgcnttttcatggaattaattttgaattttttttgtgtaattttgtatttagatttttatttttcttatttcaaatctaattatcagaattaaatcaaatagtatttttaaattaatttaagatattagtgaaatttgaagcttgaaaataggtaaaaatctatctttttgcttaaattagttatcttatttctaaaatttgattattttatcttattttaaaatttaaggtcagatatttaattttttaaattatttaaaagtttttttagtaaaatgaccttatttgaaatttaaaataagattattttaatcatgaaattttaaattgaaataaaatattttgctaacttt

SEQ ID NO: 143050 - DNA, 519 bp, Cannabis sativa
tcctctctcttagatagttagtcagtccgaccggcctcccaagaactttattcatagcttttaattgcttgaatttgctagtacacccatcgctggaatcatcttctgtatccgtcatgctagcaacctcttgaagtattttctcctgatcaaataaaatattagaaacacaataacaccatcatgcattaattgtaaaaatataatcaaaaaaaatattgaaacttacatgtagttctttgcatgtctcgctaatccaagtgtcttctgttccttttctaaggtggcctctcttccatgtatgaattacgtagtcttcagggacgtcctgttcaaaaatagagttagcatgtatttagtaaaaaaaaattggtaatagaaagttaataattttacttacaaattcattacgacatgctgccatcgacctcgagccttgcgtggacaaatactgcatttcccctctatttttcttgttttgatttgaacgcgcaatgaactttgggctcaaaaataagt

SEQ ID NO: 143051 - DNA, 1080 bp, Cannabis sativa
  modified_base (27)..(27): a, c, t, g, unknown or other
  modified_base (1028)..(1033): a, c, t, g, unknown or other
ctacttataaatgatatttcagtaaantaatataattactaaaatgaggcctttatcgcgttaagccaagctcaaagaaattatcgtttcacttttagaatttatagaaactattagattccatatctacgattagcactcacactcaattgtactaccatattcctaagatgtaagtattgggttgatctaattggtcaattttaacgaacaactctaagaacataaataacacagttgagatcgaacctaaccatatcaggactaagatctattgacctaagatcaactaggtgatattgacttagatagatataatagtaagtttatgatattttatccaatgttaatatcagttcagtccgatgtatactctatacatctgatactagcatactttgccaatgacctagaaaggacataacacttatctaaggtgcaagtaaactttatcattgattatcgtatcagtgtaaatctagtgtactgacaaatcatgagacataaacttttgaaacatataattataattatattatactgtgttgacaacattataatcataaataactatatgttatggatttaatagaatttatacattaaatttataactgtgaaagaaattatgtgaaccatacaacataaaatgatttcagatcttttattaattaataaatttgattatattgaaatgaattttatttaagacatcaaatcccaacacaatgatactgcacgtcgttcataaatcaattgacaataacaacaaaatgttatgttgccttgccttcaatttattttccacatattttgttcttttcgattcacatgatgtcgtttttaggtccactcatttttaaataacatttatagcatgatcattatgtcgttcatatataatacttgtatttttttgctaatctgaaaatttcatacctaagaaaaatggattatgttacaaatacacaaaaataataaaaaaacaaaaatacaattttacataattttaaatatttttacgattnnnnnnattttatttatagaaaatacggccttttatgttgtactcttattaat

SEQ ID NO: 143052 - DNA, 825 bp, Cannabis sativa
tataaaattaataaagaatatttttttaagtaattgagatattctgttaaagttaacctaaaaaataaaaaaaactagttaaaccaaaaatttggttacataaccacactttatataaaatagaaatatactaaaaatttgttggatgtttgataaagagtaggtaataagtattagtttattatttttttattaataaaaaaatatttttattatatattttattttttaatatttaaaatttagatgatagctgttttttctttcataaaaacaaggttataaaatttctaaataatactaagtatatatattgcatgtttttaatatatataaagataattgctctaagtatttgaaattttgaatttgtaataaatataaatttaataatttgtttaatgatataataagtacctaatatttataaaattataatttttgactagtttgattattatagattttgttttggatttattaaaaaaaattaaaaataactaatactacatgttgtgtctaaatttaattaataatttataatttaaattattatatttaagacactaattgattttattttttttttttgaacacagacactaatcgattttgaattaatgaaattagaaaaaattataatttatgtttttaaaataatattcaaaagtcaatataaaggaaataaagaatgcaacattaaaattgagtgggtccgattatctataaaaagagattatttgaaaaatataaaaaaaaaatgacaaattttttatattctaactaatctgttgcatttttatatatatttacgatttttttttt

SEQ ID NO: 143053 - DNA, 712 bp, Cannabis sativa
agaggcccaaatagtggcctatgggggatactatcccaccgggattgcaggatatgtacccggagcccagctcccaggtactttgccagcagtagctccacccatgagcggtatacaattttgcgctactcccggatatagtccaggtcaggccttggcccccgcatcttcctactttgggaatcccttggggatgaatggacaggccccgtcgcactccactcccgccgtaagtctagccggtccttctcaaggctctcggagcaaaaggtcctctaaaggcagcaactggacggaggacaagcggcagaaaagggggtataccccccaatatactcaatacacggagttaacggactcccaagaacgtgtatattttgctactaggcaaaatacacactaccagagatcgcctcctctgtataaggacaactcccgcagggaccccagtaagagatgcgagtaccataacgacattgggcacaacaccaacgaatgcaaaaatctcaaggacgagatcgagaacttgatccgattgggacatctctacgagtgtatcaagaactggctgccccatctcaatccggttccggcagccggaactctgcctcaaggggcaccagaggtgcagcaggagctttggccccaattgctcccctcggagatgcccaacatattcttggcctaccgccaagacccaacgagagagtgg

SEQ ID NO: 143054 - DNA, 729 bp, Cannabis sativa
ggagaagacactgttcaggtggaacagagagaaaacactgttcaggtggaacagggagagaacatagttcatgtggaacaaggaaacctgagagaaagtcagggagaggacttagaggactaccatttgactaaagacaaagctgaaagagcacctagacagaatcctaagtatagcttaaacatttggaatgaagacattgtgtatgcactgttaagtcctttgcaaggacagaagaacaaaccagaaagttggggagaagctataaagtgcaagaatgctaagaagtggaactgtgctatggatgacgagatagactctttgagtaaagagaagacttgggtttgtgttccaaaacccaaggaaaagagtgttgtgaaacatatatggccctttagacagaaagaaaaatgcactaagacaaataaagagttggaggatgtgagtcagatcctcaactctaatgggattggttcaaagatgtatttcatgttgagtaccataccaggtacaacatatactatagttgttgttagcaagtatatggtattgactgggaagatacattggttgattataaaatggattttaaggtacttaaagaagacaacatgcagtatacttgtgtctagaaagtcacaaaaccaaatggaagggttttgtgacttgatctatgtaagggagaaaaacaaggtgacacaaggaagtgtcacaaacatgaagaccaag

SEQ ID NO: 143055 - DNA, 683 bp, Cannabis sativa
aacagagaatgaaattcattaaaggtaacaaaagcatgtaataccgggattaaaagttgcccggtcagtcatgatgtctgtaaaatgaaaaacaattccaagtttaaagaccgcttggtgggtcacgatgtctaagaaaaggccttatggctgaataagatatataaaaaataaaaggataaaaggagaagtatttaaacagctggagtcctaggctcttggtttgggtcttctaggctggtaggagttggaggatctgttgtttgaacgggaggtatatcagcattttggccggaggtagaagcaaccacctcagtttcactataagccacttgggaagcgcagaactcgaggtacatgtccttggcttcacccaagtagtagaagttttcttgaggattagccttcgtaaagtcatagaagagctcaagaccggctatctccaaggcatgaactttctctcccagcctcgttacctcagccgtaagctcctcctccttagacttcttctcctcttccagccgatgaaggactgctcgaagggatgtcctttcatcttgaaggctgttcatttcagcagataaggtctcgatggtctcttcaagtcggtcagaagcctcgagatccttagtcaactcagttcttttcttctgtgcggtaaaaagctgttgggttttatgccc

SEQ ID NO: 143056 - DNA, 547 bp, Cannabis sativa
aattaccaactttttagtttccacttttgtttatttccttttttagggccataaatgtaaatttcatctatttttggtctataatagaaaaaatctcaaaaataaaatcttaagagcactctcaaatagtaaaacccaaaactccactttctttaaattttaatatattttattactttcaaattataatattaatatatttatgggatgttaaaaagtatatatattgacgcattctttatctgtttcgacatctaaaagaattttttatctattttttttatattcgtatatgttataattatttaagatatcctactaatttttgagaaattcaaacggtcacgcgtatagaataaaataatcacgggtgtaacacattgtttgaaatatatttttagcatgtttttttttttttaaattttttttaaagttttagagaatgtcttaaataaatataatgtatattgaagagtgtaactggaatctctcgattacctccaattacacagttactgtaacgccctgtccaacagggacgccacgt

SEQ ID NO: 143057 - DNA, 902 bp, Cannabis sativa
  modified_base (694)..(696): a, c, t, g, unknown or other
ttgttgatcccttgatgaatcttttgctcttgatatgcttattgaatccattttgggtcactttatgaagtttggtaaaaataccaactatgtcttcaaaatttattttctctttaaaatttgctacaaaatcaacaaattattagtaacaaataataatcaaatattttgttaatcatcaaaacaaggagacttaaaagtttgagttaacagaggtgtggtcggccaaggtgtgcagggtctggctagacaaagtgtgcaggacctggtaggttaagggatgcaggatctagtaggtcaagggttgcaggacttgataggtcactatagctctgtctagaagaggccagactcatggcactgattgtggtgacaggattcaccacttttgcaatgttcatcgggattccagttgtgactggaacctgaatatctagacctacactttgtgggtcttgagggagacctaaagatgcagattgtgtgacaggaattcttctcatgttaaccatggcatttgatcacatacgatatccacgctctgaatgaaagcaccaatgacctcaaaaaatgatcaactaatagctggatcgtataagtcggatgcttgccatgtgttacacaaacaaaatagaaaagcaataaacacaaagatttgttattgaggtttggcccccttgtgatagcgggtaannncctactccccttttggttgtatttatactgagggaaatactacccagattactataggtgggatctgctatatcacccttaagattacaaagtatgaatcagtaggaaaatctcaagtgttggacaacatagggtgttggccagccttgggtgtttgccagcctagggtgctagccaacctagtgtaggcgtgtgagagagatgaa

SEQ ID NO: 143058 - DNA, 515 bp, Cannabis sativa
caccaaaatactcagtctgataaaaacagtcacagaatgatcaaggtgaaaccagatgaataaattatgttcaaataagcaaacaaacaccacataaacaatacttatatactcaagagaaattagtgtatgtacgtacctgcttattaatgcaagttttatatatattgccagtatatatagatcaaagtagcacatggaagtggtagcactggttctagcaacagatctttaattgtgaatttatatgtatatatatacacaaacacacactagcacagtagcacatgcaagtggtcgcactggtggacccacgtgaacacaagagggacagccgcctcccttgaaaaaaataaataataaaaaaagaattatataggtattcaaagataattagagcatctaatattttagagaatatttaattaaggtgtggaaaagtttaggtggcaaaatatagggatgctatactattggagataaaaaagaaaaataatgggctatttacaaaaata

SEQ ID NO: 143059 - DNA, 856 bp, Cannabis sativa
  modified_base (450)..(478): a, c, t, g, unknown or other
cactaccaatttataaccttatagatagattattaattttaagtatttctaatttagtctatcaataaattagaaatatcacttagggcagtgacaaagcaaaaatttcagctaagtgagggcttaaatattttatttttcaagggcttgaataaaaattaaatcaaatgatttttattttttattttaaaaaataataaaaattgaaatgaaatgaaaaaaaaatgttaaagagactattacaaatgtattttgcaacaaaaaaaattgttgactgttttacgaaagtggtgttaaaatttagtgatatagtttaggaataattacataggccacctcttttgtaaaattacatttttacgtttaaagatttcttttttatatattttaacggtttccatacaaacaatacgaaaataacaaggaaactatataaaagtaacatgaaannnnnnnnnnnnnnnnnnnnnnnnnnnnnatacaaataacaaaaaatgaacaacaaattaacaagagtacaacataaaaagatcatattttctataaataaaattaaaaaaaattgtgaaaatatttaaaattccataaaattgtataaattgtatttttgattttttttttattatttttgtagaattgtgaaatattctcgataatttattatgttgacatttggagttgggatagaattaaagtgagtgtggacccaatatacaaattgaatgagggcttattatatataagacaaaaatttaaataaattaaactaacatatatatatcggtaaaaagaaattacaaaaaaaagttttttagcaagaaaaagttaagtttgagttaaatatttttgtatgaac

SEQ ID NO: 143060 - DNA, 1022 bp, Cannabis sativa
tctaattggattagatcagatgatgattttccaaatccaattactatggattggatcggatgcccaccctaccttacaagagcctgtggagtgtggaggactcaatcaatagtaagctggaagttaatagagtattatagcacataaagcatctctattgaaagaaatatctaccaattggaaaagaccaactttcaaaaatggaaggcacaaaaagaaaatgcaacagcattgcacaaggctatagtataaaatatttcattatcgaacatggtatacatcagaattcatagggttctagagttgagattacagatcatatccaaaacccatttcaatccacagcataagaaaaaggagcgtggaatgaaaaccagtaaactttttggtttgcaattattatacaagtccttgtttgtctattcaaacaaggcttatactcctaaatgtataggttttgttatatgttctcagtgcataagagcaacagcagcttcttgcaccaaaggctcagtaacatgtacaaaatgctctgcttcccgttccaattgctcccaacacttattggaaccttttccttccttcatcttcttcacgaatgacacaaaacttctccagttatcggcctgaaacagttgaggattcatcctcaagtaagtgaatgcacacatctctccttctccgttgctaccttcaaagttaaacgacgctgcctgtaagatctgctcgtgagcataatcatcgtaacggggcagtgcgttttcgccagcaagaggaacctgtgccttctgtgtggccagggcaacttgcttcacaagcttctctggtgcacaaagggcgtcctgaggctgctcgtgatcccgcatctcaatgcaagtgaagttgaatatggcaccgtgtcgagctaacatctgggcaatggggaggtaaccatctctgaaacgggtgttgtagtaacctgctgtgagctcaggggcatgggatctggtgccatagtgccagtgaattccagcaatcttcac

SEQ ID NO: 143061 - DNA, 719 bp, Cannabis sativa
aaatctcgtctttcgccctagtcacgaccataggcaaaatatgaaaataagctcgctgtctggctccttgttgcgaccatggaaagcggtggtcgcgactactgaagcaaatttgacaacttcagcatctttcagtaaaatatgcataactttcgcataagaactccaaatgagttgattcaagatgcgttggaaagaagaaaaagaaatttaaaagttttatgttttgtctttttcaaaattaacatataatatatttttctaaaaataaatattatattaagtatataaatatataatatgcacacataccattaaaactttcttttactaaataaattatattttaattttgaatgacttaattatttccatctctcttacaatatatcatttctttcattgctttactcgtatttttcttgatatattgaatattgttagtggagtaaaggaatcccgtattaatgggttcatgctttaggtaaaatcattgtccaacttatcacaatcataagaaaatgaggcatacatagtaagtagtaaagtctttggtcttcagccaacaaacaaatttatttagtggggctagaagtggaggtgcatgcatatggaaggactgagaatctacttggtctaccattttgaatctttccacaaatgtggtagaatttgaacatttaattttaaacttacatatacacatcacaccatcataa

SEQ ID NO: 143062 - DNA, 1080 bp, Cannabis sativa
  modified_base (1007)..(1008): a, c, t, g, unknown or other
tcataaaaaaaaaaaaaaaatattgcagtggttttccaactttctccatttgaatatcaaaatacaatacagcttccttgtcctgtttaaatttctccatttcacatcaaaattcgtcaaaggggaacttattaatgattcttacatggtctttgtatcattcttcaaattgatgattcacaccgatttttttatggatattttttttttttgcaattatattatcatgatttctcaaattgttatattaaataattacatctttttaggttgcaacaacataattttaattactttaatttacataaaaataactccacacaataataaaaaattagttttacttaaataaattactttattaaaaaaattcaattagactatgataataatataaattatataattatttattaaaccattctcagttaaattataaaatacttaacataaaactaaatatacgtccatttgcacgtgtacttagtttgtgattcttttgttttttcttagtttactttttattagactttaaatttactttcttctatattaattattgtaaataattgagtatgactctattagctaattttgcgataagcatcatttttttttataacaaacacctctaattgacttatttgatatgtatatctttcttttttaataaaaataaattatttttttattttgtattgatattaggaatgttttagtacttaagcacttaacgacaactaaagatatgaaaatgaaaatctcaaataaaataattgcacaatatagagattacaatttctctctaagagcatctctaattaagtgctattattgtgtgtatatgtatttttttttatccatattcatatataagattctatatatattatatatatataaatatttatctaatttttttttcacaaaagaaagaattatgaagctttcttaaacattgatatattacatccggatatttatttttaattgtcaaaattataaannacattatttaaatatacataataataatctcacctaataactaataatatttttttttcaattattaattgt

SEQ ID NO: 143063 - DNA, 535 bp, Cannabis sativa
tgggaattttgccgccatttaccccaaatttaatatgctacatacaattatatgttaaagaatgttgaccctcaaaagtcatatagataagtggttaaaaaagtgtatgtatagcatagagacaaaataatagtcaccatcgtagaattattctacaaatgtaatacaaccaaaaattttaaataattaaaataacaatgtttctaaataataaaatagaacaaaacatcatgaaaataaatacacaaaacaactaagtattacaaatttaatacacaaaaaaatctaataaaatataattaatatatattatatttttcaatatttttattatataaataattttttaacatttattaattgaattggatcgatttttaattggatttcgagattgacatctaataactaattcaatccaataagaatctaactttaacatccaatccaaaattataattggaatttttaactttttgtaattggattgaattgaattggatcgattcgatttaattggattggattagatgat

SEQ ID NO: 143064 - DNA, 652 bp, Cannabis sativa
  modified_base (431)..(432): a, c, t, g, unknown or other
ggtttgtttgattttatttgggttgtggtggatcgatttacgaagtctgctcactttctaccagttaaaacaaccttctcagtggatcagtattcaaatatgtatgttaaagagattgtaagactgcatggtgtgccaaaatccatagtttcagatagaaatctgaagtttacttcaaaattttggcagagtttacaacgggctatgggtacgaaactaaagttcagtacagatttccatcctcagacagattgacagtccgaaaggacgattcaaatactggaagttatgttacaaccctgtgttatggatttcgaaggctcctggagtaagtatccgccgttgatagaattttcttacaataacagttaccagagtacgataggaatggctccctatgaactgttgtatggcagaaagtgtagatctcnnattcactgggatgagacaggggaaaggaagtatctaggtctggaatcagtgcaatggactaatgaagcaattgagaaaattaaagccagaatgcttgcttctcaaagtagacaaaagagttatgcagatccaaaacgtagagatgtagaatttcaagtagacgatcatgtgtttctacgagtatctccaatgaaggggatcaaacgtttcgggaaaagag

SEQ ID NO: 143065 - DNA, 1105 bp, Cannabis sativa
atgaagtcttataagcttgccaaaatgattggggatgaagttggggatttccttgaggttgataaaatcactcttctcaaagtttttggtttgttccttcgggtccgagttttgcttgatgtttccaaacccatccttagaggcatcctagttgattttaggaatatccacaaggaaaaatggctaaactttaaatatcaaaatctgcctaatatttgctttcactgtggtatgtttgatcacactctcactaaatgtgtctcttatcttaaaaagtgtgatgagtatgcttacccactcccactgcactataaaattcctctaaaagcccctgctaaaacaaatttcaagcgaaatccatttgatctttctaattcttaccctctggaggagctgccactctctcatggacaagttgaccaaagtcttgctggtgctgttagtcaattcctgactactcaggatgtgggggctggctcatcctcttctggtgctgctcttaggagagatgaggctatttcacatggattcattgctaatagctccatctcttctcctgagctctctgcttttgagagaactatttctaccccagcctttagttttggccttagctgtgatgctcctgttggtgtcttctgtgatgccactcaagctgcttctccaacaattgccactgctgtgcacaccactgctgaccttaatcctgaaaatgttcagagcatggctaggattactgagaaatctaaaggtaaagccattgttggtgcgaagctctctgcgtttattcctcactctgtcatggtgggagactctctcagaaacattctcaagagagctcgtgctggacctgttatcaatgatgcctcaactgctgctgattcctcttttgaataggcaggtgttgcggagcaaccccgcccagaaaaatgatacttatgagtttgaatgcccgtgggttagggagttcccgggcattctgtaatctctcccttgttgttaataaccataagcctagttttctttttgttatggagtctaagttgttagctggacattgtgatatttttagaactagactctcttttgataatgcttttgaagt

SEQ ID NO: 143066 - DNA, 759 bp, Cannabis sativa
  modified_base (161)..(168): a, c, t, g, unknown or other
  modified_base (418)..(420): a, c, t, g, unknown or other
tgtgctgacgacacaataaacaagaacataaatgtgataagaatttgaatgaatttataaatcaaataaacatataaatgataacatgaaccaaatgacacaaaagtcatgaaaatacttctatttctttattgacatttaaaagataaagattacattgnnnnnnnnttttatttagggcataaaactgaacagagctttctcggcaaaacaccctgccagtcccaccgtgcacgcacatatgaggctgcgtgcagcctcctcgtgggcagcaggtgctatacacctaaaattcgatgttttggggattttccctccaatttcatattttacccatttcaaaccctaaatatctatataaaatattaattttaatatttatacctaaatatcaattttttaaattaataatatttannntttaatagattattattaatttatgatattttgaagtttaaatttaaatattggttattttttcaaaaaaaattatggtaagattttaaaaatttgttaatttcttaacatttacatattattttattataaggttatatattttaatattgggtatattttaaattaaaagataacattattcttttaacttgaaatattatattaaaattatcttaatttgaaattaacttggatatttttatagatatcctaatgataatatttttaaattcataaattggttattttgtagaatattttattctttataaattataagttagaaaaaaatgatat

SEQ ID NO: 143067 - DNA, 723 bp, Cannabis sativa
  modified_base (391)..(413): a, c, t, g, unknown or other
taatttatacgagtgttaaatactatcgtctatagtatattataggcgacggttttcaacactcagataatttttttagcgacggttccaaaaaaaagcgtttttgggaccgtcaagaattctgccaataacaatgctcttttattaactgataaaatgttcaagctcacagagttaatttgcacgttttcaaaattaaatcacccacatcactacaaaaaatcttatttttagtcaaaatatgactaaaagtgaaaaaaattataactaattataaatcatcattgtgattaaaaaatctgtggctaaaggtattagtcacaaaaattacaatttgttgcgactaaatatattttatatttttagttacaatacttattgtgactaaaannnnnnnnnnnnnnnnnnnnnnntaaatactatgttttagtcacgagtaactttttgttgtaactaaaaatcacatttagtcacgaaaaatttatattgtgactaaaaagttatcactaaatatatattttttttcgtagtacattttaatgatgttattgaaagtagataaaaaatatatgatgactgcaaacactatataagttggaaggaatgacgaataaattttggtggaagtgaagttctaataattagtcacgcgagttaaatgtcttgaaaaagactttataagcatgaacacaatggtggattaggatttcgattgtcacttag

SEQ ID NO: 143068 - DNA, 1123 bp, Cannabis sativa
aaccctaagcttgctctattatggatttatgatgttattggaaggttttgttaagtttagggttgattttgatgaatttggttatgtgttggtaattttcgtttagggttagtttccgtaggtctcaaatgatgttttaagattgcttgtactgcttttggtagtaattttttaggttgagcaagtttgagttcatggagcttaaacttgactcaataatggcatgttgagttctattgtgtttttcttgctactattgtgtgggaattattctagaatgtattttcaggtgttctggagagtatggttgcatttagggaagatttggacgagctgtgcaatttttggggtttgctggtgcaaaccggtcgaccgattttacagggtttgtaaaaccgattatctggtttacatgccaggagcctgaaattgtaacttttccgaatttgtgttatttttcgagcatagtttggtttcccttagcatttagggtaatagtatattgaatatgtcattaagattacccttggttttgagttagggtttcggaatagttattcaaggaatttacccaattgtgcaatgtgacttaggacctccgttcaactcgagaattttccattcaagtcgaccgacacgcttgaatctggaacgaggtaagatagcataaataatatatatatctgaatgtatgattttagtagttgtttacactactaacactaatggaaatatgattttaagggtgttagtacagtgtgagattttagagtagttacagtgttaccgacacgagtaccagggggtacgtcgtgcatgtggtacaacacttagtaactcatgggagtacagtgaagactctaccaacacgagtacaaagttggtactttagtgcatatggtgcagtggtcgtacttccattaagaacgttcttaaccctttggtgagctcggttgatgagctcaagtcggcttaagcataaagccggtagagcatgctttcatatatgttgtgcatatcttactgagtctgtcgactcattagtttgctacattgtgtagggaaaggaaaagctaagctagaggagcagtgagttgaggcttggtagtgattgtacatatcg

SEQ ID NO: 143069 - DNA, 757 bp, Cannabis sativa
tttgagatggaatgagtagatagtacatatacggaatacaacttttattttaattatatatggaatataagttttaggattctttctattaacaattttgatattatgtaattagttaatagttagttttatcattaacaatcacagagttgattactaattataaaaattttatataagttttataattgttattttaatttcttttgtattatattttaactattatagaaaaccattctaaaatctgaaaaatacacgtagggaaaattgtatggaaatctgcaattttttcttgcctacatttatgcttcattttataaccgacacaataggtaaaaaaaaatatttcaacaagttattcaacatttaagaaccgacgatataagttttttgtgacggttttgaaatgacaaaaaattttttgcgtcacttccaaactaacacaaaatgttataaagaacattgtatattttgtgtcggttttaaaatgacgaaagttgtttttgcgtcactttagaaatgttgcaaattagaaactatttgcgactacggcttacacgtcggttttgtagaccgacgcaaaatctttatatgtcacttaaaaaccgacgaaaatactcctttttgtagtagtgtcccaatgggtcctccgtgcaatgcttgaaatctttattgttgttgtgggcaatctttcttcttatgaccttgttaaccataactgaaacacccatatggtccactacgagtctttcca

SEQ ID NO: 143070 - DNA, 926 bp, Cannabis sativa
  modified_base (124)..(124): a, c, t, g, unknown or other
tcagcttgcatcagaagcttgcatcagaacacgcatcagaacacatcccatacaacacatcccataccctgtccccataccctgtctggatgcatcacaataaacaacaaatttctcttgatcngatggcaaagctaacaccagagcttttattaaatgttgcttcaactcaagaaaccttgcttcacatttctctaaccacacgaatcggtgatttttcttagttaactcggtcagtggcatagagattttagaaaatcccttgacaaaatgttgataatggcctgctaaaccaagaaaactttgaacttccatcacagattttggcatcggccaattcttcactgactcgatcttgcttgggtcaaccataattgcattattcccgacgatgtgccctaggaaagacacctaagacaaccagaattcacactcattgaactttgcatacaattgtgatccctaagtcgctgcaacacaattcaaatatgatgctcatgctcctcttctgactgagagtatataaggatgtcatcgataaacactatgacacaattatcgaggagatccttgaacaccatattcatgagatccataaggaccgcaggagcattagccaatccgaatgacattaccagaaactcgtagtgcccatatctaaatcgaaatgcagtctttggtatatcttcttcccagattcttagttgatgatagccggatcacaggtcaatctttgaaattaccatctttccttgaagttgatcaaacaaatcgtcgaatctgggtaacaggtacttattcttgatcatcaacttgtttagttcccgatagtcaatacacattccgagggaaccagctttctttttcacaaacagaacaggagctccccaaggcgatacactgggtcgggtaaacccaatatcaag

SEQ ID NO: 143071 - DNA, 558 bp, Cannabis sativa
  modified_base (27)..(29): a, c, t, g, unknown or other
  modified_base (56)..(58): a, c, t, g, unknown or other
ttaagtttggattcaaggcatccaatnnntttggattcaaggcatccaataacgannncgaatatgaagctttgatcgctagcctaaaattagcctgagagatgaatgtcgcacacataaaatctgtagtgattcacagctgctggtaaatcacgtatcttgagaatatgaggctcgaggagaaaagatgatgacatatccgagcaaaatacatgacctgctcgcacaattcaaaagctacggttttagacaaattcgaagggaagaaaacacgactacagacgcgttagctggattggcaagcagtaatgtaagtgataaagcgaacttggttcctatccagttcctcgaagagcctagcattactggcatagaagagatcgaaatgattgatacttccccaaactggatgacgccaatagcagcctaccttaacactggggaactcccagataatcgaaatgaagctcgaaagatgagaaggaaggctgcaatgtatatcatattagagggaattatgtacagacgagggttctccatgccattgctcagatgtgt

SEQ ID NO: 143072 - DNA, 1182 bp, Cannabis sativa
aagtactagcatacccagcagccctgacacgtccaggatgctctggtgtcccaagcacctgcgtcaggatatcattttggccatggacctgattttgtccctgagtaagtttctcctctaattgagcctaatacacatattcaagcaattagtatatgaattatatatactaaatcattagtagtactcaattaaggattaatatatacttactatcttttcggcaatttccttgtcgtaatcagtgacaagtttttttctcttggtccgatatttgatccaaacacggtggcgtagtccttttactacattattatataacgattaaatgagtacaattacattttaaagcacattattagaaatcattgattacttaccacatcttcccttacgttcaccattccacattgaccacttcaatgtctagattggatttttgccgaacgttccctttgcaccttactcaattcctacaatgccaaaaaaaatataattagatacatgtacttgtatttaagagtttatcttagtacaaatataattagcgtacctgaaatttaggacttagttgactttcaacaaattttaaccaatcagtaaggtcgattttcggatgctttttagggacttgtgtcattcgttgcacatccttctcttctaatgcgagcattataacgtcttttgtcattctatttgtgaagtcattcattaacttcctagaaaggattagaaaatcatgtttgaactcgtccggaactataaaacccgtctagtttgaaggaaaacaaacacgattagagttaacatctgaattaatcaaaaacaaatcaaaattctcacaaataacggcttgcatatctttccacattttattttttaatgtagggttgacttctttccaatttttataggacaactctatcgtctgacagcatctaacttttaaagtcgatactagattggagtagtttttgctacagtactattctttgtcattcacctcgagtgccactctttttccttggtccatcagcttggatatttcattcatctgagtaggtcctcgtgtaggtattaacctaggagacactgctcctgggtctgaatctgatcctgaacctgagttggccatatgtacaccattaacaaacaaaatttaaagttagctatataacaagt

SEQ ID NO: 143073 - DNA, 901 bp, Cannabis sativa
gcggcctctaccgcgtccacgggggttttggggatttctaccaccccgaccacctccggtctcaaccctttcaccctaccttctgacgttttgctgggcgtccattattaggacttagcatgcgaacccacgaggcatgtacagtggtcaaagtattctcaagaccgcatttagggttaatcaacaatttacacatatatgcaatatatctttaacagtttgtaaaaagtaaagcttacggaaccgtgagttgagctcgacattggccttgattgtacatatcttaacggtcttcagtggacaacctggtggctctgataccaaactgtaatgcccgtatttgaaatttactaaactcaaacgttaattttatagtataataactttatgaacatatgggtcgggatcccgaatttcaaaatacagtttaaagtatttttacaaatacaaagtttactagtatatatttttttacacacaacagacaactaaattatttctcaaaatgttgaaagaccgaaaccctccaggttgcgctgccgcaatatgtacaatcactgccgggctccacctcactgttcctccagcttagcttttcctttacctacacaaggtagcaaattgatgagtcaacagactcagtaagatatggaatacatatatataatcaatgctagactggctttatgcttaagccgccatgagctcaacaaccaagctcaccaaatggttaaaaacgttcttaagggaagtacgaccactgtaccaaaggcactaaagtaccaaccctgtacccgtgttggtagagccattattgtactcctgggaattactaagtgttgtaccacatgcatgacgtaccccctagtactcgtgttggtaacaccgtaaccagatcgga

SEQ ID NO: 143074 - DNA, 725 bp, Cannabis sativa
cggtctcggcattcctgctgaaccgctcttccgatctaaaaaattaaaaaacaaaagtgttaccaaacggcaccatagtttctcgtttgagaaggcttatactatagaagttaatggtgtggaggaaccatgtatcaagaccgtacggtacaaacttagtgataagagtaagaaagatattattgtttccattgaccctacaactgaatgggactgtaaagaaacaaaaaggtctgactatttcgaggtgacagaaaatatgttagtggtggaattaaagagcccaccagaaattgaagtagaagagatagtagaaacgatggaactcctttcagactcaaaatatgaagaaagagaaggtagaaaatttagacgaatcagagtattccccatcgttggataatgaggagaaaatgcagaactgtctccaacaacaaatgataacaagtcaaatggagatataccagattatcatttcgaggtagagattgaggaatcagagtaaaaaaaatgaaaatttatcggcataccacccatcgccaggataagaagtcttagtcgaaccagcaccaattcaagaggatgtgggaatgataacatattcaagagaaggacttgaagagtcagtagttgagtcatgcgtgtaggacaattagctattgattttttttttagctatttagtttgtttctttacttttcacatttcaattttattagtaagaa

SEQ ID NO: 143075 - DNA, 512 bp, Cannabis sativa
tcgccaagaaaattgcatcacccactgacgcccgtacttacgcccagtacatcgttagggaaatcgcatcacctaatcaggtgatttcgtacctacgctcggtactcatcatatatcattgaagctcccacttatgcccagtacgttgctaagaaaatcacatcacctaattaggtgagttcgtacctacgctcgatactcatcatatatcactgacgcccagtacgtcgctaggaaaatcgcatcacctaatcaggtgagctcgtatatcacatgcataatatcatcacattaacaatacttaaccaatcaatagttttattatataacaatattaactatatctcaatattaatcgattcattacaatactaattgtattacatacaacgtgccatgtagtaaaatatatttttcttacctttaatcctggttcatacatgtcggcaaactcaagtggagaactatccccgacaatctcaacttcaacccatttcctgctaaaaccatct

SEQ ID NO: 143076 - DNA, 546 bp, Cannabis sativa
gggggggggggggggggggggaaatgaccccacatgccccccttccctccgcctctggttgttgccatgccaacagtagcacaagccagtcctgtcctaccgggagggatcgactaagaaagcctactgcgggcgttgaggatgattgagcagcagagaaagcctatttacaaattccatgggacctcgcctttcaatgaagatgtgcgacaagcttgactccctaaaggattcaggttatccgaatcgctgaaatacaaaggtgctactaatcccataaattatttagataaatttaatacaattatagaagtaaatcagttaccacaactagcgaagtatcgtatactcgcggcaaccctaaagaataacgctcacgattggttcagctaattactcgaagcctccatatcaacttgttaattattttaatttcatatttcaaattatttaattataattttattatttcagaagttagggtaattttttttaatatttaaattttatatgcttatttgtattaatatatattttttaaattta

SEQ ID NO: 143077 - DNA, 538 bp, Cannabis sativa
tcacgagtcaaaacataaggagcatgcggtttcattagcatgtcattcccatcttcataaatccacaacgattccctaatacccatcttctttatatcatgttgttcattggttgtatcctttgatttatcattatctaagatggttcctaggaaagtgtcacacacattcttctcaacatgcatgacatcaaggttgtgttttaaaatattcgtgctacaatactccaactcgtataaatactttttttcttccaattagaagtttctgcaactcttctacgtttcacgcccccaaaatcttcatgatgttcgagaatttacggttcgagagcattaacttgtgataatatctcttcataagtaaatcgtcttggaggaggtcttctttcaactttaccatcaaatcgagtatcccttctcattgcatgactacttggcaagaaccttttatgaccaacatatgatgtcttcccgattactcgaatggacgttgtgtcttcattacaagtaggacaagctttataaccttgaccact

SEQ ID NO: 143078 - DNA, 627 bp, Cannabis sativa
gataagttctctatgagggatgctcaggttgttaagcaaccaattacaagtcagtacactctttctaaagagcaaagtcctaaaacagaaaaagaaatggaagctatgaaagatgtgccctattctaatgctgcagggtcagtcatgtatcttatggtaagtacaagacctgacttaggctatgctatgagtgtacttagcaaatacatggcaaatccaggaaaagttcactggttggccgtgaaatgggtgttcagatacctacttgggacaactaaggttggattagtctacaagagacagaatgctaacactataattgaaggctacagtgattcagattatgcaggggacagagacaataggagatctacatctgcctatttctttataattggagggaactgtattagttggaaagttcagctccaacctgttgtggcactatcaactacagaagctgagtatgtggccacaactgaagctataaaaggaggcaatatggttaaagggactaatgaatgcgctaaatctacttaaaggtgtgcctactgtgtactcagacagccagagctgcatatttctatgtaaaaatcctatgttccatgacagaacaaagcacataga

SEQ ID NO: 143079 - DNA, 501 bp, Cannabis sativa
tgctgtagcagggagtaagcacttcgcacagtataaagacctctgtggtctgctgtccaagaccagaagtctgcccctgcagaacgactcaagggtataccaaggatgatgttggcctcaagtgatggaaataaatcattcacaacatctgcatcccagctacggtcattaacttgagaaagagagttcacaaggttattttgtagacttggatgactagacacaagacacttgttctgttgattcggtacccaaggagtgcctaaaatttttgtgcttagaccatcaccaatcgtacgaatagctccaagacgaaccacatgttgagcgccccaaatactacgccaaacaaagcttgggttgttaccaagttcggctgatagaaaatcagagtgtgggaaatactttgctttgtaaactctagcagtgagagaatttgggttacacaaaatacgccatccttgtttagcaagcatggcaaggttaaagtcatgtaagtgt

SEQ ID NO: 143080 - DNA, 804 bp, Cannabis sativa
attaattaattttttgtaatttattattaaattaggattttgtagtaattttctttctccttaaattattaatttcttatagcaactctttataatttaaaattataaacatgtaattttataattaaaattttattatacatataactttaattttaaattattacactttattatttaattttttatttaaatatttaaaaagtaaaaagtgaaatatgttcaatgtatttcccaaaaataaagggctaaactcctccatcctttttttttttcaataagtagtcatttactcaaaaaactaaactagagtcaaaaaaacaaagtcaagctctcctacaaaacgaaacaacctcaaactctgatagaaaaactcctctctcctcgccttgacttgttttgtacataattaaaggacccttatgcctatcaatcacaaaatggattaaaactagaatgagattattagggatatttgcttggaagggaggaagagcaacctatttcgatatgcaactgcttacaagtgtgtggagagacagagagaaagaggagtagtacaggtttgggtgaggtcatttgtatagcttaacggttatggagaagaaaaccaatgatgtagtattacccataatattgaccagaagtttaaaagtgttttaagactgagcaacaaaacggtgtagtattgtaggtagaaatattactctagtccaatggtatttgaacatatacaacttaggcctcagcttgaggccttatacttagttcttctagttgtaaaaaaataatttaatatcattt

SEQ ID NO: 143081 - DNA, 1075 bp, Cannabis sativa
  modified_base (1029)..(1049): a, c, t, g, unknown or other
ttaaaattctgcatagtccacgggtcaatcttattcaaatttcttattgttttctcagggcctcttttgtatgagttttttcgtccatttttcaatcttacttgtcactatttataattacatagtgagtagttaattacaaagttaactataatctgtttacaacaatcatcccctaaactcatggggtttgattacatatcatgtagtgtaaatgcggttattactgggtcaaaacgatcgtgtattaaaatatgtctttaattgttgtatccggagatgtctcgacacaagcttagttccagtgaccattatagcgagttggggccattccgagatcgacgatgcacgtcttgtgacgaccgctattcttatttacgaaggattcttcgaggcttgttttgaatgttagcttctgacttatcaggattgtaagtctcactgagaaaatgtctgaagttaactggatgaagttacaagaagctttcccatagcgagataggaacctcgcttactttgttttgagccaacctgactgccacacttagtttgtacattatgccttaagtgcttttgtagttgatacgtgtcgctttcgtcttcctagaagtaatgttcttgatgcctcgctattcacatttagtgacacatggtttctcgctaatatactaagcaacagtttgtatatcgactcctcgcataagaccttacagtcagcatcttacaaatatactctgatgcttacataattaatgatttatttcataaaaagcgagttcatcaattcgtattccctttatcttgacacgtgtcttccactgagatggaaaccgaattttgggtataacaggtaactttatatatttatttgtgattgataagtcttattttattttattttttcgataaaaataatcacacttattttttcttaaatataggctaattctgagacggggaacatcctgttgggattttatgccctaaataaaaccatttcaatttaatctgatttgttatcaatagaannnnnnnnnnnnnnnnnnnnnacatgtagttttcatgtttatagttt

SEQ ID NO: 143082 - DNA, 574 bp, Cannabis sativa
ggtacaaccctgagccaaaatcaaaaaatttctgctacatggcaaccggtcgaccagttttggcagaccaacaactcttgggttttcacccccaaactcgagccaaacctttccaaacctaatcaacagctccataacagtttattatcataaacataacatgtacaaagtatcaattcacctcagttcatcaattaccaaagtcctcaagctaaaaccaagaaattgaatttctaacactaaattcttcaatttcagcaccacaaccaccaaaatcatttaaaccaaacactaatcaatcataattcaaacctaaaagcatctcctaatctcaatttgaaatcacagctcttaaatcccataatctatattaaaacctaacctacaacttctagaaatcaagcaaaagaagtgagaacttaccttaaagcttaaagaatccttcgattaggttaaattctgctaaagcttgagaattggtgaagaatttcccttcttgcaactgctggtcattggttcgaaggggagaaaaagaagggaaatggtgttgtgccatttcttaatttctaggttt

SEQ ID NO: 143083 - DNA, 561 bp, Cannabis sativa
  modified_base (58)..(64): a, c, t, g, unknown or other
ttgaggcgaaatccttgacaatgtgtaataggaatatgatttaggcatttgttggatnnnnnnngcctttcaagcctaccataaaatttttattccttgttgacccttttgagcctaaacctgttttgtttctcacccattgaaccaaaaattgtagccacactattaattttgtcttcaccattttatccatgatatcataagctacacaattagtttgggggagcataaatatttagtgtgagaaaacagttagagggagaagaacttgcaagattgagaaaaagaaaacaaatgtgtaactcgatgtcactgaaaaaaaaaaacaagaaaaattccgaaaaaaaaaacaccatagaaagaaagaattatttcagtgatgttagaaaagaaatatatatatatatatatatatcttctctcaatcttggtgaatgtgggaacactatggggctttgaaaaaaagcaagaagattgtgggttctgtttgtgtgtgttaggctatttttagcctatgttttggatctaatttatgtgcgtttttagctgtgttgggacgga

SEQ ID NO: 143084 - DNA, 1619 bp, Cannabis sativa
cccttggcatgatcaccccatcgggtaggaggcatcttaaatctaaggagacgttcatcaaattctataggtctacatcgagaataatcttgagtagaagggacacgatgaataactaagggagactaaccggatccggaggtgctggcatcaggagccctagtgttgggaaccgggagcagcaacttgggccgagacgacacccgctctttgcccgcctctacccagagagtcctcccagcatcggcttgagccttaatgtaagctagctcttgttccctcctaaagaggtacttctagtaccggtcctccgctgaggcgataatgtctgcctggagtaccttttcggcatcatgggtgcgaatgttggggcaaaggaccttggagaggttgaagttgtccaccgattggccctccgtgatgagcttagccttcctacagttcaccgttgtgaccaagtcccccaattaagactgtctttgtcatatgtggaaaagaccttggcgggccgaaggaagagttgggtaggggcggcgcggtgcatcgggggaatcctgacccactccatgagcagttctgggcgttccacggcatgaaaaccggaagagaaaaaaaatcagtgatgatactccttgacattcttttggaagttataagtgaccggaccctcattggcaggatgggcctggggtgtgaagaaaccatctttgaatttatcccccttcttggggacagacacaaattcgaaaaaatataaaatttcagccaagctaggtgaagcccagccctgggctacataaaaaataaataaacctgagagcaggcggtacgcttggggaatgaattggtaaggcgcgaggccaacaaaaactaaaaaatttataaagtaatctttaagcaggagcatggctccagacatgaggtgggtctggctccaggctccaaaaccaccgtagttgtggttgggcgtctcttcctctcgaggaagacggtgaaaaaccccggaaggggacggcttgataccagccatggtcacaatcttttccagctggtgggtacaagtcaaggtcgagcaaagttcgtccgcctcccaaccattcgatcgacaggtgtagttctcctgaacgacagggcccttcatcacttcctctagggtagcaagagtaactgcccccttacgggaatatttggttccggacgcagaagcagacatttagttctgtaaaaggaaaaatccagtagttagcccccaaaccaaaccctagtgttaaaagagagaatgggggtcccctaaccgctggaaacaggccccctccggatgcatgcgaaagatggaaattctagggatttttctaggcaaacatcgggtgcaaatatctcaaaggcagcgaaagcagagggaaaatgaaagacagaacgtgggaacaaaaactgtctcatatcctaaacaatgttccaacagaggggtctatcgcaaaaatagaagaaagagaagtagtaaaacacaaataagaagagcgtatatgcaccaagcgaccgttttcgccaaagttatttcccaaaaatcaagcacttaaccaaaagttctaccctgacatgcaaatgaacaacaaaaacat

SEQ ID NO: 143085 - DNA, 728 bp, Cannabis sativa
  modified_base (683)..(684): a, c, t, g, unknown or other
agggcataaaacccaacacgaggtgggggttccggtttggtgtttgagcctgggtatatatcaaggtccaagttggggttaatgtccaaaaatgttgaataagaaaaaaaaaactttttttttaaaaaaaaattgaaagtgactttttttaaaattttaaaattttgattcacgattaaaaaattgaaaagtaaaaatagttttatagaacatgattttagaaaatattttcacttttccaattgaaaaaataaaaaattaattaaaaaagtattagcaaacacaacctctatgttttacatgactataaatattgaaataaatatgagtacaacaattgaggtatttaaattataaattttgcattctaaattatttgaattttttttttaagtttgtagcatcttcaattatgctctctaaacacaatctttagttaaaatagggagcgagttttaaaaaaatgagctccaaccatacaaaaagtcgatccctagaatggatgcagagctctctacttttttgctaaatttttttagtagtatttaaatcaaaagtattattatttttttattattttattaaattaatttaaatttaacaaatttaaaatataaaatactattaaaataattaaacattaactaaaatagagaatatgattgtgttgaccgaggttttcnncaaccaataaaatattataagatttgagaactgtaagaaaatta

SEQ ID NO: 143086 - DNA, 541 bp, Cannabis sativa
tattttaaacattgtatgcttttgttactttatattatttgattagtttatgtattattaaattaacaagaaaaataataaggaaattgattaattgtgtacgtacgaagggtgtattaagggagtgtgtagtgtatgtgtatatatttagtaatggataattttgtttaagtattatatatagttttttattcttcttgaaatttcttgcatactttgattggcgaagaatattttacttatgtgacaccttcgtataaaaaaaaaagttaagataatagttgaattaaattatatattttaacattaaagttaggataattggttgatgtttttaattattaattgtataatttttgttagtttacacatgtctttatcatgatatcttatattttatattttttttttaatttctttaatagttatggacgagatggacattgtggtgtttgtgcttgcaagaaatttacattttagacgaataataatgggtattttagtgctaataaatgcctatatcaaagttcaacaatattat

SEQ ID NO: 143087 - DNA, 570 bp, Cannabis sativa
aattaaaaatttcatcttaatccactaaggataataaaataaaaacttaaatggcaaatgtctgaaagcccttacttcactgctaagtaaactctaaatttatgagtaaaataatcttaaccaattaccctaaaaaatctcaatattataactatacataaattttgtttcgttaattctaagatactaaactgtatctatgtgacactattggctaaaacgtcaattctactgttactcaacataaaatacaaaaatgccaaaatttaaaaataacttgcatagcacacctaaaatctaataaaatctttataattgaaaaatgatctcattaatgtcttttttgacataaattttattttctactaatacacgtataattataaataattattaaactacttatgttaatttccattatctaattatgcagtctagccatagcaaaaaaagattagtggtcaagttcagcaaaaaaagataagtagtggtcagatttgcccataaatatctaagaaaaagtaaaacatgaaattatagagactgaaagcaatgcccacaaaaataata

SEQ ID NO: 143088 - DNA, 1518 bp, Cannabis sativa
  modified_base (187)..(198): a, c, t, g, unknown or other
tccctaaatttttatttctttagcaacattaagtttccactattagatattaacatttttattatttattttacttactttaatttatgtttttttgtgttaaattcaaatatatatattttttaattttaatactttgagaaaaataattataatatttttatttattatattaatattaatattnnnnnnnnnnnntttattatattcatatacattaattataaggaaaaaaaaataaatactagcagacacatataatagctagaaagaattttagctcctcatatttttatattttagcatttatggtatattttattgttaatttatgaatatgtagtattataattttaataattttttttttaattatatatatattgattatttaaattttgcatcaacgatggtaaattttcataggtttgccgtgaaacataagttaaaaataaattttaaaatataatttacttttgtagtttataaaaaaattatattattatttaagcatttttaattgttctttttttttaattggacgggttgcacttatatttttgtaacccaatttttatgttgagttgaataaaatgtagcataaaccaaccaaactaatcaacgtacaccctacattgtataacaaaaaatttacaaataaaatttatattacaatgtaaaatttctttaccaaaattatggtatacatattttttttaataaaaaaatataaaattcttaacccaaatttactatataattaatgatttacatgcacaaaaaaaaatatttgttcataatatatcaacatatacataaatgcatattacccaacataatgtttaatttatgtaatcgtggagatggctctgataccatttgttaatttttagggtcatatcagagtcacagcggaagagaaaaataagattcagttttttaaaaaaaaattgttgaatctgatatgaaccataaaccttgaatctcaacacaatatgatataaattaaatctaactacttggaataagaattttacctttgatgcctatcacgggatccatgaatctttttgtatatttgtttgatcattcaatccacaactttatgggtttgatgaagaatccacatcagatcttccagattagcatcaatactcatgatcagagtgggcttatagatttggtaggacgaataaacttttctaattatagtgtattctcaactcatgagacactgtaatagagattgggaaaacaccaattctctttggagagagagaggtgtgaggtaggagagagagagagagagtatcgtgagagagagactgaattttctcaatcgtattttccaatcctaaaaacttatgttatgttacgtactcttcactcttatatatattattatatgtatcttatttttaaattacatatattttatatatactagcaaaaaactacgtgcgaggcacgtatactaaattttatgctaggttttttctatgttatttgaaagtgaga

SEQ ID NO: 143089 - DNA, 777 bp, Cannabis sativa
aggtattgcagcttctattttacctggcggtcgaacaactcattctctatataaaatacccattcacttagataattatagttcttgtgcagtagtaaacaatcaggtttaagcaaattattgcaactaacaaaacttattatttgggatgaggcaccattgtcaaataaagaagctattgaagctttaaacacatgttgaaagacataaataattccactcttccttttgttggtaaagttatagtttttggaggtgattttcgtcaggtattacatgttgttcctaaaggtacaagagaacaaatgattaatgcaagttaagtaaaatctgatttatggcccttatgtactaaaattacattaacagacaacatgcgtgccagacaagatcccttatttagtaattatttattaaatattggcaatggaaccgaaccaactatagatggaaagatacagctactctcatcgatgattttaccttatgaggatgatgatacttcgctaaacaacttaatagatttcgtctttctagatattaataactacatagaatagaaaatatgaatacaatactcaatcgcgtaattttaactcctaaaaataagtatgttgaccacattaatacaattcttattaatcgatttcctggtaattccataaaatatcataattttgatgaaaccatagataaaaatgaacaaggagtacaagaagactttatgaatagcttaacaccaagtggattccctgcccatgaattaacactaaaatt

SEQ ID NO: 143090 - DNA, 604 bp, Cannabis sativa
agagagagagagagagagcactttggcttttttttttttggcttaacattctggttatttttttatgttagagaaaatagaataaaacatattattgagagagagaaggtagtggagcggctgagtggctttgataggtttttaggtttaaattggagagagaaagagaaaatatattatttattaaataataagaaattactttatttttgaaatctgataagtttttttagtagtacatgtgaattcctctaggtaggcgtgaattattttttttcaaataatctaaccccacgtccagcatagtagcgtccatcatagtagttggacgaaaattatactcaaaattaaaaatatatatattatttaattaaattttttaacatataacgtcctttgactttttcaagtccaatattgttagacataatataaaattttttctagtccatcaatgttggacataaaatctcctcaaaaaaaatttcatgtccaaccctatttttgttagacataaaaggggttatttgtagtagtgagagtaatttcacaatattaagaattttgtgattaaggatatgtaatggtggagaaaggttgtgtt

SEQ ID NO: 143091 - DNA, 669 bp, Cannabis sativa
gttaggcaaattcaaaagattacccggtacatttatcacttcatggtccccctccaaagccatgtgtaaatttcctcgtaccaatcatcgtactggatgcaggcgccacactcccactactcgtaccagcaatgtacgactgtcccttctccttcatggttttcgactgacgtaagggttccgccgtatcaccaccgctctgcttccctttctctgacggcacctcccctcccggtgaggcctttacactttttctattccaaacaccccgccggctcctcccttgtaattcccactccggtatctcttctagctcccatttgaggactcccttccccttcgagttaaaacagttactgttgcccgtatcgcttttaatccataatccatagagaggaacagccttccctgatctcggcgtgatcatcgtcatgggagcatgacaaatcttatcccagtgagccaacttaccacagttaaaacataacatggggagtttttcatacttgaactgaacccacgactcgggttttccgtcagacttcaagaagaatcccgccggaatcggatgggcaacccaaacatcaacccacatcctcaagtatcctctacgcaccacttccgctttactacttccatctgtttcagctaactcaccaatcttctttg

SEQ ID NO: 143092 - DNA, 1075 bp, Cannabis sativa
  modified_base (890)..(901): a, c, t, g, unknown or other
tattaaagtaaaactaattagtatcttcccatcttactttttaattacagtaacttttaaatataaaataaataaaatatttttataaaatattgaattttgttggagtttaaaattgggttaattgttttcttaaaaaactaatttaaattatgtaaaagattttaaaaaaatacctttaagtctaagtattttatattgtaaaagcgaaaatatatatatatatttatatatatatatatatatttaccacttattacacttattaaaataatcactttaaagagtaggttaagtaagtactaattttgagtcaaaacagttaatgataaagctaaaattcttcaattaaaattataagagagaaagttacacatagaggtagacaaaaataataaataataaagaaaattaagaaaaacaaacaaacaaacaaaatgctgcaaatgcaataaagaaagagaaggaaaaaaaatgtgataagcacggtcttaagaaaatgacaagaaaagatgtgatattaattacggtacggtttggtatgagattgattaaaatagctgacaagaattatgtaatttttttgcaatttgcgtatattaaaatgtaatatggggttacgtaccttggccggagcggaaccagcgtctgccaactgagaggacatgaaaccaccgctggagaaggctggctggcggagaacattttccaaaaccctaggatataaattttgggagaaatcgcctcagctcagctatggagaaatgcgtacaaattttcccgccaagttaggttttgggggggtttttgatttagttaataaatttatttggtagtgtgtttggttcttttgaatcgtgtcttttggtaacatttttattttttaattnnnnnnnnnnnnaataaaagtaaaatttttgttttaaaaatttttgtttttaaaaaataataataagttctgtaactacttcaattttaaaaacagaaaataaaagtgtgttctgtaacgtttatttttatattcatttattgattttatttacgtcgggtttaggtttggggtcggattcgggtt

SEQ ID NO: 143093 - DNA, 872 bp, Cannabis sativa
gttagttagggtgttacaataaagcccttgttcgatagatgcaacacacatttgaacgtcatttcgagaaatgataaaaccaaaactcgaaaaattcaatttgtattgttgcaactgtaaacatgaaacagaaatcaagtttttactgaaatttggaataaacaagacattgtctaaatccaaaattctgttttgaaacttgagtttggcttttcctctaactctaaccgataccattttgtcattaccaactttaagtttaactctccagattttaaataattccagttttcaagcaattgcaatgaacaatagacatggttagtagatccaaaatcaacaatccagatggatttgtcattctctaaaatacatgattaaaaaactaaagcattaccatcgttcttagtgttcaaaagtctgagacaatttaatttaaaatgtcccttctgttcacaattagaacattgaataatatgtctgtttaactattcttggattgttcttattttgttcttattgctggtacaatcttttgtgaaagataatctgaggaagtggaaacactttctctatttttctcaactgagcctgaagtagtaggattgtcgaaggaattatctcaatatgttcagctttccttttgcccttatctgcattactggagaaggatctccatgtaagtaacaatgtccgttcataagcacgcaattcagcgtccagcttgtctatgtcgaatgagttccaattgttagcaaggaattggttaaactcaggtgataagttattgagaacaaaatgaactctctgctctccaaataaaacaattcccagcatagctgctttccagaatttcatgttcatcatgagca

SEQ ID NO: 143094 - DNA, 526 bp, Cannabis sativa
caattatcccctgtgaaatctccttagcccaaagaggagaacttgaaggtatctaaccaaaaacaaaccttcaagtatatccctaaaagtcgacgaggagtagggcaaaaagctttagtaccgatccaagattcgatgaaaagctttactttaccactaagaaaaatcgatcagtcactacccaagggtaaaatgaaaatttcaatttcctttggtaaggatagaaagaagaataaaagggttgttactctcaataaaaagtcctccacatctgtaactccaaaaaccttcaaaacagagaagaaaaagtttcattcaagaagcaaaaaagaagtcacaatccatcaaaatagtgattgtttaaaagcttcttttgaaccagatgaattactagaggaggaacaaaaaatgtttcgtagcaacgatgttcctacaccctccccgcgggtgtcggtatttgatagacttgaagcaagcacatccaccccacgagtgtcagcatttgaaaggcttgttttcccaagtg

SEQ ID NO: 143095 - DNA, 628 bp, Cannabis sativa
gcatttccagccgcccttgaagagcattcatcccaaccgttagatctgtagaatacgaatcgattcgattcccaccgttcactgacgcctgatcacaactcctttgcacccgttctggcctataaaagccatcctctttccttcatttggttactttcactactttgccatttttcgcaagagcccatttgagagaaaaaatttcatacaccatagatttcttgttgctcttccttcgccgttgtcagtccaccctatatcgtcgaccgacgccaacccccagctctcaactttcatgtaagttctctagacacttcatgctttttatcgtctgtttgcatgttaggatcgaacttcttggttgagtgttggatttctgggaaataactttgactgagtctgtcgtgtaatgtgtggaatctttctttatttgtgtttttttttttattttcccccatttttctttagaatcgacccttctgctcgaaggactgtttagggcatggggtgattttcgctcccacattctgggtttttcattttccgtccactttcgctgcctttgggatttttgcacccgatgtttgctaaggaaagtccttttggtttccacttttggcaaacatcc

SEQ ID NO: 143096 - DNA, 1319 bp, Cannabis sativa
gaagccacttgggaattagagtctgacatgaggactcaacatccagagctattcaagttagatttcgaggacgaaatcgtattaacaaagggataattgtaatgatcgctttagtaatttggattaataaaggcaattagcactaatttctatttttttcatcattatttaggatatttaattgactatgggccccattattaaaaatgggcattagagttataatttatcaatttcggagatttgattaaactctaatggtaatatttgaattatatgaaaaatatgttatttttacaattttgctcggctacaacggaaaatgcgatggatggctagtttaatcacatgggtaagtttagaacattattttttagtgggatatgttttggagaaaataaaatatcggggttgagcggggttatgaaatttgaccatattacccccagtcttgaaaataccctagttttaagttaaagggcattttagtaaattaccaaagaaagtgaattggtggctgccttttatgatgacacctagcaagttaatttcagcaaggattaagttagaaaataaactcttttcattttgagaaaattaaaggaaattaagactaaaatcaaggaactctttctcctccccttctcttttttgaacccagctagaaccaaggaattggttgctgatttctagtattttcagtaaggaattcaaggggaaatcaagttgaggtaacccctagattttttttgtaatttttcaacatttgatatttgtttaaatatgtgatttttttaaaaaaactatttgagttagaaatgttaaggttcggtttttatgttcattttaagttgattgaaggttttggtagctggttttattgcttgatgttggatttatggaagtttgaacttagaaacccaagctttgatctttaatggcataatttgattcagtgactttttctgtgaattactggttggaatatattgagtataccctaattaggtactctggaaggtttggttacatttggtggagttttgagcaacaaatgagattctagggtgaactggtataaactgggtaaccagttttacccgtacctttaaaaccgcttagccaattttggcagggttccctgagtgtctcgttttctcaattctcatcaattttagtgccatagttgggtatttccctactttgtgagttagtgtaatccttagaaagtataacaaaacctagagttgtgggttctggtttcccagattagggattcgatcatgtgatttacctggtttcattatgtgattagggca

SEQ ID NO: 143097 - DNA, 851 bp, Cannabis sativa
aattcagtcgaaagctgataaatccatattacctcacacacaaactgtaccatagctctatattctgattcagcactggatctagatagaacattttgtctcttatccaagagaccagattgcccccaacaaatacacaatatcctaaagtggatcgtctatctaccttggagcatgcccaatctgcatcagagaaacactcaatttgggtatgtccatgatccttgtaaattatacctcgtcctagtgctcctttcaagtaacataaaatttgctctaatgctacccaatgatgaattgttggagaagacatgaattgactaatgacactaaccgggaatgcaatatctgaacgagtcacagttagataattcaactttccaactaatctgtgatatttctcattatcttcaaatggttccccatcacgtgtaagatgcacagttggattcattggagcattacaaggttttgctcccaattttcttgtctcagttaacaaatcaagtacatactttctttgagacagaaaaataccttgattactccgagtaacttcaacaccaagaaatacttgagctcccctaaatctttcgtgtgaaactgggtatgaatgaaagatttaagggatgagatgccttcagtattctttctagtaataacgatgccatcaacatacaccacaaacaaaatgataccagcagttgatctttgataaaacacataatgatctgacttacttttcaactaatcaaatttctcaacagcctgactaaatttaccaaaccaagcacgagggctttgtttcaatccatataaagatttgcaaagatgacaaactcgccctaact

SEQ ID NO: 143098 - DNA, 762 bp, Cannabis sativa
  modified_base (27)..(65): a, c, t, g, unknown or other
  modified_base (201)..(202): a, c, t, g, unknown or other
  modified_base (229)..(238): a, c, t, g, unknown or other
cataagcctcgttgattagcaacgagnnnnnnnnnnnnnnnnnnnnnnnnnnnnnnnnnnnnnnntagttagggtgttacatttattttctgaatgcaactatagctttgttgtaaaagatatgtaggaaaccctaagtttagagactctgccattttcctttgtaacgattcatgcgacttcatcgttcataatgcttgnnttttgaactgcataatgcctgtctttnnnnnnnnnnattctaagcttcatgaaatttttggccctaactcgcgaaaactttgaacttctgagttttggctttttgtcgagtattttaattctttaatctattgagaattcctagtcagcatatttgcctatttaatgttcgatatcccgaccaaacactcatctcgcgtgttgtcttttgtagatgaagccaggggagttttggggaagcgaacaccaaatcgaccaagacttgcttcaacttttgcacgaggatcatcctcgtctttgctctagtccgccctcttcaagcgacggacattttgattcaactttcccgtccagccaaagaatgatggctcatattaaacaaacaatgcataaagccaatgcatccaaccctcacgtgggccagcacgctaccttgcccaacgccgaacaggatccacccgcacaagaggagggggatcatgaaggggacgctgaggtctaggagatagaggagcagggcgatgtccgtcctggtactccttccgaggaggaggctgcacc

SEQ ID NO: 143099 - DNA, 844 bp, Cannabis sativa
agaacttacctccaaagcttctaggatgatcttgggtatccaatctgctcaaaaactgagagaaatcaaaatgaatcccctggttttggctaggtctaggtcacgaataagagagaaggagaagagatgaggcttccttgccttggaagttttctttctaaaatgaggtttttccatcccttttattttcatttctttccttttataaataataggcaacagtaaaaaaaaataaaagaagaaaagtcaaaaataccactgaatttactaatctacccctttcccataattttttttaaaaaaaaaccctaggagcattttggtaatttcactaattctccaacccgatattctaataaaattctaacttaatccggaatattctcaaaataattctttcattaatgtcgtgacattactaaccacatcgctaaattctcacaattgccgggcccgaaaatatcgtatttcattaaataatttccgaacaattaagctaagtaagatcataatcttacttcgtttccaaagtaattatatatttaataaaatatgtctatttaaatattatttattttgtgggatattacaactatcccccacttataggaattttgtcctcgaaatttaccagaaaagctcgggatacaactcccgcagctgcgactctaactcccaagtcgttgcttcaactttgctgttccgccataacactttcactagcggagtagtcttgttccacattaccttttcttttctgttcaaaaatctgtaccgattgtttttcatataacaagtctgtatgaaattcaatattctcccaactccgtatatggatttcttc

SEQ ID NO: 143100 - DNA, 519 bp, Cannabis sativa
tcccaaactagattgtggattgaaccatctatagtatgaatggcttgatttcaaagttgttagcttcgatggcaggtggccttatacaagatatctaacccctatcaggttgggtaggacatagtccctcaagctatagttaggtggattaagatcattagcctggtcgtctatgacacctccattattgtcattattggccatctctacttcttgcttagccacttccactgctctttccaatctcttccttcttctgttctgtctacaaatcttctctatttcaggatcaataagaaatctggcaattggtccttgacgtcccataaacaagttgttcttgagaaaagaggaaaaaaattgacacaaacataattattacaaaaattgaaaaaaaaaaaaccaaattagaacaaaagttaattttattaacattaactaacaatcctcaacaacggcggcaaaaacttgttgtggtattttcaacacgaaagtatacgtatcgttaacaagtaatag

SEQ ID NO: 143101 - DNA, 562 bp, Cannabis sativa
ccaccatccgaccgagaccacaacaatccgatcgatcgagaaggcttcatttcagtccaacctagacctcaccaatcccttcatcaaccgtaaataaagaggcccgccactaacggggaccgcatacacataccatgaatagagaggacacgaacgaagacattctctgtaattttctagttttttctgtctttacgagtcgatctgatagtgttcgatataggtttgataggaggttctaaaatttaagttttgaggttgatggtgaaggtccgatagtggttcgatatagattcgatggtggttagatgcatagtagctgattggtgaatgtatttcgtgttcgatggggatccaatactgtttgaatgggggtctgatggggtcataatgtactgggcagatgagtatatatatataaatatatatttaatgtatcatgactttgatataatttaagaactttaacaaaaaaaaaaaattaccataagcaaaattcatgctgataacgtgttataaaataataaaaaaatatatgaaaagagagaagaaaagagaaaaa

SEQ ID NO: 143102 - DNA, 761 bp, Cannabis sativa
ttatataaatctgtgtgtatggttaatagtgtaaatatacgtgtatgattttttttatatataatatgtatgagtatgtgttgtatgttgatatataatatatataatatatacaatatttatatagtatattatatttggaaatatgttgatatataatatatataatatatataatatttatacagtatattatatttggaaatatgtgttagttttgattttaaatttttacttattgtacattatatgtttatacagtatattatattttgtatatattgtatatcgtatattatatattgtatattgtatattgtatattgtattttgtatattgtatatacaatgtatatacagtttatatactatattgtatatgcagtatatatgaacaacttgtaaatatgtacaaaattataaaattgatatataatttattatttttaaaaaatttagtaaaatgaattagagtaaatctttattattggaaaaagtacttagaagtaaaatattttttaacatgaattatataaatgtaaataaatataattaatttttatgtatataaaacataaaaaaataaatttttttatgtaaattattaaataagattttagtatctaaattttaattttttaataataaaaattaaagttacaaaaaaatttttatgaaataaatacttaataattaaatataaaaaataattaaataatgaaattttaacattaaaatatgtaaaaaataaatattaataa

SEQ ID NO: 143103 - DNA, 1213 bp, Cannabis sativa
acgtgcttggtccagctcgagatcgttgttcctctgaccggccaggccttggaacatatttttaaattcgtccaactgtgcctgcacagctggacgaacttattcggcctcttggtcaacctgagtcacatcagtagctctttgagcaggattttaagcaggggttctgggctacacgattggcgcgtcaagatggttgttcacccctctcctcctattcaaatcatatctgagatcatgtgttgtccccattctatcaaatacagaaacacctggctgcctcattgactggttggttttgccaatttgttgatcggcaccattaacttggttagaattattaggtatgacttctcctgatgaattactagacaaggtctgcccgcctaccacttggcccacaggtggaacctctgactggggattggacggctgaccatttatagtctgagaggtgttcatcgctggatcttcgtcggtctcgtccaaggggatgatggttacaggctattgtccggtagtctgataggctttccgtatcaacacagtggcctgccgattacggtcgtcaatgactgcttgctgagcccctaatgtttccatctccttgtccctccattcggtgaacatgtgcctctgctcttcgagcgcaagatttgcagcggcgcgaagttcctcctgatcatgatgcagggtgttggtatgaccctgcatgattccaagagcagcacggaggttctggatttcagtgtcatctccaatggttgtttggaacattggtagtgggaggaacggctgtgttgtgaatgccctggttggcgtaatttcactcacaggagtcatcacaccgtgacccgcaattgatggctatccgagattcgtggttggcagaaccctcgtgttccctgggttctgcagtgtaggatccactgcctgcggatttgctggatcaaccatgcccctacgagtatgtaccaccatcgtacttgtgattagatttgagataaagagcgatccttgattctggctctcaatgaaagcaccaaaatattgacctcgcttttagccaaagacaataagtctaatttgtaagcggcaagaagtataatacgagggtaatataataaagcaaataaagacaagaattttatagaagtttagccccgagcagttcggtaatagcctaatcctcgtagtttgtattgacttaaga

SEQ ID NO: 143104 - DNA, 504 bp, Cannabis sativa
gtcaaacaagagtacaagagtgggaaaaacataacagaaaaactgttaaaaaaccaactgtaataactacctattacttacaccagtaaataaatcccacatatattttagtagtttcacatttctctccacaaaaagaaaatcccatatttaaagctccatcccaatataaaaaaaaaaaaaataaataaatatagagtgcaaaatatacttatttcatattactaaatttatgtttggtgataaaatagtgtttatattcaaaattaattattgcaataaaaaatgaatttaattgaaatacatgtaagttgcatgagtgtctagtaaggtcgatcttaagtataggcggactaaactcgtgcttaggtctacacctttcaaagacctaaaatagaaaataaaaaagggaattttgattttatatgcttaaataattaaaaaattttattattataccaaaaacttaaaccataaaaaaactatacttttttttttcaaaac

SEQ ID NO: 143105 - DNA, 983 bp, Cannabis sativa
aggaggcgactatccggaggacccaaatagatgtgtcatcatgcctcacatttttccatcaggagttattggtcagtggcaagctgcgggtgatgaccacactaactttcaatgggatgacgacatattggatttgattcgaggggatgatgcccaatacttggacagttggaagaataaggagagaatatatattgtcctcttcttcaacagtgcaaagcattgggtgactttagatgcaaaccttgatcgttggaagtttagcatatttgactcgagccttggatcgatttcccgagatgaattgaagagtcacttgacattatgggaagagttattcccaactttaatgctgcagtccgacctattagagaatcatgaaatgatcatcatgcctcaactgagtgtctcagagagtcaagttagaaattttagtttaaaagtcatcgataggagcattgtacgacagacgaaatcaaggtaacttaattacaattgattttttattatttaacttgtatttaatttgcatactttttttatttactttttattgtctcatacaacggtgattgcaggatgcatgtgatagagcacatcgagcataaaatgctggaacttccgtttgataatgtgaacgatgacaatatgaagaaatttagagaacaatggtgtgtagatttgttttaccaaaatttagcatgaaaaattatatttttttattggtatttattaagataacaatgtaactagtttttttattggtatgtttatgttcttttattagttcataatacttttaggccttccagctatgccgcaaattataataatgatcaaataataaaataccatgaattctaatgtttaaaaaaatccaacatgaattcaataacaatacataatagtacaacacatcacagtacgactaaattaaaaatttatttttaacctcggtaggtgcaagtgcttctgttgtgccc

SEQ ID NO: 143106 - DNA, 1047 bp, Cannabis sativa
atagttgtttttatattgttttatggttgttttcgaacatctggaaccagatttttgaaaacgttcataaacgtatataaattaattgagtatgtttctagctctcttttccaacgtttttatcacattaaacacatattaatgtgttggtaacaaccatgtaatgaaaaaatttgattttcaaatgtgatcctcaaaactataaatagaggtctttgattcacttgtagataacaacaattttctatcttctaaacactaagctaaaaaatattgagaggcttgtttattcccaaaagcatttctattctattccttaagtgttttttatagggggaaataataagctttttggacaaaggtgcttaaaccttgtgatcaagcctttggtgatccctctttgtttacttgtgttcttcttcatcctctatcttttatttattttctgctctcttctcctctttattatatattcatatattatatctcttctatatacactatatttctactatatatcatacatatatatctctttattatatatattttctcttattgcttttacatttatgtgtatattttgctttgagttgtaactttgtcctcattctttctttctctttatttatattttgtgctttgggattgtaacttttatttaatctatagtccttgtaattttgttgcatagagttgtaaattttcttggtctcttcgttcatcttattgttattcttctattgatatctcatattttcctaacaatcaaaaagcttattgttttctattgaaggagaaacaatcaagatgatgaaccaagacttggtaagattggaccgttttgatgataccaattttactagctaggtggcaacataaggtgaggttcctcctaaccacactcaagattgcctatattcttgagtccaccttggaggccttaccggcgcctaccgacaaggataccaatgaggtcaagacacaaaggaagaagagagaagatgacaatcttctatgtagaggacacatcctcaactcactctc

SEQ ID NO: 143107 - DNA, 549 bp, Cannabis sativa
agcccatttctattcaaacaaactccacagaccacagccagccacaattaaaccataaaaaataaaatcaaattcaaaacatatctctcactttaataatatttagaaatacaaagttcgtaggtgtttaactcctacaccaaactccacacctaaatctccatagaacagccttaaattgtttggacagcaacaacgtcactttgatacaatatatacaagtttctatctagtatccattaatttgtcataaaaacacacaatacaaaatataagggaacgtgtcttctaccataagcaacacccaaaatttcattacacgtttgagaaaatcaaaccattattgatgaactacccacatatcaattgaaaacatttgtcaaacactacccaattctcttaattaaaccttttaatttatttattttagttatttcactcatagtcaaaccaaatgcaacttaatataaacaagaccacaagttttacccaagtggtactctcttttaatgcataaagaccaagacactattcttaactatacttata

SEQ ID NO: 143108 - DNA, 834 bp, Cannabis sativa
  modified_base (36)..(51): a, c, t, g, unknown or other
gtttatgtgaaattcatggtcactttttatttatannnnnnnnnnnnnnnntaaaataaatcccattaaataaaaaaataaggagaactataagtcggagacgtggcagtctaaaaatacttcaaataggtctatgtattctctctcattttttttatatttttttaatataaaatatttatatacgtatacaattactctaattttctatttttttttctaatttttactaaaaaaatcattcttaaaaccttataaaaataatacggctaaaaaatttttaaaactatttattctcaatttgactagaaaatactttgaattttctaaacttcaccctaactaatactaatacgttcttactttacatcttcagcattattcttttttctttatttcttcaatgttttgaatttcatctcattttggaagtctatttttattaatgtagactattttgatttttgtttttttaacagattgaatatatatttgtatataataactaataaataaatatatatgtattaaaaaaattgatctacatataattttttttaagcgagagatatagttaatattaactaatatgtcaaaaatatcaaaattctaaaattattatgtttatcattctttgttccctcacataataaaagtaagtacttatcgatcattgtttaacttattttatgtacaaagcaaacttattagaaaaaatattaatgataattacaagagtgaaatacggtgatgacataaactttaaatatagtggtgactaaatgagatacggtgatgattgttgttttaaaatgggtaaatagcggcataagt

SEQ ID NO: 143109 - DNA, 781 bp, Cannabis sativa
tggattggatttttgctgaacgtttcctttgcaccttactcaattcctacaatgccaaaaaaatacattagatactagtacttgtatttaaaagtttatcttagtacaaatataattagcacctcaaatttaggagttagtagactttcaacaaattttaaccaatcagtaaggtcaatttttagatgcttttcaaggacttgtgtcattcgttgcacataattttcttctaatgcgtgcctaataatatattttgtcattctgttcttgaagtctttcattaacttcccatcaaggatcagaaaatcatgtttgaaatcatctcgcactataaacccctctggttttaaggaaaacatacatgattagggttaacatctaaattaattaaaaatagatcaaaattctaacaaataactgcttacctgtatatctttcacaactttattttttagtgtagggttgacttgcttccaattttcataggacaaccctatcgtctggtgcatctaaatcctaaagtcaatactagattggagtagtttttgccatagtactgtcctttatcatttacttcgagtgtcattctttttccttggtccatcagcttggatacttcattcatctgagtagctcctcatgcaggtattgccctagaacactctacttctgggtttgaatctgagcctgaacctgagttagccatatctacaccattaacaaacaaaatataaagttagctataacagagtaactacgtaaataaaaaaaaaaaaaaaaa

SEQ ID NO: 143110 - DNA, 579 bp, Cannabis sativa
tttttatactttattgttatttgtgaagatatagggacccacaactatcttaaatatttttctaaaaaaataatatttaatgtttttaatttaaattttatatattataaataattttaattaacttattaatgcatcaattatatactaaatcttaaataggaatattatttagaataaaaaataaattgaatatcttgtattgaaataaaaaagatttctattttttttcctttgacagattagttacgagaggcataaaaatttaaaatccaaaacttcaattgcttttctttttgcaggttaatttcatgacaaaaaaaagttaaaaaccaaaacttcaatggtgaattgtgataatgtgctctaaaaatcaactcaataatcaaattggtttgaacactaatgccaaacaatgtacatagataaaaacttctaaagcaaatctgagaatagataacaaaaaacaaaaatgaagattaaaccaaaaccaaataaatctgaacaaaatcaaatcaaacccaagcccagcccagcgcagcctatgttcgatcaaatctgcgatcccccccaagccgg

SEQ ID NO: 143111 - DNA, 774 bp, Cannabis sativa
cttgaggtttgggtttgaagcgtctaacaacgaggctgagtacgaagccttgttggcttggctgagattagcaaaggagctaggagtgaaagcaattcgttgttttagcgactcctagctagtagtcaataaggtattgtgtgagtatcaggcaagaggattaaaaatggtggcctacctctcccaagtgcaaaaataactccaacaatttgagtactacttcatagaacaagtacctcgtgaacaaaactcgaatgtcgatgccttagcacagttggccaccactaaggaagctaatacactcaacgtcgtcctagtagagttccttcctaaatcgagcatcaataaggaggagagaggaagctaacatggagttggtggatgctcaaataacgtggatggctccacttattgattacttaaccactggaagtctcccttctgataaaagtgaagcaaggaagttattgtataaggtaccaaggttcactttgttggatggaaaattatacataaggggatactattattgaagtgtgtgacagttgaagaagcacaaagcatattgaaggaggtccatgaatgattttgtggggaccatgctggaggagatagcttagctaaaaagataataaggcaaggatactacgagactactatatattagtcaagactctctccagtacataaaaaggtgtgataagtgcgagcgcttttcaacaataccacgagccccttcagtggaactcacttctatgacctccccgtggccct

SEQ ID NO: 143112 - DNA, 502 bp, Cannabis sativa
ggggtacgatttgatagttatcaaagtttagagagcaaagttgctaattgacaaagacacgttatcatttaaacggaataataggatagaaccttgttatcctatttttgtactgtgacgtggcagcatgtacgagtgacatgtggctatcattccttgcacttggctgaagagatgttctgagcagacttcaagcaacatatctgcatgcacgaagtctgcttggccgaacagagtaaacgacggattatccgagcaaagaatgaagttagttcgtcgagttgtgtgtcaagacttgaatagtccaaaatggtttcgtgaagcccaagtacgaaggcaatccctacaatcatgggattgtatcagagagatacggcaggctatctcaatcccccatttcatgtattctaaatatgtaatgaatgttcttaccaattatagatattgtaagcaaacgagaaacctttcctcttgcatttagcccctataaatagtgatctag

SEQ ID NO: 143113 - DNA, 630 bp, Cannabis sativa
ttgttctggtgttactatggtggttttgttcatgggtgtggaagatggtctcgtttgtgtttacagtataaaagaaaaaaaaaagacaaggtattataaatgtaatttttgccgtataacagtaaaattataaatatttactcaaaacccagtatttttgtaaattttcctaaaattttaggacgtcacccgttctcatctgtcatcaaatcaaatctaattaaaatctatttatgcaaatacaatttaattcaattataattacatctattcaatttttcataattagattagattaaattagttaagtagaagtagatgggtttggtaattgtccactgctaaatactagtatgctacatgagatatttacataacaattatatataattgttataaatattaataattatatggatgttcaaatcttttatttattaccattaattgtaatcaatattcatttttttcttagtttctctttttcttagtttcttaatatttgactcttgtattcataactattttaaaagtgataacaataatcttatgagatatattatcaccaaaagaattatggatcatatgtgcacgagggggagacatattcatgttgcactctttttccct

SEQ ID NO: 143114 - DNA, 662 bp, Cannabis sativa
aagctgagaatcatggagctattatagatcagacaactcaagtgagtttgatcttaaatagtttgactctagcttttttaccgtttacatcaaattatgtcatgaacaagttgacttttgacttccacgagttaatcaaaaaccttcagacatttgaaaatttgattggaggaccatagaaaggaggaactaaagctcctagttcttgcactactaatggtacagctaaggttggggcaaacattgcctctacttcgaaacccagcaaaaagaagaagtggatgaatagcaagaagcctattaaagctgttaacagagctaataagaaaaaggctgctaatcccaatgcaaagcaaaaaggaaaatgcttctattgcaatgaaaagagacactgtaaaccccagtgtcctaagtttttggcaaagaaacaaggtatttttgtctatgctatgtactcatgtgttttagagaaatattatccccttaggttactaattctggatctactaaccatgtttattttcttcttatttcaactccaaatgcttaaacttggattgttagcgagttgagtcagatggttggacagaagggtggagattgtccaagtgaagatgaagctcgaatcttttttttttttttttttagttgttttttttttt

SEQ ID NO: 143115 - DNA, 1457 bp, Cannabis sativa
  modified_base (422)..(428): a, c, t, g, unknown or other
gttgcgctcacacgtctatttatgtctacgtggcgtaaacctacgtgttactctcacacgtctaaatacaataaggtcttaaaatagttcctttcagttctgattatcgagtccaacttgattatgccttgaacgcataacccttaatctcaatatgtataacacataattaatagtgccactgcactatttgtctatttgctatagacctgcatgttacgctcacatgcctatttatgtctacgtggcgtagacctacgtgttgctctcacacgtgtaaatacaataaggccttagtagggtttaccttagttttggttaccgagcctaacctgattatgccttgctcgcataatgttattcacatatatacgtaatccatacattacgttctttcagtggtttatcctggtgatatatannnnnnntaacccagttatgtcttatacacatagcttttaacatacatgcgtgtactcaatatttaccacatcatataaaatcttaggataataaccctaactcatgttttcattagattaataatattaccatatattaatgctttcttaccttcataatattatagggtaatgaccctagaccacatttaaattaaactcaaggtactagtttaccgagtctagcttaattatggctagacacataactctttattctaacacatttaacatggcataatattaaacatcttttaactactagggtaataaccctagaccaaataaccgctcactttagggtaataaccgtaatcccaattcttaattaatcacaatcacaacatacaatatgagcgccactgcacttaactctatgtgcatactgctgtcttacctgatgtcctgcaaaagaggatattccaaattcctgggttcttctgaccaagtgcaagtaatcctagtcacaattctgaaatttacacatataaggttaatccttaattccacatttacaaaatatatacttggcacccataatataaatattcacatagagctcgaaacgagctttccaacggtatatagaactcccaaatcggagtccagataaaaaagttatggctatttgaagtttgcattaggatctgcccagaaagaaaagggcgggccgctgcatgctaaataccatgccgcggcacctaggttcaaaactcagaaaactagcagtaaaacacgaaaatcagcccccaaaacttaagtaaaccttcccaaatcacaaccaaactccaaaccatcaaataggtctttaataatcatactgagagtttaaaatacatgctagcatcaaaatccatactaaactctgaaaaattcagattaatcaaccatgaagatcaaagctttaacttgagctaaatctcaaacaaatctccattatcaagaacttaaactcaagcttcaaacaataatttccagagctcaataacagaaaat

SEQ ID NO: 143116 - DNA, 587 bp, Cannabis sativa
taaagccttctggtgatattaatattacccctgcacccaaccctgttcgttggatgcaccatccacgtataacttccaggtttccgcgtctcgctagacagggggagtttcttctggagttataccttctatcaagaagtcagccaaagcttggcccttgatggaagttcgaggatggtacgttatgtcgaacttccccagttcaatcgactattttataaatcttccaaaagcatctggtttggataaaacttatcttaagggctaatacgttaacacttttatggggtgcgcctggaagtgtggccatagtttacgagacacatggactatgcacaacgcgtgtttttctagagggggatatcaggattctgtcctaataacctttcacttacatagtaaataggttgttggtgcttcttctcgcactatagctgcactaatcgcatcttccgagatggctaaatagagaaacaatgtctctccatttattggttttgccgaaattggaggcatcgctagatgcctttttatgttctgaaaggcctctccgcactcttttgtccactcgaaatttttgttgcctc

SEQ ID NO: 143117 - DNA, 812 bp, Cannabis sativa
aatttctaaaaactataaaactcgaaaatcccaattttcgcactcaccgaaacactaccaaaacttatccaaatcactcaaaacttgatagggcgcatatataacataaatattaccatccttatgtaacagaaataaaaatcgaccccttaaatgaaaaatgccattaacgtttggactaagctttaaaaagtttcaaactcgatttctaactcaatatcaattcaaattcaacaagaaaatatcggaactagtcccatgagtacccaagaacaattctataaggtcagaaccttcataattattctaatttacaaaacccctatgcgaaaccaattgtttttaaacttaaaatgaaattaaaccataccttaacctttccctttcaaggatttgctatcctgctactaccggaacttagatagctaagttttgaattgaaaatcaaagaaaatggatataggaggagaaggtaatgtcgaagaagagaatgagggtttcgtttgttcagtttcactgataacttaatatatatatatataaataaacttattaacgtataacgttaacttatatagatataaataatattataatattattattataataatataatattaataaaaattttattattaatagttatgttattattctttagctactaagaaatctctatttctaaggtattcgactaattttgagtaccttaaaataccacgatatttttaaaatcaacttatcctaataatcccttcaatatttctaactaaaactgttgtgatatttttggcctccaatcgggtctc

SEQ ID NO: 143118 - DNA, 525 bp, Cannabis sativa
acaggtctaatgtccaaaatggtatttactcttaaaataataataaaaaatgggaatgagttagtaaaagaaaagagagcaaactaaggagatagtttttccacctccaccacttttacgttaagtgtgttttataaaaaataataataaaaaaaaaaggtggctacaaagagatagatggctgaacagttaataaaaattttggaaaaaatctttggaaagaaattgatatgtaagagtaaaacagagaaaaataatttgagaaaagaaagaaaaagaaactaaattattcaaggtcattcttcaagctctataagggtaagtgaagatccataaatgaatctacctctttttcttcttagttctttttatttttgtttactgtaaagagtcattccaatctcatttaattcactagacttcagaaaataagttgatgtgatatataatcaaagggaaatgaagagactaatattcatgattgtcgatttcatcatagatttttatactagacttcaaaaaata

SEQ ID NO: 143119 - DNA, 980 bp, Cannabis sativa
ttttttctttcttcgaatttgttatttgttatttcatttattttaatttgttgtttgatcctatgttttgtaaatattactaattggactttttattttgttaaatggtaaaatagaccttgtatttttctaaaatggtaaaaataagacattgagcttaatttttgacaatttttttaatataaccaactagatgaaaataatttctaacacgaacagatagagaaagtgtaaccatttttgtcataacatctctagattagattattattaagttttatttcaacaaaaaattagttcaaggtcctatttgtactattttaaaaaatacaggatccattttttcattttacaaaacaaagagttcaatttgtaacttttgtaaaatacagggtccaaaatagtatttaccctaatttgttttattttgtttctaattatgtgaaaaagtatttcttataaatattaaataatttaatattaaaaagtaaccaatccaaaataaccgatccaattcgtacttttgcggattggatttgagctattgtgcggattaaattagatccaaaatatgaaatccgcacttagtgcggattggatgtactgtgaataaaatagtgcggattagactaaatgaacacccctaaatataatgtttgaagctaattttcggcgtgttaaattttaaaattaatttctaaaaattttacagtgtattttaaataattaatgcaccactataaaaaaaaaaatactagaaaattctgctcaatgtcaaaataaataaaatgtaattggttcactctttttaaaggagtgcacatggatggagtgtaccattgaattttcttaaaatagtgttaggagttagaccttaaaaaaaaaggtctttgaagaaaaactctctttttaatcaattttagtagaactaggtaacgtagccgcccttcgtgcggcgattttaattttttttttttttt

SEQ ID NO: 143120 - DNA, 529 bp, Cannabis sativa
  modified_base (456)..(458): a, c, t, g, unknown or other
ttttttttttttttttgttggcttcagtcacatatgtttaaattttaatttatgtgatgatcatagttgtggacttcaatatatggtaatacatatatatgagaaatgctaaagggtaccagtagtgcctagcaccctcctacgtgtctatatcgctattagtccaattaagtatatcgggtcccataaactttaatataatagcttttaggagtatcgctagccaatcgcaatgcgacatgtcgcaaaggtgctaaacaccactggtacttaataacaatgctccatatatatatatatgtatttaattcaatttgtgattcttggaattagttgttttttattgatttcgacttctagacgtcattcttattggtggtataagaagtatatatttaaatcaattcttgattcacaactttcgataataattataatttcatatatatatatatnnntctattctatataaagtatacctatataactgaaattcttagtttttgagaattttatgggtgacttttaa

SEQ ID NO: 143121 - DNA, 552 bp, Cannabis sativa
aggtcttccttcttttctcgcatgggttctctttctgacggatttgcatcggtaaccgtcgtgtatatctctttctagttctcaatgaaagcaccaaaatatttaccaaatttttcagcaactaaatattttctttgagctttggaaagtaaagattgaataaatagtaagataacaaataagagatttttacgtggttcgggcgttaactatccttagtccacgagtccattttattaggctcatcagtcgataactgtttatacaagtagagatacaatggactaaaattaccttccaccctgttcctcttgaagaagaggaagcttagtaggattattctagagttgatagtagggttacaaaaatgtgttttcttaggatgaggaaggataagtcttccatcccgaaaccataggtctttcctccttgtgcttttttgggggtatttaaaggccaacttttatgcatgtgctgccttggataaatcggcgttagggtgaaagcgtaccattgaattggtaggtggcgtatttcccatatggcatttaa

SEQ ID NO: 143122 - DNA, 536 bp, Cannabis sativa
  modified_base (476)..(488): a, c, t, g, unknown or other
ggggttatcaaatttcccatttttgccattttcttgggtagagttactattgttacgcttacctccattattttgacttttggagggctggctagcattgcccatgctgtcaggtgtgctgggcgaaattgagggttgtccgcgactcagggcctgttcggaaccttcctgtcccccagtttgggcttatcggatagcttcttcaagcttaataaatccttctacccgattaaggaagttggccatgttttaagttgagtgtcagtgaatatcttgttgggctttgtgccctaaataatgtaatctttattcatttatcaataaagaaacatatttatttcattacttatttaatgtattatttggttcatgtgatcatttagttatttatttgatttataaattcattcaaatccttacacattaatattttttttgtgtgttgtcaacacagtgaaaagtaatcaagattgtgnnnnnnnnnnnnntcctatgatttatcagtacacatggtttaactgataggataatctaca

SEQ ID NO: 143123 - DNA, 779 bp, Cannabis sativa
cagttattatggacatctaagggggagtgttataaatgttaataataatatggatgtccaaatcttttatttattactattaattgtaatcaatattctatttttcttagttttcctatttcttagttttctaatatttgactcttatatgtgtataaataggagatcacacattggaataaaacactaaaaaaattctcatctcctctctattttctttctctaaaactataatatttcattatatttactatatattatttttaaaaaaatatatataataataattaaattaagttatataatttttttagtattgcatattattattttgtaacaaaaataaataaatatatacaatagtatttaatatatcatattactaaaaattaatatattgtagtaataaaattatatacaataaaaaaattataacaatactaaattaataatcaaaaaatatatacatcatgctaataaaattatatacactattattaaaatatgtatacataccaaaaaatttatatataataaaatagaaactaaatatcatcttaaataattgatatactatacacaacaaaaaatatataccatacaacaatatatatacctacaataaaaaaataaaacaaaataatataatattattaaaaaaagttatatatatcatattaaaaaaattatatattacatgtacgggtgcacttttaatgggtattacccatgaatgggtaaaattagaaaattttgtgtttttatgcttaatttttcta

SEQ ID NO: 143124 - DNA, 751 bp, Cannabis sativa
ttttgaccgttgatgatgatccaacggtaaaaattagctcttggtggtgatggctatttttcagagcgagtcccactacgggtagtccagagcttattttttgtaactctcttaggggtaaattttgacagcgatagcttcagaattacgatttaagtgtgggacatgacttgataaagcattgaattagcttcaaaatataagttgaatcacgtgaatcgaatcaaaattgagtgatttatagctattttactagaggcagttcatgacccagcgcctaagttgacatatgacgtcaacctggacactgggtaagtgtaaaaacgtctaagtggtgtactttaagatgcctaagtaatattttgacatcacttaatcagtttctgtattcagacgaaactggtcactagttctcagagatattgctattttgcaaaaataagagactcgaaactctttatttccgagtgagcagaaaatgataaatgcaaagttgtgaatttaatttctctgactttataattaatctttgttattatgaaaaactagacgaatagtcgaaacggcgttagaatcaaataagcaaatttttcctaatgtttccctattccatatttctagagattcaaatgtataagctcataatcttgctaagagggctttatggttgtattccaaatttgagtgttatgtaatttgtacttaatgttgatttttaatgaagttgcaaatttcaaaaaaaaaaaaaaaa

SEQ ID NO: 143125 - DNA, 717 bp, Cannabis sativa
  modified_base (74)..(77): a, c, t, g, unknown or other
tattaaatataataattttactatgtattatatagtaccatgtcaactgcataacatatataatatatatatannnntatatatatacattaataataataccaagccggctgtgatgataggaaccaggcaactagctagaaaaggaagttatatagtatactgtagtactatatatatataacatagaaacagaaaatcttatgctaactactaagtatacataacataatacatcattatatattattaacattattgttgttattaatggaagtactgaagaagaataattacttgtgctgcctttttttggtgttgttatgggcatcaatatcatcagtagcagcaggtcttactatggtaaactcacccaattgtgagacaaaatgtggagatgttgaggtcccatacccctttggaatcgacgaccaaaactgcgccattagtaaagatattgatcagtacttcttgctcaattgcaacacttcttctggttctcctaaactaatgtttggtgaattggaggttctgaacatcgatgtggcgaacgcaactatgaaggttgttaacaaccactcattcgattgttataatgagaatggtaacttaactcgtagaagcggacgcggcgggctaagattgagtaagtccaccacgctgtcagattctgagaacaagctctttgctttcggatgcgacacacaagccttcatg

SEQ ID NO: 143126 - DNA, 733 bp, Cannabis sativa
  modified_base (54)..(54): a, c, t, g, unknown or other
  modified_base (420)..(426): a, c, t, g, unknown or other
  modified_base (681)..(698): a, c, t, g, unknown or other
cctatataattaagctttcaataagtagttatagaatttaccaagtaaattctntaacttattaatttctcctgactccactatagattcaaaattgcattcttaattatacgtacagaacgctctatatgttccaagatatagatacggtattaattatcaattgttataacccaaataatcaaagatcatctatagatgatctacatcgaatagggacaaatttaccattctacctttcaatgtattttatctatttaacacttagctacctataaataatattttagtaaactaatataattattgaaatgaggcctcaatcttttatctctattaagccaagcacaagggaaaataatcatttcccttctatgcatttatagaagttataaattccatatatatgattagcgctcnnnnnnnattatactatcatgttcctaagatatgagtattgtgtcgatccaatttgtcaactttaacgaacaactccaataacataataatatagtttacatcaaacctaaccatatcaggattaagatcaagatcaactatattcacttagatagatataacggtaagtttatgatatcttacccaatgccaatattagtctggtccgatgtatatatctgatactagcatactttgccacactacaagaaatgtcacttnnnnnnnnnnnnnnnnnnactgcgctggtaaaagtaacttttgccagtgcatt

SEQ ID NO: 143127 - DNA, 663 bp, Cannabis sativa
ccagtgaatcgctatactcttttagcccccacggtttttgctaatctcagccttgctatcagggcttcgtattcggcctcactgttagaagctaagaattcaaaccgtagggctgcttggagtcgaagtccgttcggggatatcattgcgacccctgctccagattcgttatcgttggaggctccgtccacgaataccttccacgccgggactgatggtgtaggtatgtttgctgtagcttcagcttcattgcactccgtgatgaagtctgctagcacttgcccctttatggaaatgcgtggaatgtagtgtagatcaaattggcttagctccattgcccatttgaggagccttccagatgcctctggtttttgtaagacttgctggagtgggtggttggttaataccttgattgggtgatcttggaagtaaggtctcaactttctcgaagccatcaggaggcaaaaaactagtttttcgatcaccgggtatcgcgtttccgctcctatcatgcgcttactaacatagtacacaggatgttgagttttttcctcttctcgcaccagggccgcgctaaccgcattctcggagacaaccaagtatagaaacaagtcctctccgagaacaggcttcgatagaattggcggcttagccatgtgttct

SEQ ID NO: 143128 - DNA, 607 bp, Cannabis sativa
aatatgattttttttttaaaatatttcttttgttatatatatatattttaaatgtgtttttttatattatttggtttgttatatttaatttattaaaattcatatatttacgtatttattattttatgtttattattatttttatgatatgttacttagcactgtatttatatttttaattaatagtacaaaaatataaaaatttgtttttttatatgataattttaaataatattaaccttaatttaagttaacattattttaaataatattatataatactatatttttttgaataattatataatactatgttaattataaacaaatttatccattttcaacctattatttacaatttttttaaaaaaatatttatttatttattttatgaaaatagttttaacttctacagtaaaacataaatattttacacatttatattagttaatcttttttttttttttaaaagaataatctatatcaatatattaatataaaggaaagcattaggttgaggtggcaatctatgtgtgttttctatcctattctttattttcttaatttttatcatttatttattttttcaataataattttaactaaa

SEQ ID NO: 143129 - DNA, 700 bp, Cannabis sativa
tttcgttctgaaaatattttatttagattccttgtaaaaaattaagaaattttagtttttacggaactcaatttcgataaaaaatgaaggaaatatgaatttttaaaaatcgggaaaggaggtgtcaatcttgggcgagatccctcggtcagtccttccttccgcgcgcggaagtgtgctcagaagctgagttttctcagccgatgctgcttggacgcgcacgcgcatagggaccttgcaacgtcccctgtttccctctattttttcttcgaccatgtgcgtgtttttcggaccataaagctcttgtgcatgctgaaacagggcagtttgcatggtgtccgattttcatgcatcttttgatcaaaaattcattttttggcaaaaataaaagccaaaatttattagatttttatgtatatttcaaattttcaatttgaaaaactgaaatatcagaataaaaaatattatattaatttttcacataaaactttatcattagatgtcaaaaattcattttttttttatatttgaagctttagaaatttaaaaattaatttttcacataaattattattatggttagattttaagatttgtgaatttatttatatttacaaattatttaactataagattagatattttaatgttagacatattttaaattaaatgataacattatcattttaatttgaaatat

SEQ ID NO: 143130 - DNA, 606 bp, Cannabis sativa
  modified_base (28)..(42): a, c, t, g, unknown or other
aaatatacaataaataataaaatatttnnnnnnnnnnnnnnngccaaaaatggaattaacaatttcatttccacatatacatttagatattctaaaataaattatgttataacacaatcataccataaaataattttggaccccaaacccagttcgggtccaaaataccagttttgactaaacattgctaacttctcaaaaatcacctataatataaacatactatataataatatagtccattagtacgataaatataaaaattatggtttaacccttcccaggtcaaaattacaaaaatacccttaactcataaacagagtcttaaatgcgataattcttaaataatctcatataattaattatataataatataattattcaattatagttaattccttctaactatgattgctaatctattttactaatctcagagtattacaatttaggtctcgttgaagggttttcgaggtcctatagcatcggttgttatgtaataattgacgtgtaacaccctaactagcataggcgtgttaacgtgattttaagcatactgtgcagctccttgctaatcaacgaggttaataaaaatcgtgattaat

SEQ ID NO: 143131 - DNA, 1081 bp, Cannabis sativa
aatttgtctttttatggatttttagaatatgttagtaacttgattttctatttttctttggctgaaacaaataaggaaaaagtgaattttataactcatttactcaaaaattagaaaattggaaaattaagagtttttcctcccaaagctctctctctcttttaagccctccttgagcagcaaggaagtggacttttcctttgtgattcaagtgatttccatcaagtttagagtaactctagtggaggtaatccttgttctagcttctcttctttgtttcttgcaattttttgaagaaaatgatgatttgcttgtatggtttttggtgttgttgctgctgctaattgttgttgttgtctttgtgattaaaatgctgaattaagttagattagataggtttgaatgcatgctagttaaccttgttcaagtttgagaatttttgggttcaaaaactatgtttttcaaagtgaaataatggaatctgttgctgcctttgttgttgactcttgctgttgttttctgaggttaatacatgcatatttaggtagatttgagctggtttgaatgcatgttaaatagatttaaccaagtttgagttttgaactcaaagcttggtgctttaatggtggattttgattttatgcatgaagctttgttttgttgccttagaaatgtttattggggtttaattagcaagtctggaaagttggttgagtttggaaacgttttggttggggatttgatctttgttggttttctgggtagaaccggctaacaaattttacactgcctgtaaaaccggttaccccaattttgccgtaaggtgtgaaaccgatttttctcaacttgttgtttcgtgctagtttcgggttttcaggcagattcttccctgctagtttgtggtatttttgtattaagttacagtaggttaagtttagttttaaaacctttgtcccggttgtaatttagcgtctcacttatcggtgttgtgattgttacggtttaagagtctgtaatccgtcgagctgatcattccactcaggttgaccggcacacctgaattcagaattgaggtaagatt

SEQ ID NO: 143132 - DNA, 743 bp, Cannabis sativa
  modified_base (27)..(30): a, c, t, g, unknown or other
aataaaatttatgattaaaagtaaaannnnttgtgactaattataaattataattcctatgttgtgactaaaattctgtggctaaagatattcgtcacaaaaattataatttgttatgactaaatatagttttaatcacaatacttgttatgactaaaagtaaattagtgacaacgtgtgtctaaatactatattttagtcagaagtagttttttgttgtgaccaaaagtcacattgagtcacaaaaaatttatgttgtgaataaaaagttatcactaaaagtagttatttttgtagtggatatcttcaagaagcttgcccaagaggcctcaaaactcactaggtacaacaagaagccgacaatcacatctcgggagatccagactgctgtgaggcttgtgctcccagggagttggccaaacacgctattttagtaaaaactaaggctgttaccaaatttatcaattcttaaattagctaccttgttcttgtagttcctaagctagttggtattgaaggaagctggttataataaaagaaaaaaaaatgaagagtttaattaaatcaaacagttaattggcagcagctataagatatctcaagggtatcaattgttatatgcaaatccgcctagagtagcataaagcaacatttggagcccactacaaaaaataactacttttagtgatagctttttagttacaacataaattttttgtgactaaaaatgtgacttttagtca

SEQ ID NO: 143133 - DNA, 502 bp, Cannabis sativa
  modified_base (55)..(55): a, c, t, g, unknown or other
actggggtgcggttctaggtcccgaccctagttctgtgtccctagtcttgttccntgtttgggtctgagttcaggtcccgagtccatgtttgggttgggattcgggttcgtctcccgattccggcctaggtctgatttggagttcggggcctggtctggttacggtgttggatataggtccaatttcagttatgattcaaagtccaagtcgtatttgcagtccttgtcaacttcccattttggttccaatttttggtcatattgtacgggttcaagttggtgtattggtcaggtactaggtactaggtcccggtcctagttctttttcctagttccctaccctgattctgggtccagcatccgattattgtgttgttttgggtccggtctaggttcgggttcgagtcctagtctcggttcgggtttagttctctgtctagcttttgaacttagttcgggttggggtttaggtcctagtcctggtcctagtcctagttcggtt

SEQ ID NO: 143134 - DNA, 936 bp, Cannabis sativa
atccacataattattaatatttataacaggttgatgttatgtgcaatgcatgtataattttttttttaaaggtttaattaagtgatgttaagtgcgtatatattcaatttttaggtaatgtatttttattttttaatttttaaaataggatctaagattttgatcttttgagaatttttttagctattgcggttacattagtgcgctctttagatgtgattatatatacaaaagaataaatttcattcttatacgtattttatattgacctctctatatataaaaattatattagaaatttttttgacaaaaattgagtttgattacggaattaattactttcaaaatatattttaatattatgttcaaacatatatattttttaaaaaataataatagtgataaatacattcttataatttatatagaatggttataataaagtaaacaatatcattaatcattttttaaataaaattcatatatatatatgaaataaataaagaatattttgttaaatgttgagatattcggtaaaaaaacttaaaaatattattaaatcaaaaattttgttacataaccacatttcatataaaatagatatatgagaagatttcaatagtcaattaaatacgtaactatgatggttataattacatttattattaaatggttatgattaatttaaaaataattaataaattactttattacgaaaaaaaatccaattcatttttttttttaaaaaaaaaaaaaatccaatttaatgatagatttcttcccaaaaaaaaaaagagatctgatcaaaattaattaactgggtaggtttatgattctatatatataggatatatatatcattaaagccaaatccacgttaccatgataatattaaggaaaaaatatgtagatagaaacaaaatccaaaatctgcat

SEQ ID NO: 143135 - DNA, 583 bp, Cannabis sativa
  modified_base (506)..(507): a, c, t, g, unknown or other
aacgctgtctatggattacatctttcgtaggaactctgtctaaaagttagatcctacctaggatgtaacaccttactagattaagccatgttaccaagatttcttaatttctgtgcacacctttgctaataaaagggtttattgaaaaatagggatagttaaaattttcttaaacaacttaaacattaaaaataaatataatttacataattccaggatcctgttaaaattcacataagtctacaaaatacttgcgttacaaaagttatattcatatgactcttaaaaaggtgagcctaaactgtcccgaagaccctgaatactccagacctaaccgtcttgatatgtacatatttcaccattagttttagactcattcctattcatttctagctcttacctgcatatacacataataactgtgagttgacagactaagtaagaaaaacaaaatcataaacataaacatatatcttagttgtaacaatccattacttgtttaaacnnacaatggattttaatcactagtgtgttccaagtcataagaagtgaagttcctaaaaaatctcccactacgacaagg

SEQ ID NO: 143136 - DNA, 540 bp, Cannabis sativa
aaatgtaatctattgtaaaagaatatttttattttataaacaggggacccttatattacgacagtatttaaaatgaaagtttttattttgaatatatatcaagatttatattaaaccacacttttctaaaatttatagattaatgataataagtttttttcttttaaaacgcacacgcgtggcgtccctgagggtcagggcgttacaacttggtatcagagcgaccaaggtttaaagatcctgaagactagtttgatctgtacattggctgcgaagactcgttcgactcatggcttagtatgtattgattgttaattgattagtggattttttttattattatttttattgatggattgaattgtttgcttattgaaatgtgtaagctgttagagaaatatgataagttatgataaaattgttaaatatttttatgtatatgtggtaatacttattagcattaattcttgtttgaaagattttaatgatggaaataaatggtcgcgagtgtactggaaaatgtacctggggcgatctagt

SEQ ID NO: 143137 - DNA, 899 bp, Cannabis sativa
agggcacaaaacccaacacttaaatccatggaagttgaagctcaaagttaggaatggagaattagcatcgatccaagctaggagaaaagttcccctcaagaaatagattagtgtttcatgttgacaaacacaattttatcaattgcattttttgggttctatttccactatttcttgtaatgacgttcaattatatgtcgctcacatgaaacaagagctttacgttttaagaccggatataccaattgcactaaataacaaactttttaatattgctaaacctagaaaccataaaaggaaggagattgataatattgatgaaacatatctatggtatttaccacttgatcatataggctatgatagacttcataggttaaccaaaggtgatccattaaaaaatgtcaccttgggtgaattacgagtttatgaatcttgcctagagggtaaaatgagtaagcattatttctctgcaaagggagagcatgctaaagagcctttagggtattgtggtaatttttaacttgcaagtatagatttcattttaacaagtaataatcacaaagagtgaggtcgatcccacgaggattgtagttaagtacgttgaaattaaattcttacttctatttggctaataaaattttaagagaaaatttaaattagaataataagaaaaacagtgaaagtaagaagcaggtaaattaataaaggaattaacaataaataaaagttagggcattcaatttcaattgcataaattgatttatggtttaatatgattatcttcttaataccaatctctatgcaatagtaggtttactaaggtaatttatagtcttcttagatatataaaactcaattacatgcaaattttctactctagtgataaattaaacatg

SEQ ID NO: 143138 - DNA, 901 bp, Cannabis sativa
gacggacatctgcaagtcatcattggaggcccgcacatagctggagattcgggcaaagctcgagagaggtatgcccgaacaacacaacacaagcaagaagaagtgatcctagctgtataagaaaggaagcctaaaatcccatgggcaggagggcctaccatcaccttcaacgatgaagacgttgtcaaaattaagtttccacacaacgacccgttggttgtggaggtccagatagctaacaaaatagaggccagaaccatgattgataatagagcctcttccaatatcttattcaagactgattatgaaaagatggaactccagctcaaggatcaaaccccttgtctcctacctgtctatggtttctcagaccaaggagttgcacctttaggacaaatttgcttactcctaactattgggcaagctccgacgagcatgactatcatggtacaattcctggtattagatgttccttcagcctttaacgtaatactaggccgtctagccttgtatgacttaaaggctgtcacatcgatattccattcgtgcttgaagtttccaacgaagaatggggtagggtgtctgagaggaaaccagcagactgctcgggaatgttataaccttgcagtggccaaggttaagaaggaagtatcctccagccagagcacagacaagggaaaaaacatttccaagtagggagcttcccaaggtagggatgaagatgtggatcgtcgacttggggacccaaacattaatgttggacatgtaaaagaattagaagagatcgagatcgatcaagatatctcggccaaaaaacaaaagattggaaagggtttgttgctcgaagtaaaatcagatttgataaaatttctgagagcaaacctagacgtctttgcctggt

SEQ ID NO: 143139 - DNA, 645 bp, Cannabis sativa
gaggcgaaatgtgggtttcatggatcctttgtgtggcggagtttggtgtggggaaagaaattgaatcttaagggatatcgatggaggattggcaatggtgagagtttccgtgtgttaaaaaatttgtggctacctagacccttgagttttcaattttatgataagccatatcttcctgagcagctctatgttgtggatctaaagaagacagatggttcatgggacaatgatttagtgagagcaatatgtaatattgaagatgctgagttgattatgaacctactgtaacgctctattccataggaacgccacgtgtgcaattttataaactagattaatactactatattagttaattattaaaaattgtgagaatattaaaaacttgactaaaataaaagattaaaacgggcattataacgacagtacaaaggtattccggggatccctattataaaaagttttacaaaagcactatatacaacaacgtctgaaaaacataaaaccaaaatacacaatagatacagtcagtctaaaacaactcatggcatcccgacacactggccggtggggtcaatatgtacattgttggagaaggcagtcacctcatggcagctctaacttttccttgcccttacctgcacc

SEQ ID NO: 143140 - DNA, 908 bp, Cannabis sativa
gtgacccaccccatataaaatataaaatcgtcttagggggatgatttgaattcttgcaaaaaccaatcagcccaccaaggcgcgaaatgacaggtgtgcgagtagaaggatatctcaaaaaaatggttgggtgtttcccagtaacctaagcgacatgcattttcgagtatgaccctgaaatgactgggaaacacctaccgttttgaggaacctaattaatcacaacctgcgaatatgtcactaatctccagctggcgatgtacctcaaaaaacggctgagagaatcccagtgactcaaggggcatgcgttcccaagcatgaccctgaagttactggaatactcccaccgtttcgagcaaatctgccagccaaagaatacgcttatattggaacactggcgtatgccacaaatggctgggcgtatcgtagtacctcaaggaacatacgattgcacgtatgagcattggaatactgcgacacgcccaccatttgaaagacttaaccaatgttcccgcaacaaaatatacagagtataaaatcctaaggttttaaagcaacgattagaagtgataaagtctctgtaaaacctagggtaagcagacatgcgagtattcgaggtgttcatccgaatacccgcgtgtattcaaaagataaagatgcgattattcaaacattcttcctaaagttcacggttatgcaaatttcaggtctatttttctgggattacccagtcctatatacatttcctacacagaaaaacatagccctatatacatttcctacaagcatgcattctcaaacccctcctcaaaatacaaaaacccagaaaaagcagtttttccttttgaatagaaaccaaaaatgcaaatgaattcgaaactaacctttagttttgatgatttgtctct

SEQ ID NO: 143141 - DNA, 1619 bp, Cannabis sativa
aaactgaggatcttcaaatccttttggttggtcaacataaacttcctcactcaaaatgccattcaaaaaggccgacttcacatccatttggtacaatttgatttcaagaataaaagcaatgcacaagagtaaatgaatagattctaatcttgttataggagcaaaagtttcatcaaagtcattaccttctacctctgtgtacccttgtgccaccaaccgagccttgttcctcacaattgtaccaaattcatcacttttatttttaaaaatccactttgttccaatcacattaataccttttggtcttcaaactaaaatccaaaccttgttgcagacaaattgattaagttcttcttccattgcattgagccattgttcaaaagtcatggcttccttcacatttttcggttcaaattatgagacaaaacaaagaaaactaatcagattaacataccttctttgtgttaccatgctttcttcaagatttccaagaatgagatctttgggatgatttagttttactctggtgcttagttccttctagatagaatcaagtataatgtttggatgaattgagataggctgttctagttctcctgtatcagttgcagcggcagattcgtcatttgggacgacaaaattcaattctaattcaagtggtgtatccagaaaactatctatcttagcttctgtggagaattctaaaaaatctgtaaaatcatcaacaaccacatcagctgattccaaaacaatttgagtctcatattgtaaacacgattagctctactatttaaggaatatccaatgaaaataccaacatcacttttagcatcaaattttccaatatgctcacgatctctagaaacataacaaacacaaccaaaaacatgaaagtgactcacatttggacgcttacctttccaaatttcataggatatttttgaggtacctagacaaataaacactctgtttattgtatagcaagctatgtttatagcttctacccacaaccgttttgtcagcttcttgctatttaacattactcttgccatctcctgcaaggagtgattcttcctctcaacaactccattttgttgaggagttttgggagcagagaattcatgagttatacctgtagacttacaaaagtcatcataaactgagttctcaaattccttaccatgatcactccgaattcgaataattttcccaatattacatcctttttcaactcttaatctcaagcaaagagtattcagagcatcaaaagtgttagacttttctcttaaaaaatctacccaagtaaaacgagagaaatcatcaacacataaaaaaatatatcgcttaccattcagactttcaacttgaattggacccataagatccatgtgaagcaactccaattctcttgaggtattgatatcagacacacgtttgtgagtgatttttaattgtttaccaagttgacaaggttcacacttaccaacactttctttacccaccttgggtagacctcgaacaatacttgcactagacaattttttttagatttttataattaatatgtccaagtttagcatgccacaaatccgtggtgttgttgatggctgaatgacaag

SEQ ID NO: 143142 - DNA, 572 bp, Cannabis sativa
tggtatttttgtaattttttcattctgggctgtataaatgtcgaatgggccgacccatagtaattttgtaatttttttccatttctagaattttcctgtttttttcccaataaataataattaactaaataacaattaatctcaattaaaaaaaattacaatatgattgattgacagtattaaacaagggtgaattacaacatatacatattacatacttttttttcctccattagtttcagcattaaatatgtaaataggtatatttagtttttaaaaaaataaaaggtaaaaagacaaagaaaaagaaactagctaactactaatactaactacactgttaatcataaaaattgagatacgaatacgattgatgatggctagtagtctaatagatcaaatataacaaatgtacagatttgaaattaaaaataataaacaatagggtaaattgcggcataaatacctaatgtttttgattttatacacttcaatgcataatgtttatttttggtggcaaaaatacctaatgttacaattctcttacaccgttactaccacttccgttatta

SEQ ID NO: 143143 - DNA, 741 bp, Cannabis sativa
tggtttcagtggaattaaatgactccttttgctcagatcactaacccttgtatcctttctgtagagtatcaccaagatctgagcctgaaactccttctttatgttttgatttttcacagtcttatacactatgattgaggacttacttgatatgtgtgggcatgcacatcacgaaggcttgaaattgattgtggagagaggctatagtattttgaaatagaagaagaagaagaaggaagaggtctcatgaacctagagagaatactaggtttttagcttaagaggcattagttggataatgagaccataaccttccttttatactaatttccactagggttagggttgaattatttagaattaaaaatggataaaaatagagtaaaatacccatctagtggccggccacatagtgggccctacactagtttggtttttgcaatttttctcaacaattttatctatttttcacaaataccactttttgcactttcaaccatacaaatgccaaaactatttatttaatatttaaaataattatcagataaaattatcatttataatatttattaattagactccgtaaagtctcttaattaacaaataaaccacaaagtattatttcatcacaattaactcatatcttaatgaaaatttcataaactagacatagtctgattttagaattataattgattaaaaaaaaattaattaacagagtcttacaagcagtttgtctca

SEQ ID NO: 143144 - DNA, 884 bp, Cannabis sativa
  modified_base (409)..(409): a, c, t, g, unknown or other
ttctcctcctctcgccaactttcgttgcacctaggagatctggtcgaagtaaagaaaagaccaggagagccgctctaagcctacattagcagattcatgacggaggcgactaaggttgcatgggtaaccaaggacagaaaattgtccgcaacactggggggcattgaagtccttggtgagctttggaaggacataaggaacagaccagtagactcgatgagcgatttccttgaccgtgcagaaggttttatcaaacttgaagaggccattcagcaagtaaaaggtgaataaaaactcggcaagtcaaaagctccttctactgggacatccgtccagctcccccattacccaagcaattcgagctcaaatggtgaacggtccagcaacaataataggcaagggaatgggnaaaagggaaagttcactggcaagaccgaacaagctccccaggagaattctgccaagtgtttatatggctactcagtcattagtcgcgtacaagaagcccgcacccatgaaaaaagatgtcagcaagagagatatgaccaagttttgtcaatttcatggggattacggtcacgacaccaatgaatgcaacaatatgaagtgggaaattgaattcctgataaggaaaaataatctgcacgtactgaagtatgtcaacaccgatcaaaatcaacggggcgataacaaccaagacttgctaccaccactagtaaatggacatttgcaagtcattattggaggcccgcacataactcgagattcaggcaaagccagggagaggtatgcccgtacagtacaacatgagcaagaagaagtagtcctagccgtagaagagaggaagctgaagatcccacgggcaggggaacccaccataacat

SEQ ID NO: 143145 - DNA, 527 bp, Cannabis sativa
ccccgagccatgactccgggattccctcggcggaggaatacacagtgcctcatggcatagggttgaccctgatccctggagaggaggagaggcagaacctccgggtagccaaatacaactacgcctttgacgagtatacccgggggcatgctgaggtggtggccttggagagggtcttacgaaaggagcagcaaaacactctcaacgtggaggacttccgaaatccgtgggacctaaatatggacccgctgacggactggttcaaccgtttccttgggccaaccttggccccttttgcctcagagctgaccagtgagtacgtctcccatctaactcaattcccgcccaaacggtatgctgcttgtgcatccttgaactctgtctaccaggttcaagatattagcaacaccatggctgcggtaagtacttgtgatttatttctcccctcgatattttacctaaggcacttattctcactcttatctcttttttcagattaccgcggagaccagccgcctttccaagac

SEQ ID NO: 143146 - DNA, 697 bp, Cannabis sativa
atcttgaaatttaccgagtaaattacctatcttattaattcttcctgactccactataggttcaggatcacactcttaattacatagaacgctctatacaccaagtatagatacgctatgaattatccattattttagtcattacaatcattgatcatttatagacgatttacattaagtagggttaaaattactgttttacctttttatgtattttgtccttaaaatacttagctacttgtaaatgatatttcgagaagctaatataattattaaaatgagggccctatcatttatcacgttaagccaaggtctagcgaaccatcgtttctcttataataatgatggaagctatagatgttcatatttatgattaacactcccactcaattgcactactaagttcccaagatgtaattgagatggttctacagtaagctggtaacaaacaagtcaaaaacttgtgcaatatatttaaggtaaggcttaaccatcttaggattgagatcaaatgatctataaccaactaagtgacattgacttagaaaagatataacagtaggtgtatgatatcttttccactattaataacggtccagtccaatgtatagtcaatacatcttatcctaatttactttactaatgccttggaaaagacattccacttagctaagtgtaagtaaactttatcgttgat

SEQ ID NO: 143147 - DNA, 957 bp, Cannabis sativa
ttaataagttgcagagtgacctcacagtacgaggtctagtgtgttttttgcactccacgcgcctgacatcttattatctctttgtaatgtacatttttttttttactttttatacaatatatctcaatgcatgtatcaattattttgtcctacacacactcattttttttattttttttaactttagatatatgtaataaatatttagatttaaaagattttttcttttttatatatatatgtttcaaaagacttttttgctacactaataattatttggtctcaaaaattgcactattgtgatctattctttaagataatcattttgatatgtgagaagcatatattttttcgctagccagaatcaaaagtaacattttagtttcttaaatttttttttttcaaaaatttcttttatatttagtttaccaacaagtaaacaatattcaaacttaaacatatataaaaccaatttttaaaattattttattgttttatctatagctgttataagattaattataaataaactttttgtataaaagaatgttaataagtttctaacataacttataagaaaatcagacagtatcttaagcattatattttacattaagataataatattaagatctcattatatagctttaaaataattaattgataattaatttagatatttaattttttaaaaaataaatttatttttgtattaaaaattttattgtgatctactcttcaataattttttaaaaaatattgctgtgatctactctttaatgtaaatatttcaagatgtaaaaatacatttttttttttttttgctatttctagaataaaaaaaaaaccattagattacttagaatactaattaaatactgattagtttcccttttttaattttttttttttttgttattgatcaatgtatcttattaagatatcatataatataac

SEQ ID NO: 143148 - DNA, 589 bp, Cannabis sativa
tttttttaattaatatctttttaaaaataacattgttttcacctttcaaaaatttagtataatgtaacaatagtgtgaaaacaacattgttttgagaacaatagtaaaacaagtgtttgtatttttttttaaaaaagaaaacattaataataataataatcgtaaaaaaaatgttaaaaattctaaagatctgtcatattttttgtaaattttgactatattggtagggcccacatcatcactttggactctcacttggtccaacaaaatttgggcaacggggttaggattaaggcccaagaagacacggcccaaaagattatatttttagtgaaaattacatcaaatatgggattttgtaaaaaagttacaaaaatatgacatttataggtttgccactcttctatggcattttttcacatttaaaactttttatggtatttgatatgccatatttttataaacctattatccgaactcatatttcatatttttttttctaacttaattagttttatttttttttttagtttattttacatttacattttaaggtttcttttatttgaaaaatttacactaaatacta

SEQ ID NO: 143149 - DNA, 1483 bp, Cannabis sativa
catgatattctttgcaactgggtccttctccaggttctccttgatgcgctccttgattggtgtacccacttggctagctgacacctttagtgctatcaactctgctttacgactaagggcatcagctgcctgattagagtctgcgtgaggaaatggctaacagcagtattgtccgtcttcaccacaaactttgaccccaacaagtaatgcctccacgtctgtaaacaatgaataactgtcaggagctctttttcttgcgcagtgtaccgcctttctgcttcggaaagcttgcggctctcaaatccactgggtagccctcctgcatgagtacccctcctaaggcataatctgacgcattagtctgtacttcaaagggcttgtatacatcaggcagggctaatacaggatcttcgatcatggcttcttttagacttcggaaagcttcttcgcacttctcagaccacgtccatgtaacacccttcttcaacaactttgttaagggtgctgctcttctcgaatagccctccacaaatcttctatagtaattggctagaccgagaaacgagcgtaattgtttcacattggctggggtcgtccactcttggatcgcccgcaccttttccatatctatacggatcttcccgtgctctacaacatgacccatgaacttgatacttttctgagcgaaagagcacttctcccgctttacatacaactgttctttcctcaacttccgaaacaccgttgctaagtgttcctgatgctcttctaaagtggcgctgtagaccacgatatcatccaggtacaccaccacgaacttgtctaaggcatcatggaagacttcgttcattagtgtacagaatgtggctggtgcatttggcaacccaaacggcatgacgcgaaactcgaatgccccataccgagtaacacaagtagtctttggttcatcctcttctgcgatccgaacctgatagtaccctgatctcaagtccaattttgtgaagtattttgctccactttgctggtcaaacagatcagcgatcaaggaaatggggtatctgttgcgcacagtcaccttgttgagggcgcagtagtctatgcacagtctcaaggtcccgtccttcttcttttggaacaacacgggggcaccaaaaggtgcctttgatggtttgatgaattctgtctccaacatcttcgttaggtgactcttcaactccttaagttccgggggagacattcggtatgctgctttagctggggcctttgcacccgacaccagctctatttggtgatcaactctcctcctgggaggcagtctctttgggagctcatccggcatcacatctttgaattcatctaacaccttctcaattataggtggactggactcctccactttctcatcgtacacggcgggagcaatgacaaatgtcggtctcttcttcttcaggcccctcttcagttgcagggctgatagtagctt

SEQ ID NO: 143150 - DNA, 682 bp, Cannabis sativa
attacaaaattatcgaagaaatccgtgaatactctattcatgagatccataaaggctgtcggagcatttgttaacccaaatgacataactaggaactcataatgatcgtacctagtacgaaaggctatcttcggaatatcctcttcccggattctcaattgatgatacccagacctcaagtcaattttagagaataccgtcttaccttgaagcggatcaaacaaatcatcaattctaggcaaaggatatttatttttaatggttaacttgttcagctcccggtaatcaatacacatccgaagagttccatccttcttctttacaaacagaaccagagccccccaaggtgacacacttggtcgggtgaaccctaaattcaacattacttgaagttgtatctttagttcttttagttctgcaggtgccattcggtaaggcgctttagaaacatgttctgccccagatataaggtcaataataaaatctatctcacgttgaggtggcgaccctggtaattcctcaggaaacacgtccaggaattccttaaccactttaacatcttcaggtctaagtaacacgggtttactggaatcaactacaaccgctaggaatcccacacgcccattgcgtaataaatccctagctttcaacgctgagattcttggaacacgagaaccttgaa

SEQ ID NO: 143151 - DNA, 633 bp, Cannabis sativa
ccgctcttccgatcttaaactaagcggtctttacaaaatttcttgaactatacaaatcgttgtaaatattctccttcaattacattatgctcattttttaaaataatttacttatgtgaccatgaattacatgtatagttgtagtacaatggtctatttaataattttgagatatctaaaatttaatttaatgacattaaacatgcaaacattagctataagaatgcacatacatatttttataatttattattaagttgttatttatgtatttattttttgtctagactcttgaactaggcaaatctaaatcatattagtattacatcaacaaattatttatcaaaataaatagaatgtaattacaggaggttattgcagtagtttttatagtttagaaatttgccacaaaaaaaaaaataaaatcacaagacaaaactctataatgatcataattcaagaggacaaatcctatttattcataaaattataaagtacccatcattttacctttgtaattaacattaactttgataaaagtaagaatgcatgtaacttaagtgtggagaggttgaaagcccaaatattaatccaaagcacataatcctcactcaatttgaagtccaatttaaa

SEQ ID NO: 143152 - DNA, 702 bp, Cannabis sativa
aacaaaacacagggtccaattggtaacttttgtaaaacagagagtctaaaatggtgtttacccaattttaatatataagttttatttacaatttagtccttttttttaatttttgttatgtttatacattaattttgtaaatatttttatatttatactttctttatctgtatttttcattttatattatggttcttttatgtaaattaatttttattatatcttaatttttaagtttactcttccattgatttttttgctttcactgaacaaaatttctaagttcgccttggacacaatatgtatgcacaaaaacatgagttagtttgactttttatttttcagccaataacaatatctggttacagaacttacaatttttttaaaaatagctttataatattactggaagtcaatttaaataagttttgatattcagttgatatgcccgcacataatattcataaaaagttaaatattattttggatcttatattttgtagaaattattaattgaactctctatagtctattttaaataaaaataataaaataaaatataaattatgtattttttaaaataatacaaatatgactctaaatttatttttattaaaataaaatttaattataatttaatctaaaagtgctatgataaaattatttacattttctgtatatgttcgtattagaaattatctt

SEQ ID NO: 143153 - DNA, 568 bp, Cannabis sativa
atttaatattaaaaaataaaattaaaataattaaaatccattacccttaatggcattccttacaaaattggtgggagaagttctcccttttatttctctcttatttaactaagttctccctttcttaatttcaataatgtatgtaaacaaatgtaagggaatgattatcttaccattaattcccatttcacaaaggggtaccagtatcaaaaatgtgaaattttcactattttgattaaaatgattgttagtgtttgaaaactactttatttctcaacgcgtgccatagaaaagtgatgcacaacggtcttggcttcatccttgtgaaatttcatgatttttcttgatgtttagggtaatattttaacagaacactcacgagtgtaagagtaacaaaaaaacttgttaaaatttaccctgaaaagaagaatattttacaactttaaagtagggggccattttaaccaaattaaacgcgaatccaatcttcatattcacgtctttgtagtaagacttcactgtgactagtggagaaaaatatatggagatggggcctggccacatttca

SEQ ID NO: 143154 - DNA, 557 bp, Cannabis sativa
tattttatattttaaattgaaattgttgtactaaggaattgattgctttccattttagttatggtaaaccgattcacacaccatatttttccgtaaagtttgagaataaaaaacttttatatcaaatttacaaatttagtctatatatatacacacactatcaaatttgattatgtgaattttggttaagaatataataaattacaatatatgcattattagatacgttacctaattaagaaaattttaaaaattcatagatataatcatattcaaatgacactccaatgtagcaataactatttttttttttcttaaagatcaaaatctcaaaccccatttaaattttttaaaaaatacaatacctaatcaaaaaaattaaacatacatgtattgcacttaacatcacctaattgaccctaattaaaaaaatctaattatacgtgtattgtatgtaacatcaacctagtatatatatatatgtaaatatataaaaaaaaataaaacaaaataaaaacaatcaaaccccactcatatcgtctctctctctctctctc

SEQ ID NO: 143155 - DNA, 950 bp, Cannabis sativa
  modified_base (27)..(41): a, c, t, g, unknown or other
  modified_base (88)..(108): a, c, t, g, unknown or other
tatacattaaacaatcatgaaataaannnnnnnnnnnnnnnaacataaaatgttatttctgatttttattaactagtaaatctgattnnnnnnnnnnnnnnnnnnnnnagggcacaaaacccaacagtaaatgtatttatagaagttactaagggtgtattgtgtatctattttttttttcaagaataattgagctgtggaagtcggtggtttcttcaaccggagaagatggtggtttcttgaaattacgtatattaatttctgtttttgatagtaacagaaacaatatttgctacaattaaatattgaaccgagatttattagattttaggtatgttaataaatatcgtccattaaaatatggtattaatatagtaatattaaaaataaatgtactgaaaaatataaattagcttgtaatccaatcatgacatcttttttattggaaaaatgattaagattgaaattagaaaaacaagccaaataattaaccacttaattccgagatcgtttgacaaaaaaaacctaatattaaaattagatgaataagattgcggcatcacaattaaccttaagaacacttatattctgtttcatctataccactcagaagacacaactgtaaaaaactattgcagcaggtttattattcaatctcgtagcttaagcactcaactgttgtgtaaggtacgtaactgcattagtaacaactccttaagtcgcagagaacttgttattctcaactactaacaacaatttgataatgagccatcgaagaacaaagaagaaccaacaacgaaacaaaataaaacaaaactataccatacaaacacaactaaaatattttcaccagctggttggcatcgcagcatagtggacgtcggggctggggctgcaacgttcagcagctggttgttggaaattttcaccaggggccacgaagttgaaat

SEQ ID NO: 143156 - DNA, 930 bp, Cannabis sativa
taaagtgtgcctatataactaaattcttagtttatgagaaattcatgggggtgactttttttttttaatatttttaaaatatttcaaatatactaagaaatattattccacaaaagaagcttaatcccagccatgctaccgacgcaacaccacgtcacttgccccacaccaataaagtaagagagaataatcctctatactcggctccacatgttctcacttccaaaaccacgatttttgaggcatttaatattattttaatttaattttttcccaattttttattattattattattgaaattatcccatattacttttataaaatttaacacagaaaataaactaatatttttttttttataaatatattttgaaaaattattataaatttgttaagagaatatatgtttaataactataatatatattttaagattataaataagatcattgttattaggtattatatggtactttaacactatataaatgttgcgcgttttaattggttaacaatttttatattatttattaaattaaattatgtgaacggttgcttagtatcctcctcaatgtcatagtgctattagtataatttagtatcagatttcatataacttaaaaaaataattttaaataaatatcactaactaatcataaaataccaccaatagaaaaaatattagatactaataatacttcataataatcctctaaataaataactattcataaaacataaataaattggtacttttattatttattaattaaaaaataaaaactaaagcaaaaagagcctatagcaacttagcaagcatagcattcgtgtaaaataactattcatcataggtcactttttatgtatatataataaaataaataaaataaatctcattaaatctaaaaaaaaatacgattgagtttt

SEQ ID NO: 143157 - DNA, 556 bp, Cannabis sativa
ttttttttttttgctaatttttttatttattaatatgaaacataaaaatatttatagttttttttaatattaaaaaaaaagaattctctctttttattctcttctaaaaaaagtttaaaacatttttttaatcacactagcaattatttgagcttaaaaattatactatcattatttatattttaagaatatcgttttaacatatgagaagcaaattttttttttcaccattatcaaaaaagataactaaaatcaaaagtaacattttaatttcttttctacttaaattactaaaaaaataaatttccaactataataaaattttatataccaactaatatagtaagttactattatatatataattatttcatattataaatattactaaatcatatttttattttataaaacacttttcacaagtttctaaaataacagaaaagaaaacaatattacctttaaaatcctaaaataattaattcaacatactaaattttacacttaaacaaaatttaatgtatcaactaattttatgagttactaaaaagtattt

SEQ ID NO: 143158 - DNA, 672 bp, Cannabis sativa
tgtcatgagtgaaccaatcataataaaacacatttccgagaattttttcggcctgaggaatgggaagctgtgttatttctccggttcccaggtttcgaacgcggcagaatactctgtgacgatgctctattatcaagccctcatagttgtttgggatctccatggaagaaaatagaagaaaagatatgattgttgttatattttttcttatttcttgaactgatgaacagaattacatgaaatgcaagaaaaggaagaaaatgatttagacattaatatgcataaattaagaaagaattataatacaataaataaagctatatataataatatgaaaaagaaaaagttacaaagaagaaatattatacctagcttgggatttttgaaattttcttgactttgcaaattcttaagttgaatggcgcacgtacaattgaaaaggaagaatttgcaagaactatatagataattaacaaataattaagatgatcattaacaatgagaaagcaatagaatatatatgtatggtagagaagagaagagaacttacgtacatgattgaattgaaattatttgctctaagctgagatgataattatgtctctctaatctctattatggcggcactttgttcatttgtgatgaaaataattactaaggtctctcaacact

SEQ ID NO: 143159 - DNA, 836 bp, Cannabis sativa
  modified_base (439)..(439): a, c, t, g, unknown or other
ttgttagctatctagacctccacaaccaacgggtcgttgtgtggaaacctgattttgacagcgtcttcatcgttgaaggtgatggtaggccctccttccggtgggattttaggcttcctttcttctacggccaggatcacttcttcttgctcgtgttgtgctatttctcatacctctcctgagctttgcccgaatctccagctatgtgcgggcctccaatgatgacttacagatttctgtttatcggtggacgtagcaagtgttggttattgtcattactctaattttgatcagttttgacatacttctgtaactgcgggttgtttttccttataaggaattcaatttctcgcttcaaattgttgcatttgttggtgtcgtggtcgtagtctccatgaaatcgacaaaactttgcatgtctctcttgctgacatctttnttcatgggcccgggcttcttatacggggctagcgactgagtggccatgtaaacactttctatatcttcagtcaagatggtaaatgcagtgtacttttcttgattctcctggggagcctgctcaattttgctggtgaactttcccttcttcctgttatttattgttggaacgtttaccatttgagctcgaattatttgggtaatgagggagttgggcgaacgttctagtggaaggagcttttgtcttgccaagcttttgttcaccttttgctcgatgaatagcttattcgagtttaattaaaccttcagcacggtcgagaaaatcgctcattgagtctaccgggccgttcttccttatgtccttccaaagttcaccgaggacttcaatgccccccagt

SEQ ID NO: 143160 - DNA, 829 bp, Cannabis sativa
aaacttacatgaaagttgagaactgggggttggtgttgatcgacgataaaaggtggattggaagcgatggaggaatagcagcaagaaatctatggatattgaatttttttctcaaaggtgttcttgtgaaataatgacgaagtggtgaaagtaactaaatgaaggagaaaggctggcttttttaggtcagaacgggtgcaaagcaactgtgatcaggcgtcatcgtacggtgggaatcgcaatcgattcgtattttgcagatccaacggttgggataaatgctcatcagggcggctgaaaatgcttgagtatttgtctgacaccgattaaatgcactggatcattaatggacgggaagcgaatcgttgcctgcaaaaagcaataaattttaatgatgactatcataaatgaagcccacgcgcctgaagcacgtgccaggaaatcaatgagacaaccggaggcactagacaagcctcgtttactctacaccaaacaaggcttcgggggtaaatgttgccctctattttatccaaaatgttgccctcaactcttaaagaaatcgactaagtctttggcaacaggagtgtcagtgagaagataactcccggagaagatgtgagaaggctacacgtactcctggagaccaggaccatgttaaggcatctccgggatgtactggactctatttgaacagtcacctcgtatttaatgtcgcatgggagaaaacgtaatggaactgccataagaaatatgtgtgacggcgtaacccctcttttgcagctattatgctgtgattaataaggctagtgacggctactttatgagggat

SEQ ID NO: 143161 - DNA, 575 bp, Cannabis sativa
tggtcattttgccccattgatattttgtcctttagtggcttagtaattgggatttaatgctatgttatgtttatttgctggctgagaatttagttgaatacaaggaaagaaaaagttttagtttactcaatattttcaaattaagaaaaatcaaggaaaaagctttttcactctcaactctctctctctttttcgttccaccctagagcagctagggttctttatgttcttcaattattcaaggaaattcagctggttttaaagtgatcttgatcaaggtaaaggtttagttcttctcttcttgttttcttgagatttaagtttgagatttttgcatgattattgatgtgatgctgctgttaattgttgatgttgtctttagaagattaaacttgtttaattgagtagaatagagctggttgtgatgcatgctagttgtgtttattcaaaattttgaattttagctcaaattatgatttttatggaaattgaggaattagttgttgtagaggttgtttgtgcgtgggtttagtttctgcagttattttatacttgtttgagtagattaaatcaag

SEQ ID NO: 143162 - DNA, 751 bp, Cannabis sativa
gagagagagagagagagctttttctaattcacctagggcctgtttggccagtaggatagggactaggattcagataaattatctcaatacaatgtttggtggtaatagttgactggaaaaataatcttttgactaaaaaataatccaactcttatgggataaataatcccaacaaaatatatgggattaagtgggataacctcattggccactcctcttctcccaaaacccaacaacatcaatgccatatttggatgggttcttgctttttatatttttttcatgtaagggatggtttcttaaattatttaaataaatttattaaatgataataatcatttttcttgcatataaaaatattttaatattattttcctttcaaaataaatattttaattttaatgtatagattataaaaaaaaattaataaaatgataaacccattttaaaaaaatatatatgtatattttataatattaattgtaaaattcaattagttaaagaaaaattatatttcaattttttttttaatttgttattttcttaaaaaaaaatatatatttttaattttatatttttaccaataaaatataaattttatttaattaagtttttgaaattctttttttttttttaaagcaaaaaaaaaaaattaatcctactcataaccaaacacattattggatgggaaattatagtaaatgaccccaaatcataggactatgttagtttatgtcttcatttaaaaaaa

SEQ ID NO: 143163 - DNA, 588 bp, Cannabis sativa
attttggttcataattagttttagacaaataactgttttacccttctaattacttttgtatcatttagttccattaatttactagtggaagtatatttcaagatcccatctgaatttacgggtaactttccagtacaaatttaatacataaagggaccaacattcgatctgttaggaaagtcaacattccatagttgtaaatcatgttcacaaccattcactattagtttcccaaaaaacaaagttgttagaatcttcttctctgagaaagtttaacgagtgaatcaaagaaactaataacatgaacaagagttcttgattactcaagatttgggccgatctactattgatcattgctacgataaatattaggtctttatagtaaacaacaagttaataaagatagcttcattcatatcggtccttgtcgtatataatctctattatatacaacactttcacttagatgtctcactaaatgagtaatttgaactaagattacttgcaccgtagaacgagcatcaatgaaccgtactagcaaccattgattaaagattctataacttaatatgttgttgactattttat

SEQ ID NO: 143164 - DNA, 718 bp, Cannabis sativa
taaacaaaccaaatgtaattacagttattatcccttgaatcatgggatccgattacatattacaaaatataaatgcggtgtatgaatttgaaaattatttagctgtgattttctctcttttactgggtcaagaatatcgtgtattaagcacgtctttaaatgttgaatttggagatgtctcaacagaaacttgattgtagtgatcccaatggcgagctggaaccattcttcttttcgaggtcgacaagatttgtcttacgtcaatcgcgtttatacagaaatcttccgacttgtcaaggttatgagtctcgcttctgttaattaaatgaaactataggaagttctctcatagcgagatggtcatctcgcattcttgtactctgagctggttcgacttttatacttagtttgcttatttctaagctgaggtatgtgttattcttctcaagtgcctcgctattctcttttagccacatatggtttctcatttatactctaagtaccagttcgtacatcgattactcgcctaagactttacagtctgcgggttgtagatatactctagtattgtaaagaccgcttagctttaatttggaatttagtagataattaaggcttagctatgaaaattatttattagtattgaattatttatttataatgatttatttgaattcagaatgcatttttatgtcatatatagaaattttataatttt

SEQ ID NO: 143165 - DNA, 699 bp, Cannabis sativa
  modified_base (613)..(616): a, c, t, g, unknown or other
tttttaatttaaaaaattaaaaattatttttttttactttttttttcttcttcttcttctttcaggcggtctaaggataaagactggggctcgagctgcatttacttgccagggatgcaggtgtgccatgggactatttcgacatcagtgtgtcgtggggctcgagtaacatcgctcggcttttgattgagcgaaacccgtgggactatttcgacatcggtatgccttaccccactgtattccaccccagatcagactccgacgtcgtcgaatggcagagcttcgtccagaaccgtaacaggaacactctttcctcctttgccggggcaacaagaggcccaatcaggaacgatttttgagggctgttgctgagtcactgcgggaacgagtcggacgcgtgccgtgtcgtgaactgcgccggttcgtgttgctcgaacggcatgtctgcgattctcgaagggtttcttaactcggatttttgccttcagccgaggggtgatagctttacctgcaggtcaatttccgactgcatggtggtcggttcaatccaagttgagttaggcttttgagttgaggaaggcagtgagttaagagagaagaagaagaagaagannnnagaagaagaaaaaaaaaagtaaaacaaaagtaaaaaaaaaaagaaagaaaaaaaaattctgattttttaatttttttaaatat

SEQ ID NO: 143166 - DNA, 603 bp, Cannabis sativa
ttaaatatttattatgtattaattaatttctctttattttgcaggtgttttactagtggttcggaagtgacaactctcagttttgaggttttcttttctgatattatggtaaacatgaggggacgctgaggtccaagagatagaggagctgggaaatgtctgtcctagtagtccctccgaggaggaggaagtggaggaggttgcaccaccaaactttgggggatacaatgaggctggggagatagtcgattctgatggcgacgtcatggtagagggcatggattacgccactgaggaacttactgccgcagttcctcagaggaggcagagtgcattggtcgctagttgggtgagccttccgtccaaggtcactgaggcacgcttacgggatcttgatcagggcggctacttgggcaagttagaccattacatccccgcctataacaatcgagccacaaaccctgaaaggggaatgtgtgcttggtcgggtgctcatgccaaccaaggggcatttctacctttgcacccatactttaggaaggtggcagacttcttccgcctctgttcgacctaattcactcccaagggcattaaatatctgtc

SEQ ID NO: 143167 - DNA, 734 bp, Cannabis sativa
  modified_base (364)..(372): a, c, t, g, unknown or other
tcttccctagtgtaatcttggacagagaacatcacattaaacgcatcagcagtagcgggaactttctttcccagcacctttacttcccaattctggcggtcgggccaatttacaagaaattcacaggccatagtaacattagcccgaccctgagcatccacaaagctcccccacttcatcctctctatttgagctcgaattgtttcaaaccgaggttgacgtctcaaaggattctcgaggaattcaataccccgatcttcaatataagccctattcttaattctcatgaattgattttgggcctctatgttaccaaaccgagtcctatcaaaacccgtaggtggtgggtttgaagacgaacccnnnnnnnnnttcctagtcctcttaggtgccatagttttttttagcaaaaatagaatatttttttttattttttttttctcttttttttctgattttttttctaacgaatgctaaaaaaaaatttgagcagcacctccccttaatttttgtatatcccaaaaattgaaaactcaccaattaatccacacaattacatccacaatcctaaatcacactataaacctaacaattcctatatcaatcaataattctaacaaaaaatcacaaacaatgctcaaaatcctcatgcaacttttcaaatttaatagagaataatacttacaaacccgaagacgcattactccacctccattgttgaatatctttgaatg

SEQ ID NO: 143168 - DNA, 1670 bp, Cannabis sativa
gtcatatatgggcaattttaatagatatagatttagggaaatgattttagagtgttttatggatagtttttcaaattttccttggtttatatgcttatttaatgaatgtatgtaaattataatttttcgatgaaaaatatttttagtttcatccagaaagttttttattttggaaagtagatgaaaaattaatgaatttaggcttttacataatgttatttagatttttattaaattagttatgattttttaaagtttgaaaacaaaatatctaagggaaggtgcacatgcgcaagcagctgtgggtgtcactcggtcataccgagcttcagacaagcccatgaccgagttttcttggacaaggattgtctgaagccctagttggttgagaaattcctcccaagtaggctgaaagcagcctttccttcacccattccagccccattgcgcgtgcagggagtatgcattgcatactcccaaagtgcaatcttagttttatgatattttgagttttcagaatcatttttcaatgaaataaaattcaaatttcggtagatttttgtgtagaatctaaatttttaaataaaaatctaattatcatatttaaattaatttttattaattttttaattaatttaaattagttttagatattagtagcctttgaatttgaaaaattgaattttccgcaaacttgcctttatggttatttttgaaatttgattattttttatttgttttattaattttaattataagatcagatatttacttattttattaataaaatttgaaataatcttattttgacattaaaatattaataaaacttcaagatgatctagttagaattttaaattgctaaccatatcagatttttaaaatttgttatttttaaaatatattttattaatttaaattataaaattagaaaaatgttagttttaaaattttatattattaaatatttatcttaattaaaaatttacatttttgttaaaataacataattttttttgaaaagttgttaattttggtttgaatagatattttagggtttcctaaccataaaattttcaaacttagaatattttatttaatttttaaataaaattgataatgtcctaactttaaaattatcttatttttaaatttttattttgttaaatttaattcattaaattataagatttgaaatataatattagaaatatctcaattttaaaattaagatattatattatattatcttatcagatatttaattaatttaaattaaattaaaataaactagatataaaaaaaatagatatttgaatttgtaatttatatttaagatattttagagtttgttagttttttaaatatttttctaacaacctaaatttaaattctacttaagatatatattttttaaaatagaaatatcttaacctactttccagatatttgttatatgttttgttggtttgtttatttaattatttattcaaaaaaaaatttcaacaaaactattatatatttgatttaattttaatcatagtcaattgtcaagagatcatataaatttgtaacaggtaaatcttgtaatttctttcatctgtgataaaattagtaacatgatagggctcatccaaatcatttgacctgtgtgagagttgggggccata

SEQ ID NO: 143169 - DNA, 1780 bp, Cannabis sativa
tcggtgacaacagaaaatgcgatggatggctagtttgattacatgggtaaatctaggaccttatttcttagtgggatgtaaattggagaaaataaaatactgagtttgagcggggttatagattttgaccattttacccctatccttgaaaatgcctaagttttaagtttaggggcattttagtaaattgccaaagaaagagaattggtggctacccttggtgatgacacctagaaagttgatttcagccaaggaattgattttcctaaccttaattcaattaaagaaaattagaagaaaagccaaaattgaaagaaccctcttcttcccttctctctctcttcaaaccagctgaaaccaagggagattgttgctaattcttggtgttttcagcaagaaattcagagagaatcaagccaaggtaagccctagtatcactatttcttagttcttgaattttaaggttttgttgagtatgtgattttgagatgtaggggctgttagggttaggttatgttgtaattcaaattctaagcttaatttgagttgaatatagcttcttgcaactgtttttggtttatgggattgcatttatgcaagtttgagcttagaaacataaactttgatctttaatgacatgttttgattcagtgtttttttatgggaattattggttggaatatattgtatttgaactatttaggtactctggaaagtttggtggcaattggatgagttttgagcaagttgggggttatttggggaaacttggtgcaaaccagttaactggtttgccaagacctgtaaaatcggttaaccagttttggcagatccctcgaacaaaccattttctcaattctcgtccattttagtgtcgtagttgggtgtttcactatttcttgagttagtgtaatccctagtgaatatagaagagcctagagttatacgtttgggtttcccaaattatggtttcgaaaatattatttacccggttttaatatatgattagcgcatccatcgagcacaagatttttcgttcaggtcgaccaacacacttgaatgtatatgtaagaactttatataatgtgtgatatcaatatgtgagtgtatgtatatgtaagtgtatatgcatgcttatatgtttgttacactaccaacacttgtacgattagggtacaaagtgcattggtatagtgtatattgtttaagagtacattacagtgataccagcacaagtactggaaagtacagggtgtgcgtggtatgttacttagttgtactcagggtacaaaacaaaccctaccaacactcgtacaatgtttgtacgaagtgtatgtggtacagtggttgtgcgctagtatggaatgttcttactcatctgttaagccttgtaaataggtgtatgggcgcctacatacaagtcgctatttgttatatacttttcttactaagtttgtcgactcacagctctacttccatgtgtaggtaacagaattgcaaaagctgaacaggagtgagcctggctgcgatgaggttgtacatgtcgtggcggcaccacctggagtgttcggtcttgggacatctggggttattattttgtagtcgctgtgcgacctggttatgttttttgtatattttgtataaaagttttaaaacgggatcccgatacttgtacataattttgtaagttatgaagtttaatatttaatagaaaagttttaatttgacacattttttgagaaaattctttaattagcaaagatagcactataattgaaaa

SEQ ID NO: 143170 - DNA, 1065 bp, Cannabis sativa
  modified_base (81)..(81): a, c, t, g, unknown or other
  modified_base (174)..(177): a, c, t, g, unknown or other
  modified_base (768)..(771): a, c, t, g, unknown or other
tcatatctatgattaacactcccaatcaattaaactatcatgtgcttaataaatatttcacgagaagatccattggtcgantttaacgaacagattgaagaacataaataatacaactgaactagaagctaaccatctcaggattgagataatttgatctaagatcaactaggnnnnattgaattgaatacatattacggtaagtttattatatcttatccaagtttaatatcagtcacttacgatatatactctatgtaaagaccgccttactttaatttggaattagcagataattagggtttaattatgaaatttatttattagtattgaattaattatttatgatgatttatttgaattcggaatgtatttttatgtcacatatagaaatttcataatttgtgcatgatttgtatccggcaacattggaacgcaatgtttggccattagaatcacatcctagtatttttagtatagcggggcaataatttaggcattggaaatgtcgggaatagttgggattttagaatttcccaaaattcccctaagtgccattttatgacttttagtgtgggagcggcaaaatggtcattttctcccattagtttgttgatttagtggtttgttattaattaataaaattagatttttattaaataaatgggctgagatatttaataacacaaagttttatttaatatattcaaaaataagaaaaacttggaaaggaagccttaaactctcaaattctctctctcattttcnnnncccctagatcagctagggttttgatttttattcttcaaatccttgctaattccagcagctttaagttaaatccaagccaaggtaacctctttacatttctttttttatttcatgaattgtaaaataattgattatgcatgcatcttttgaggaatcggttgctgttgttgttaaggtgtttatctttgttttctgaagttaaaatatgttaagttatgttgatttaagcatgttttggtaggtagtttgttgtttgagcaagctttgagttttagaactccagcttggcgcttt

SEQ ID NO: 143171 - DNA, 803 bp, Cannabis sativa
tgatgcagacattgcattttttgtgcttgttgctgaagaaattaagattctgagttaatacaacatcaacatatgaattgcagtttttttttcaatttttttcacgtcaacaaaagttttacaatatagtatttaaccaattcttctacttcagtccattctagaggaaattgctcccacgtgggtcaatgtttccttgagaatgaaagatgacctggagactgataaggcttttggatgggtgcttgaaatgtgagtagtgcttgattttagttttgctatgactgccagcatatctttattttttctaatataaatataatatttctttaaataaagtatgcatatgctgtagcatctgctttacatggcgtgcgattttgattttatgaatctctactaataggtattgtcatttgatattgaatatgatctataagaatgataccaaggttgaatcaaagtaagggtacggtacttaataatttaagtattttttcatttattaattactttattcaataagtaatatccctaatattttgagcttctaatcttcccaagtactaattgagccacttaacatataacaatgagtgatcatcttatcttcatctttaactcaaatcccatctaacactttttcatatttgtttttctttacttttctgtttcaccaaaatctctggtctttttttctttggttaatagattgactgttagacatttatatgtataaactgaaatatatgtatgtgtatataacatgcggaataaaagaacatatacactatatgaatata

SEQ ID NO: 143172 - DNA, 1425 bp, Cannabis sativa
ttttaaaaaactaattttttttaaaaaaaactttataaatatctaattatctattttctatttttttaattataatttttttatttttcaaattttttaaagaaaaaacaaagtaaatttttttttaaaactttataaatatctaacaactaagtttcaaaaaaattaaaattaaaaaatctatctatctatatatctatatacaattaaaaatcactcaacatagtcttatctaattttcttaattaaaatttataaaaaaaaaattatatacaattttaaatcaaaaattaaaactaacactaaatttaattgtatctcaaattaaggacttattaatcgtgtaatttaagaatttaaaaaaaataatataaaatctaaaatatctatataaaaatcaattaagaaaatatcaatatatagtctcttataaatttattgcctactattttaaaagttttggtactatattctcatagtttttttcgtttataattatatggtgagttttattcaattttatcaattattttataaatctctactttaaggtactatattctcacagttctttccctttataataatacagtgagttttattcaattttatcaattatttttgtagatctctattttaatttagtcttttattacccaatattatttgtcaataattcttttttctctttctattttagattacaaattacatgatgagttttttttttttatagatttattaattttttttttcgagatctctattctcggtgagaattttttcaatttttaatatttgttaatctctattttggttttggtttagtctttcattatataatatctcttatttccttttcttttttagaccactaattatataatgagtttttttttttttcactgtcaattttttttcgaaatctttattcttgatgagaattttttaatttttaatcttttttatctctattttggttttagtttagtcttttattaccttattttttttataatattattttttaatattattttttaggtaagagtgataactacaaataagatatgataatgatagtgactttggatgtagtgacgactacaagtaagatacggtgatgacatcggctttgaatgcaacagttttaaaattatatgatgaagttttctatagatttatcaattaattttttagatctctattttgtgtgaggattttccaacctttatttattttttattttactataacgtttgaaaatatctttttgttgttttcttttttaaataaagaaattgtatgataaatttgtttaccgtattaatttaatttctgtataaaaattataaaaaaaatttaatagaataattactcatactattaaaaaaatatcaactttatgttataaaataatataaa

SEQ ID NO: 143173 - DNA, 990 bp, Cannabis sativa
atcaatgatcctttccttctataatataatttcatttcacatgccctgaacatcgatccaaacttttggctcgttcatcaaaaaagaagtctgttggacaaagaacgagccctagcaataaaagaagaggtagaaaagctacgcaacaacaatttcataattgaagctttctacccgacctaggtagctaaccctgtactagtgcccaagccacacaaaaaatggagagtatgtattgacttcaccgaccttaataaggcatgccccgtggactgttttccactttcaagaatagattaacttgtggatgcaacagtaggacaagaaatattaagcttcatggatgcctattcagggtacaatcaaatcaaaatgcatccaccagaccaagaacatacaagtttccaaatagatatggttctatactattataaggtcatgtcatttggtctcaagaacgccaaagctacatacaaaagattggtaaaataagatgttcaaagaccagatcggacaaaatatggaagtatatgtggatgacatgctcgtcaaatccaggaaggctaaggggcatatagatgacctagacgagtgcttcaaagtcctttggaaatacaacatgaaactcaatcccttaaagtgctcttttggagttagctcggtaagtttctgggctttatcgttaatgcccgaggtattgaagccaatctagagaaaattcaagccaacctggatgtgaaatcacctacaaaaacaaaggaagtccaaagtttaactggttggattgccacactcagtagatttgtttcaaagtcaacggacaagtgtgttccattcttcaacatcttgtgaggaaacaaaaaatttgaatgtacggaggaatgccagaatgcctttcaagagctaaaaacacaacttgcaaaacccctatcctcttaaaacctctggacggagaagaattagggatatacatggttgtcatgaaacatg

SEQ ID NO: 143174 - DNA, 1069 bp, Cannabis sativa
  modified_base (26)..(26): a, c, t, g, unknown or other
  modified_base (554)..(559): a, c, t, g, unknown or other
  modified_base (1016)..(1017): a, c, t, g, unknown or other
tgaatgatactttgactctcgcctancgggacactgtatcagtttgttcgaaaggttggaaattatttaagatatgatagttttgtatttatacatgtctttattacttgctgaatgcttgataatttctgaattgtgcatgaatttatattgaaccatgttgttttatgttattaattgcagttgtaaattttgtataaaacaaaaataactttgactatcacctatcgggacatcgttggattcttattttaatcaaaattatcctatttttatcctcttagcttattcatttcgaatttgcttaaatagtatatcatttgatgaatggtttataaatcatttgcttatgatgtcattttgttttctcttatgaaattgaatggcgcaaatgactatattcccaacattctatcccgaaatgatgcaaatcctcgatcttagaaatctccaacttgtatatgcttactttaggcaaataagacttagagttagattagtagtggtggtcaaagagagaataataactcaagaaatatttggtataaatttannnnnntgactttaaattttagattccaaatagaaattttatatttctgtttcgagaatacaatacagttcaacttttacaagttattaatatccttttttctgtcaatggatccaaagtgtatgtttatgtatggaatatgagtttagtattctgtgatgaggatccacttggactattctaagaactcttcattgtaactagacctaagtcatcaaaagactacaaccacattcttatatatctatggcatttacatcttgttcatagtggttttgacaagatcattctctacaaagagaaaatatgcttatatcaacttgaaagtagtatcatcgatatttgcatatatggatgtacattcaggggtggttatgagtttttgttatgttcttatgacgaccgctctggattttaccttctgcaaagaaatttgaaatatttgagaaatttcatgaatttnnagcaatgttgaaaaacattaaggtaagtatttaaagatcttgcgaactgata

SEQ ID NO: 143175 - DNA, 538 bp, Cannabis sativa
ctctctctctctctctcctcctcattcaatacacgatttggatctttcatccctcgcctttttcttctatctctctatcttctttttttttgtcacctttacacaattgtggctcaaatctgagttgagcgagcagatcttgattgagacgagagcttccatttaataaaaatgaaaaactcttttattaactgctattgttttacacggcagtaatgccaaaagaataaaatggtaaatacaaagagtgtatttatagggtaagagggaaggtaaccctagaagaagtgggccaaaatctattacccccctctcaagatgaactatatatgttttttaagttcatcttggttacaatggtgtgaaaatagcttggaaaaagaggcttggtaaggatgtcagcaatgttgtttttggtggtgacatgaattaacttgagtgtgccttcttggatcttctctcggacaacatgacagtcgatctcgatgtgctttgtgcattcatggaatacgggattttcggagatgtgaatggcggc

SEQ ID NO: 143176 - DNA, 553 bp, Cannabis sativa
ccgttgcgaatcgctaacttctactctcgtggctcccacggttcctgctaatttcagcccaccaatcagtgcttcatattcagcttcattgttagaagaccggaattcaaaacgcagagtcgcctggagtcaaagcccgttcgaagatatcatagctatcccagctctggatccatttccgtttgatgctccgtccacgaacactttccatgctaggatttgtggtattggaacgtttgcaatagcttctgcttcgttgcattctgttatgaagtcggctagcacttgtccttttatagaagtacgcagtatgtagtgtatgtcgaattggcttaactccatggccgacttgaggagtctttcgcacgcttccggcttttgtatgagttgccaaagtgaatggtttgttaataccttgatggggtgagcctggaagtagggtcttaactttcttaaagccattaggaggcaaaaaactaacttttcaatcaatggatactgtatctgagcccctatcatacgtgttgacttcgcttttagccaacgacaatga

SEQ ID NO: 143177 - DNA, 629 bp, Cannabis sativa
acagtcccgttcagttgtagggtcaatggaatcgataatatctttcttactcttatcactaagtttgtaccgtacgttcttgatgcgtggttcctccacaccattgacttctacagtataagccttctcaaaagagaaactatggaatttcgttgctaactcctgtatcaatattgtgtacctagttatctcctcaaccttctttgtggtattatgccaaatttcatcgatatgataaagtaattcggggacatgagataatgccacccttaatactaaaaatttatcttttgaccagatcaaggctccccgttttcttacaattttattaatctctccattgatagcgataattccctcagagctctaagtattttatcttccttgcccaaaacatggtcgatcttaagtgacaagatgctcttgatttctctaagtaccacttcacgcgatgctcttattctaggaggcatattttatcaaagatctgcgtatcacatatacaacaattaattgcaataccaagtatactaaaagtaacacttacgttatagtgagagggatctttttcagtcttctgtatgtatactgtgagtatccttcgggcctgtaacgccccgatattttgc

SEQ ID NO: 143178 - DNA, 955 bp, Cannabis sativa
  modified_base (758)..(760): a, c, t, g, unknown or other
atgacttttttagcaccggtagcaactccggtgacttttccggtgtcggcagcaactccagcgactatgccaattttgataacttgtttcagttaactattgtttaacatttatatttcattatgatttttcatagtgtcgaatctggtttcacagggttcataagttcaaaactagttttacaggttttaagggttctgtaatgaggtttctctattttatgatgttattgtatattttttattttaagtttctttttattattttatttctaggtttgaaactggttttcacacttatatttcgttttagattattgttgtgcattgtgcgttgttttgtttatatttatgagtattttttttttgtgtttttttttctctatttggttgattgatgaatctagtttcaatttatttttcagtgtatatcatttttgttttgttttcataatctttattaatgttgtgtaacgaaacttgttccttgatgaagaaaccactttcttagtgaagaaaccagtttcttgatgaagaaaccactttcttggtgacttttctagtgattttgttggcgacaataccaattctgacgacttttttgacgccggcaataaatccggcaattttgccgataccggcaactacttcgatgaattttctagcaccgacatcaaactctagaatagtcgtcgggattggcattgtcaccggtaaaattaccgaaaaaatcaccaagaaaccagtttcttcatcaannnactagtttcttggtgatttttctgtgatttttctggcgacaatgctaattctaacgactttttcagcgccggcagcaactttggagacttttccgacaccgatagcaactccgaaaacttgtctggtgccggcgacaaactccgatgacttttccggcatgaatgacaactctggcgatcactatagttttattt

SEQ ID NO: 143179 - DNA, 590 bp, Cannabis sativa
gtggctaaaggggttgtacatttgtctgcattttcgagacgatcatcaaaccaatactgcagtgtgaacctaataaatgcaaccaaagtagttattagatatttcctgaactcttctgtcacattgttgaagctttcggcaacgttgctggtcatgatgttgtatcgatctcccaaacaataagggtgagcccacttctcaaaccctatactctccacatatgcagcaatggcaggattcatctttctaagcttctcaaactatctatcacattcagttttcgaccatgagtaagcaacattatatatttggttgtgaaaagcatcagtcttgaacttggagttcatgttcataataatatggtgatagcatgcacagtggattgctctggggaaaacaagttcaatagcatgatcaatctttgatggctatctgacacaaacactaagttctcaaccactccaattgctaccctcaactggcgtggttgagaacttagtgtttgtgtcagatggctattctcactgtcaataataccataagcaaccagaaataattggttgttggcatcgtatgccacaacaactaac

SEQ ID NO: 143180 - DNA, 799 bp, Cannabis sativa
cagccgcttctttctccttcttttacaacaattgatcatgcgggctagcttgggtgtccattctggcttccatgtacctatctttggcttcctgataagtctttctaatatctcctatgacctccttattgaacttttttagttgtgtttcaatcgcatgagcttcaagaaaagacttttcatcccaactgcttgaactagccgagtctaatcttctatcacaacttttttaaactctggatgatctgcccagaaattaaagtaccgaaaaggtttcctccctatattctcatccaccctcatcgatataatacatacacaatgatcagaactacttcccaaccatagtgagcttttgtcattggaaaatatattatttacttatcttattgtttaataaaattcgttaaatatattatttttaaaaataaatttacaactagattaaattttatacatttaaaaaatataattgaattgtattagttttagttttattattattatttacattaataattagtaataactgagtcctaaactgccatgcctaaacgtgttcttgagagattttctgtaagtaagttaattaatattttattcccattttggggctgttcggaataggttaatgctagtaagggaatggtaatgtgaaacattaccttgtttgtttggagggtttagtcttagaatattattcccgtagtaatataactatccttgaggagggtaatgttcataccttaaaaaaggataggattgaattattacctttaattatattaatttgaataat

SEQ ID NO: 143181 - DNA, 965 bp, Cannabis sativa
tttgggtgacgccgaaacccatggctcgaactcgcccaccatgctcaactgtcccaagcgccatggtcagcacgttccttttaccttccacttgtacaaaaccttcttccacttgcttgcgtaattcgtcctataaacaaaacaaatagagttagaaataaattatgaagcataacaattaatacaaatgaaattaaactttaaacttacaatccgtttaatgatttctacagttgggccctccacctcgcctttcgggtttatgtgaagtcttttccagatttcaaatctatcaaattcaataatttgttggtcagcctctctctccatctgttcttgaaccatccttacaccacctcatttggtgtgatggttgtaaatattataagccctactcttttgggtcttcttcctcttcaccacaaactctctccactcttgcaaatccattatgtttttcataaagtttgggtggcttctcgagaagatggggagccacatctttaaatgtaaaaataccttctattagggtatttttccaacactactacaaatatcagaattcgcgacggttctaaaaacgatttttttcggggaccgtcgctaaaaatattaagtaactatttaaaaccgtcgggaaaaatttagtattctcgacggtttaaaattgtagtaaacaaaataggtcgacgttttttaataaaatgcaattttctaatggacctttaaaacaactaactaacatacttcttccatggatggttgttcaggatcaacactagatccttctggcatggatggaccatcatcaccatcataatctaaccacacactccactcatcatccccacctcatttcatgatataaaatcctacacaaatttaatattatacattataatatataaaaatatgcaaattaatagctaaatataaatatattaaaaagactaaataccaatacg

SEQ ID NO: 143182 - DNA, 775 bp, Cannabis sativa
attatttggcattttatttgacatgtgataatctgaaatttatttggatataattgagtgtgaaatggcatttatgcccttgaaaatgcttatgcatgtttcatagccctaagggcaaaatggttatttgaccataagtgatttacttgaattaaaagtgatttttgaagaaaaatcaaaggaaaattctgcttgtgtttatctctcaccctctccctctccctctcttaccctcttgttttcaaaccttgaattgttgaggaaaaggttggatgttgtgtttgattaaagcttgagtttggaggaaaatctttgctcttgttttgttgagaatcaaggtagtttctatgatcctaatcttgttttaattgctgaaatattgtggaaaaaggcatgtttgggtttgtgaatttcatgttcttgatgaatttgataatgggttgcatgttaggtgaattggtgctatcttggattgaatttgagtttgatttgttgtatgcttgttattgaaattaggctgagattatgtgatgattctaggttggaatttcaggtgttaaatttagtgtttattgctggaaatgatttgaagagcttggttttgaagttcttgagtatgagcttaggttttgttaatcttaagcatgatattgagtgtttttgagcaatccgaattctgggattttgatgcatgtaatgtgttaaatgagtatctattatgtgctaataatcctatatgtaaatttgtgaattggttgtgaaattgcaatgaaaa

SEQ ID NO: 143183 - DNA, 648 bp, Cannabis sativa
  modified_base (395)..(428): a, c, t, g, unknown or other
tttttttttttttttttgtattcagaacacaatacattcgttatatatatttatatatactgtcatgaaatatattattttgccattgtcgagttcatatgtaagtgatggaatcaaattttttttttgtttccttctttatttgttggtattggatggatgattttggatccaacgaatgattatacattacttatttccatcaatctattgattccttaagtaatataaagatgtttcacgccattttattttgaataataaattatgtgtgggtatgttttatgtatatttgattttttgatcttttagacttttggattaagtgaggtatggccatggatatagtcatcttcttattcatttagaaattcaattttattattattattatnnnnnnnnnnnnnnnnnnnnnnnnnnnnnnnnnnattattattattattattggttaaagatacaagtttttgtatatgagttatttgttaataattttttagatttaggtatatgtacggtttttatacgtacatttatatgtgttatcataattgtatggtttgtctttgaaagatgtaataaaatataattgaaatctcacaagaattaatattttggttcaagtttggcatactaaaatataaagtttgt

SEQ ID NO: 143184 - DNA, 604 bp, Cannabis sativa
  modified_base (255)..(262): a, c, t, g, unknown or other
ataaaaatggtaaaataaacatgcatttattgggattagaactcatcacctcctttatatgcatgaaatgactttcccattataccaaagcttatttcacatgtataagtatcacttttatttataaatatatgttgtaactatctaaaaatgcatatatatttttttcccgattttttttttcagggtgggcgactgccccacctcgcctctatgtggatccgctcctgattaagaatattaaattttaaaatnnnnnnnntaaatgtaatgcatttgagccctctacgtgtctatatctatgataagttaatgaaaatggtagtaacggtgtaagagaaatgtaacattaggtatttttgcctcaaaaaataaacattaggtatttacgtgtataaaatctgaaacattaagtatttatgccacaatttaccaaaaaataaaaggttaaattaaaaattatcgttaaataggcactttaatatatataaatataacatgatgctgatacaatttgttttatatgtagagaaaaaatagttcatgatttaaatttatttgaataatatatttatatttataatattttatctatatgatatat

SEQ ID NO: 143185 - DNA, 652 bp, Cannabis sativa
ttttagtcacaaaataggaatgataattaataattagttacaacttttttacttttaatcacaaattttggtgtgactaaaaataatattttttgtagtgtcaagcagttttcacatatcaaacagtagaggcttgttcaatatttttaaacacatctctaccaaaccacatataagtacatatttagctcttgcgctcttagaaagtattttcttatcattcttatcatatgcctcataagtcttaacaacttctataccatttataatatatttggcaatgtaaggaccattagacactagaggtgtacgtcggtcggtttggtcaggttatagcatatttttactaacctgatataaatatcaggttgcaaatattaattgtaacccgtccaattaaaaattagaaaaaaattcaaaccgtctaataatttcgtcgatttggttaggttaacccgtccaaaccattcttcatttttttttataattattattgttagtttctagtattcaaataattagattttaaaaaaataaaaacatattatttacatttcaaactataaaaaatactatagtttaaattaattttaagaactttaatataagataaatataattgagtaaacataaaataattaaataaaataat

SEQ ID NO: 143186 - DNA, 928 bp, Cannabis sativa
tgatcgaacaaatcatcaattctgggtaacagatatttgttcttgatcgtcaaattatttagttcctgatagtcaatacacattctgaaggaaccatatttctatttcacaaacagaaccagagctcccaagggcgatacactgggtcgggtaaacccaatatcaagcatcccttgaagctataacttaacctccttaatttctactggagccatcctatacggagctttataaataggttcggctccatgtgccaaatcaattacaaagtcaatttctcgttgtggtgataatctcggcaactcctctggaaaaacgtcgagaaaatctttaacaactctgactacctcaggcccaaatgtttcgggtctgctgaaatcaattacaaccgctaaaaatcctacacatccactgtgtagtagatccctatcccttagtattgaaataaccgagatctgagacccctgaactgatctaacataaacaaatggatcttcatcttctggctgaaaaagtcaccattttccgcttacaatctatactggccaaaaacttggacaaaaaatccatcccaagtataatgtcaaactccgttaatcccagttctataagatcagtactcaactccctatcctcgatcctaactggcatagacctaatacgcctattggaggtaaccaactccccgctaggcattagggtttcgaaccctctttcaggaatatcacaaggcctacccaaaagatcaattacccacatagctacatataagcgtatagctcctgaatcaaataacacagtgtaagaggagttgttgactagaaggtgaccggtcaccacagaaggactggctgcagcatcagcttgggtgatggcaaacacccaagcaggtacgggttttgcctctgacttctgctcttctttcttt

SEQ ID NO: 143187 - DNA, 512 bp, Cannabis sativa
  modified_base (46)..(49): a, c, t, g, unknown or other
  modified_base (161)..(169): a, c, t, g, unknown or other
  modified_base (237)..(239): a, c, t, g, unknown or other
  modified_base (457)..(458): a, c, t, g, unknown or other
catcagcagattcatgacggaagtcttggaattattttaccaggannnngatttactaccatgtatgttgtataaacaaataaaatttatgagaaaccttacagtgggtgcaacggaattaaattactccttccgctcatctctaacccttgtatcctttnnnnnnnnnagtatcaccaagatctaagcctgattctccttcatgttgattgtattcttcacagtcttacatactannnttgaggaccaacttgatgtgtgtgtgggcactcactctatcactcaaggtatgagaaaatatgaagagaagaagaagagaatatggttcggctatgctataggaaaagtggcttaaaattttactgaaggaatgagacgcatcatcatcttttcccttaaagccatcactacctatttataggaaaccacttcggtttaggttagatttaattagcannaaaataatagaaaaataaagtggcaaaattaatccctagtggccggccatggat

SEQ ID NO: 143188 - DNA, 1024 bp, Cannabis sativa
gattgattacgaagtctgccatgtgttgtgcatactctgtccttgtaggtatagcttgggtgatttgcattgtatgttcagagtagtcgtgattgatagagctgctaccaatattttttgttggaatggttgtcgaaaggttaaccatcatagggtatttggtctcatcatcatctttttttctgatttgttcataaaatttgcagccactgccatctataatcttcatgggtggtattcctgattttatttggaattaaacatcaatattttatttatttttgtccaactccagagtagaacatattgtttgtgcaagtaggttgtaagaacatcttgatgaaatcaatatccctgtcacttcaaaatctgtgtagtttgttttgtccacccattggccattataatatatcataactgttcttggatcttctatatcaaactgttattaatcaatgcaaatggaaaaaaattgtgaggctaaataacatttaaagtcaatggaaaaactgttcaacagttataaacaaatgcatgtttttttttctttgaattaaatatacaattatgattttttttttttttgagagaaaaacttgtgcttcaatagatgaaaccataaagtacaaatccaaaaagttaaagggatggtaaagaaccattccaaactaactcattatctaatcctaatcctagttttgcagcccaatgagctaattgactagaatccctatacacatgttcaattctaagattaggactgaaagataacaagttcttaatccccattaaaatatcatccagaggactagcattccaattacaagaatttagtttatccactattagttttacaatcagtcttcaaaatggtccactggaaggtgaagcaattgaacccactgaagagcatgataaattgcctttgcttcagctatgattgcagggatacctccaatacaaggctttacaacaccagctttcataagtccagaattatcaacaaccacaataccaaagctat

SEQ ID NO: 143189 - DNA, 1043 bp, Cannabis sativa
ctaccagtgttgaaacttttgtaactctattttgccgcttaggtcggctaagggaaaagacttgtaatattttgaaaaaaaaaaaattgggatcccaaatcatgtaacttttgtttgtaaatttaaaattattacaagtttatttttattctgttttcgtttaaagtttaatttccacgctcattttattagtaatcccatttaggggattacggtttcttaatcatcttgtgtagcgtgcctaaatgttagggcattacagtataagcttatgttcatgcaattttgcagtagtacagaacaaccgccaatcgcgatcttgaacaggcaagctacctagaactccaacaatttccctgcgagcagaatccagtacagtttgagctagtctatctgcatgtgacaaaaacagacatcatcgactatacaaggtaataaaaatatataataagtattgtgatacgcgacatactaggtcgacggttgaagtaagtcctaactcttttgggactttaaatgtgtagaaccatttcaatttccaatctcccatattggaaactataccttctaccccattaatctcagagttggcccatttgctaaaagaataaaagccattgtcatggccaacaatctttatgtaacatcctaactagcataggggtgttaacgtgatttttaacttaatgtgcagcacgttgctaatcaacgaggttattggaaaaacatgaataattaaaatttttcttttcagctaaaacataacatattatacttataagattccagtatcctgtttacaaaatatagttacaaaagtttgctattcatttacaaaatatttatcgcccagcgactaaacaacaaaagccctgatgtcccgagcatcgtacgctcgtcctcacgattcctcaactttagcttttcccttatcgacacatggaaataggactgtgagtcgacaaactcagtaagaaaagcataacatatatcatacaaataacccgggttataacctggtgcccatacacctgatcataacc

SEQ ID NO: 143190 - DNA, 859 bp, Cannabis sativa
gtgtgcgaccccacctcttatttttattctcccacttacagaattttatataaccaatctcaccactacaagcttgggcgagccctctaacagtaaatacaaagcatgattctaacaatatagtaaaggagatctaaatctaacaacaaatcaacttcaacaacaatgtcaatcacactactgaagcaaacatacctattcccaatgtataacatatgattcacacccactaatatccatccccatacatatatatgtacacttaatatacttcttgatcccataacgtttttaagttctcaatatgactactacaatcacctatcacaaaaataatattcacatgctctccacatgtatacctaaaaaaattgtattcgtcaaatcagttaaagctcaatcgtaaaaaaaatataatgaatttgatactcctcccttgaacaaatcagcaactagtcctacgaaaagaaaggaattcacgagatgattcacttaccaagagagttgctataaactctttacacaccgcctttgtcttcagtcgtctactatgcgcagcagccaaataatcaaagcttcaaacattgaatacttggctatcacttcctttaaatactctaaacctaataaatcctttttaccagtcgtacccctatacttaccctaaactatttcaagtctaagtctattaagtaattatattcactcttataaaaaaaaaataatgtgataaactatttaaagaaattcataccacagtgttctcactaataataataattaccaatacaatacaatatactacactatattataaaataattaaccaatataaatattattattatacctataataa

SEQ ID NO: 143191 - DNA, 782 bp, Cannabis sativa
atagaactatattattatatagtaggcctgtgttgtcttttcaggtgtgttctgacaggttggcgcggtataatcacaaccaagaatttctagccgaaccgggttcgggcccgaaatacaaattggattgatttacttggcattttatttgataagtgataatctgaaattatttgtgaggtatttatgcatgaaaataaaatattaaccttgtctaggtgaatatgtgtgctttggccctaagggcattttgatcttttgacctttaatcattatgtttgccaaggattgatttttgaggaaagagaatgtgatttcagcctttgttttccctctcaaccgaccctctctccctctcttaccctcttgattttttaaagcttgaatttgtgaggaactagcttgaattgaagcttgattgttggaaaagggtgttggaagcttgaggcttgattgtgcaagagattgaggtagtttttatagtttttaaattgtgattccttgctgaaatatggtggtaaaagcatgctttaggttgtttgatcttggttttgcatgtttagtgaaatggatgtttaatcttgttagtctgtatgttaatctcttgatttgtgttgaattaagcttagagaataattcaaggatgttttacatgcttgaacttgatttttatttattgtttttactgctggaaagtgttaagttgttgaagatgaagctcttattcaagagcttgatgttaccatgaatacgcatgattttgagatgtttttacaatctga

SEQ ID NO: 143192 - DNA, 1076 bp, Cannabis sativa
  modified_base (766)..(770): a, c, t, g, unknown or other
atagatcattggccacatgatagaagctcaaaggagcacgtatgtagtgggtcagaggggccttttgcatgaagtcgtgggtgtgcggtagggccggagggccaatattaagaactttgcgaagagattttgtgcaagagtgcacttggtgctgcattgggtgcagttggcttacgagcctcgtccaggtgggatgcatcaattttatcctgcattaagagtgtcttgctcgattgccatcaggaggatggtgcgccatggagttggcgtgtgaagcttccgaagggacttgtccagaggaacttggcttcagtggaagcgtgttctgtaggtgctgttgggtacggttggtttatgaaccttgccccgaggggtgcaccatacttagtccttgtcaaaaggagtatgcattggacattagcgagtgaactacaatcagaggatgtgttagcttcagggtcagtgttgcaagggctacttggttgactgaagggacattgtgagggactcagaggagttcatgttgggggaagtattctagtgcggaggcactgctccatgggtagttctaaatagcgacagtggcacaggttctttgatcaagtccaggagtgggcgagggagatcgtcaccaagagggtggttctacggaggtagagggacaagtgcagactcaggattcaggagaagcctggagtaagcttaggagtcgagatcaagaagatttgcccgtggtccgtcgatgagggcatcgacatgttgaagnnnnngagaatgtaacgtgcatgccaagatggtacgttacaagcgaggtgatgcccacaagctggtcaagtggtggtcaaatggtggcgcatgttgttgtgcatgctgatgcttagtttgtacggtagtggtatttttgtaaatatcttcaatattgtcgagattgggatgggactttgtatttgccctttatttgggtctatgaatacaatgatgtaattggatttgagagactctgtgatttggtgtatggtttggccatatgtctacagagccaaaatcatgtatgttcctggtagaaggctaaaagc

SEQ ID NO: 143193 - DNA, 1013 bp, Cannabis sativa
  modified_base (970)..(971): a, c, t, g, unknown or other
cctggtaaaataatttcaacataggcataaaaacccacctcaagctcctctggattgggagcaaagatttacgaaaatgcaagaccgtattcatcggcaagacgaagaaattctgaggttgaggtagtagggtcctcctgcagtgcctccaccacaagtttaagccgctttagttcctccggtgctagtagaacaacctattgctggcaaccgtatggagccactgtatgagagattttgcaagcaggcacctctagtttttctgggaggtccggatgtgatgaaggttgagcagtggctcactgtgatagaaaggattttgaatttcacgggggtcatcagaaatgacgagtgacttgtgctacctttcagttctaggaagatgcgctcgtgtggtgggagttagtgtccctcacccaagacgtcactattatgacttgggaagaattccaagacttgttcaatgctaagtattacaatgaggcagtccgtagtgctaagcaaaaagaattcatcgaattggtttagggtgatgacatgtcagtaacgaactacacaacaaaatttgatcgtctgaccaagttggcttcgggtatagtgcccacgaacttcaggaagaaagaaaaatacttggcgggtctaaatgcaaagattagacatgatctggtgattattacgaatgaagcaacaacttttgcagaaatggttgataagtctctgcgagtcgaaggtctagtgaagtttcttcaggagccccgagtgactccaagtgttggtggaaccgtcactcttcctactactgcatacggtggtgattccaccgctgatcagaaaagaaaggctacctcagcatctcgcggctcgggacagagtaagcgattttgagggataaccagatttgtcttaacatttctagatcagattagtattaagttttattttgactaaaaatcagttcagggtcctattnntacaattttaaaaaatacaagatttattttatcatttaacaa

SEQ ID NO: 143194 - DNA, 798 bp, Cannabis sativa
tcaatcaagaatatttgtttcttgtcaaagagaattttctttgtctttccagatgcagacactctttctcaccaaacttaaatagtattaaggataataataataataatactgtatattgacaatcataatgatattgattgacatcgaatatatgtaacaacaaagacacggttgtgaatgtgatttttgtaataaaagaaagagaaatgctaaatcacaccagtcgtgtctagtaccttcttatttgttaatatcgctattggtcttactaagtatcgggttatatataatttaatttaataatttttagggagtatcgctagccaatcgcaacgcgacatgtcgagaagatgttaagcactactaatgtctaataacaatgctataaaagaaaatatgtacatgtagaaagtacccaagaacatactatttatttttttaaataaaaaaacaatcaatcttaattggtgttactcgtaaaaagtattattaacaaaatttaagtttttatacttattttttctatttaattaaaaaaaaaataattattacattatatgaactgacgttgttctattggctgaaaaaaaaattaaaaaaaaaaattgttagaaaaaaaaagttgagtttaacctaaaatttttttataaaatatattttttgatgtagtgtaagaaaatatatttttcgatatttttttatttaagtatagaaattttttgacttcatagctctcagttactatgaaaaactagattaatgctcaagaaaaaattagaattggataagcataac

SEQ ID NO: 143195 - DNA, 1062 bp, Cannabis sativa
  modified_base (41)..(80): a, c, t, g, unknown or other
cgacgctcttccgatctaatgttatttctgatctatattannnnnnnnnnnnnnnnnnnnnnnnnnnnnnnnnnnnnnnngcataaaacccaacagtttttagagtaagaaccttcatggcatgataaaagttgattggatcatcgtctatcattccattatttccttatgtcgtttctctcatagatttctttaatgacactgatctttgaggttgttgagtttgattattggagcatttaccatatcttgaatgagaagttgtttgatattgtcttatcaaggttctggattcacttattgatcaataaaatcatggaaatctaaatattgtcgaaagtgatagttggaattaagtttaacgtcaattcctcctcaagaacaatatctaaaataattttatttcttctccaaactcgacatcctcaaaattataaaagtttctctttctaaaattgaaccatagtgtgggatcacaaaatttgtagctctttaattactggagtatatagtaaagtatagttccttactattttggagtccatattccttttatgaggcttataagaccttatcttataatcggacatccacaaatagaatatatctatatgttagactattagtccaaccacaactttagtttataaagagttttaacttatactttacttgatacacagtttaggatttacgttgcagtcttaagtgtttctccccaaaataagtttcatgaagaagcatgactaatcactcttagctatttccttagataaatgttaattacatctctcaaatacccttcatgttaggtttgcctaacattttgtattggaagacgaaattacatttatttagtagttgtgcaaaataatcttagacgttactcactttattcgtcatacctcccacggtaatgttatccaccatagttagtttcaacgaatttaattttttttcctagtttctgttagacatttaaatgtataaactgaaatatatatgtttatgtataaaatgcggaattaaatcaaacatatatacactatgaataaggatcga

SEQ ID NO: 143196 - DNA, 514 bp, Cannabis sativa
gcagcccaagacctgggacataaactggaataagatcgagatccgaatctagacttgaggcttcgacctaacccgtagtaagtgtttgaatccaagatccagacccggatccgtatccagactcggacctagacccagaccgtgatccaaacccgatctcagaatcagaatagcaatcggactaggtcaaggactagaacgcagacctgggaagtagcaggaccgaaacctaaaccaaaactcagactagaacccataccgagacttgaacccggatcgggacctgttactagggacctaaacaaagaccggaacctggaccgagactgggacccaaagccagacccagacccagacccaaaaactggggctggacccaggacctaagaaccagactcggaccaaggatatgaaactcagacccacactaggagtgggacccaaacgcaaaccaagacctggactcagaccaagactcaagacccgaacacgaatcgaaacacaaactttgacc

SEQ ID NO: 143197 - DNA, 1247 bp, Cannabis sativa
atgccatatttagtataattaagtatttatgccatatatatcaaaacttatctttatttttccatatttttgtaaatagccctttaatctaaacctaatgagggtagtatttaaggaaagaatgagtgcctatatcaaataagtgattcaagataaaacttaataagaaaaagctctttctaggaggtgttcgcggtgcaggtggttcggtttttgactattttttcaaatcaatctgcacatgtagtttttttaattttctaaactgcacctgcaccgcgaaactaaaaaatcgcaaaaaatggtgcagtgcggtttatgcagtttggactatcactaaataattaaactatcacaaatacaaaaaagcttgaacaacacttgtcaaaaatactataagtcttgaaaataaatatgaataaaaagtcttaagtttcaacaatataataattagtgggtttaggttgggccttcacgtattgggatgaagacacgtggcaaaggaatgtctaaggtctcacaatccaacagttactaataatcacgtctgcacagactccgaagagttttgatgacgtggcacctcaaatgcattaaaagtaataattacaaccgtctttttgaaaatctcaataaaaccaaaagtcaccatctcatgacaatctctcacctgcctctcgcttatagtttccctcatgacatagctgtcaatcgcgaaactagggcatgtgttatagtgtgaatttttcacctagaaactcgagaccaggctcccataaagatgacacgtggactcactctcctcgaggagtgttgagctgttagaaggagacctcttgagtataaacctcgcctgaaccagactcagcaagatgatgtgatcctgacagagtctagtcgcattattacgcctcgcacaatgtaggaccgaaggccgggtttaagattcgcatataccaagatatatgcgatgtccataaaggttttcatgcaaggtagtaaagattgattctttactcaccgagctggtccggatgacctaccgcacttgataatccgataaggactcgcatgtcctaagttattgacattttgcaggatatctgaatacgcaactcaactaggatgccgatatcttaaacacataagactcgattagtcttgtacgcatcttaagcctgcgagcttatgtgagaatatgaacagacaactcgcaccactagggtcacatacgttgctgtagttag

SEQ ID NO: 143198 - DNA, 747 bp, Cannabis sativa
  modified_base (353)..(356): a, c, t, g, unknown or other
acaactatattttgatcaaatgtaaagtacttttgggtttttccattgctcgtaatctccttgtttaagtagttagttgtctaccaaacttttgatttttgagcagttgtcaattctgcctcgctatggccgttataatctgccttaagcaaactttaatatacttttaattattttatcaatttgtatatttttgattgctcgaatgaatagttaagttatctattcattttctaggttcaagtacttttatcaagacgtcttgatgtctcgttcagtactttcctagctcgtgcgaacagttaatatttagctttagacgcgagttacgagttatatctcatttataactnnnnattttcctttcccgtcagataggtttttaataaaaaaaattatagttgtttgatcccttctttgtcaaaaaggtttgatcaagatattataacaattcgacccctctctcgtcaaaaaggtttggtcaggaaattataacagttcgaccccttttttgtcaaaaaggtttagtcaagaaccttaattcaatttttttttaattttttttgaagtggtgggtttgtattatatcatgtatttccagatgaattctgcttaatcgtacacaaatgccccttaagtaattttaaagagtaaaactttgaaattacttatataatagaaatgattctctttattcataactgaaattgaaatattacatcagcaatgtgagttacatcatttatt

SEQ ID NO: 143199 - DNA, 852 bp, Cannabis sativa
tgtccttttatgccttttagtgtgggaggggcaaaatgatcattttgccccattagctttttgtctttagtgaattgaatttattattagtgatctgattttattagttattttagctgaaatggattataataaaactaagttttatgtcatttactcgaaaataagaaagaactaagaaaatactctcttccaaccctctctccttctctctctcgaaattcaagctagtttcagcaagaatttggtggtctaaagttctaggtaagcttcttgtaacttcttcttgagtttcttgagttgtaagaaattagaattttttgcataaaatggtgttttgctgctgtggttgctgtagttgttagatgttgatttctgtagttaaaatatgatttattatgttgatttaagcatgaattagtaattgtttgtagatttaaacaagctttgagttttagaactcaaactcgaagctttaatggtgaaattcgattctcagtatgggtagttattttatcacttggaaaatatttattggggtgtattatgcaggtctggaaagtttggttgggtttggaaacgatttgattagggtttggtgctttttcggtttttctgggtaaaaccggttacccgaattttacagtagagaaacccaaaaattcagcttgttgtttcacgtcagtttcaggtttctagttgattaattccctactaatttagggtattgtcattttaagttgaagtagatagggttttggctttaaacctacgtctcgggtgtgatttagcgagtcacttattcgtgttattatcgatgtgatttaagagcctttaattcaccgagcagtt

SEQ ID NO: 143200 - DNA, 622 bp, Cannabis sativa
catccggcgtcaccaccctccgatgggatttttgcaggtgttgacattgggtgattgaggtgtttgaaagccatcttaaccgacttcattgtcagagagatggtagacactcgtctaaaatcatccggtgtcacaaccatagactgggtggttacgttttaaatctgtccgaatcgacttcactgtaggagtatgtattgctgccactcatttgaaatcatcttgcgtcaccaccattcggtgggatttcagcgggcgttcacgttgggtgattaggattttttaaagccatcttgatagacttcatttgtggacactcgtctaaaatcatccaccatcacaaccatcaactgggtggttacgtttgtttattgtggttgtttgaaagttgtctgaaccgacatcactgtcggagtgatgtatttctgaaactcatttgaaatcatccggcgtcacacccctccgacgggatttcagcgagcgttcacgttgtgtgatttaggatgtttgaaagccatctggaccgacttcacggtcagaaggatgggggacggcgccacaacaataaacttgctggttacgttggttgattgcggatgtttgaaagctgtctgaaccgact

SEQ ID NO: 143201 - DNA, 607 bp, Cannabis sativa
ttggacaaagttttcgctttccactcgtggagcttggacgtcagattctccacaataaaattaaaatctgcatccttacctttatatcggaacaggggtagccctaagtacttgggacacccacaggaccaccgattcctagggccaatttaatatcctctttcaagctctctgaagtattcttgttgaagaagatagtcattttaagattgttgactcattgccccgactagtcacagaattttttcgagcaattccacatacctctagcttcccctacggtggcgcttccaacaaggataaggtcgtcaacaaaaaaagatatgagaaatggttggcccattattgatttatactttgtactcctaagggtgctatagcagatcccacctatggtgatctcgatagtattaagcctcggtactaatacaactaaaaagggagtaggtcgttacccgctatcacaagggggttgaacctctataacaaatatattgtttattgttatttattcttatttgtgaaaacacgtggcaagcattatatctatacaaccccactttcaattgatcactttttgaggtcaacagtgttggaaattatttta

SEQ ID NO: 143202 - DNA, 518 bp, Cannabis sativa
gtttaaaaattaattttaattattgtgtggatttatttcgaaacccatggtgaagcccaatttgaaatttgcataaagaaagagaagaggagaatgagttattagagtttttaattttcatctctttctttatataaacataaattaaaaatttatttaattacaataacataatgaaatattttaagtggttgagattaaatctcactcaaaataattgtaattttttaagttgttaatctttgtattgagaatactatttttactatatagatatcactatctttttcaccttgctttgtgtaaaattaacattacatagtatttatgtggataatataggattcatgcccaattaattataattttttaaatgaaatgcaacatatatttttatacttttctaatttttgccaaaacttaaaagtttttctttaattatttttaacaaatataaataatttattaaattttggtttttaaattttaagttttttactttacccaaaaaaaaaaaa

SEQ ID NO: 143203 - DNA, 853 bp, Cannabis sativa
attggtacaatgtttaaaaaaagaagtaaatatgatagactttaaaaaagaaggtaaaaataaaatagggcaatataaaaaaggtatagagtgcaatttcctcaatgatttattactcaccaaaattttgctgatctagatgagatgagaagaaaaaaaaattaataatgaaaaaaaaaagtaaaaaatatgaataagaagtgataatacataggagagaggagagagaaatataagaaaaagtaaaaaaagagaataaatatgagtaattatatagcgggtctcattatattaaatattaataaaaaatattttaattagttttattgcatcacattgtattggagacacatgtcacaataaactttttcttttattttaatctaatacataaaactacactttatttaatgtatataaataatataatcaaaagtcatacatatcaatggctaagaaaatatcttcatagtatgagaacaaaataggtgctcaccataaaaaatttctatatatatatactagtaaaaaattacgtgcgagacacgtatactaacttttatgttagttattttttattttatttaaaagtgatacacttaaaaattaaagaaaaattattattagttattaggtgagattattattattatgtatatttaaataatataatttataattttgacaattaaaagtaaacattggatgcaatatattagtgtttaagaaagcttgataatttaaatatgttactaagataattcaaaaataaattaaaaattgatgttcaaatacttaaagaaacacaacttattaaatgtgtgtaagataaaaaagaaaattaaaaatcaat

SEQ ID NO: 143204 - DNA, 1406 bp, Cannabis sativa
  modified_base (1372)..(1373): a, c, t, g, unknown or other
actaaccttatcatcattatccccctacatcgaattatagcaagtgaacatcctatgaaggatttgttccaccttaacacatatcttagcaactgtttcaacatcatagatagttttaaacatatacttcaaatatttcatcttgtaccttggatcaaccacaatagccaaaaacaacaagggatttatgttatccgcatagccccaatatttgtcatacttccctttcatattagtgaccatggtggatagcaaaggatgattactagctgccaaatcactcaattaactatgaatttcacaatctcatgataaaaattattggaagttacatgcaatgtgccatcaaactttaaagtaatttcatagtgttatacccaaaatttggctatcatttcaaaggaggttacatgtcaaattatgaagaatacgaatcaatgaatgtaacggtaattatatttgaaaatagaataactcattaatgcgcaattgacagagtatatttacaacttgctaactgaaaggtcttgtgcaagataaagatacaccaactgttgcctcgtacattaacgagaaaccatacaactttagatgtacaaggcgaggcatcaacctcgctacgcattagaagacgagacatggtgactggtaagacacttagtgtataatacaccttatacaaactaagtataacaaccgggtaaatctaaacggctattagtgaggcacccatctcgctataggaaggcgtgctcatgataccttcattaatcaactccagactgggttcaccgctccgtcgagtcagctgtctcagatagaagttgacatacaaatgatgttgactgctaaggtccaccttgtcgccaagaactgcaattttcaaatggagtattatgtcttcaagcgcaggaacgacgaggcttacatcatcaacctcggaaagacatgggaaaagttctagcttgctaccaaggctattgttatcgtgttcccaacgagatatcccaaatgttacagtttataacatatttaatacacgtttaccttgacccggtaaaaaagcggacctatcacagttgtatgattttgaaatattaaccacatttattttacgtggtatgtaatcaaactccatgatttcaggggataattgttgtaagatatctgtcaactaagtaattaactgccttcttatgtaattataaatcgaggcaagttacactgaaaaagagacgaaaaaagatcattagagaaaaaaatcctaagaggtgtatcagaaatctaataagattgactcgtggactatgtagaattttaactgtaaaaccacgtaaatgttagaattatttaccatgatctagatttactnncaagtatgttattaacatcctaaacatgaactt

SEQ ID NO: 143205 - DNA, 556 bp, Cannabis sativa
aagttagattttagccactacaaatgtacgctggtaaaactttaacctctttgccagcgcagtttgcgaaatgcgctggtaaaagttgcttttatcagcacagtagtgaaaaagtgacattttttgtagtggtagtatcgctagccaatcacaacgcgacatgtcaagaaaatgctaggcaccattaatacctaatagctagcaatactctttaataaacacgtccaactaacaaacaaaatcaatattatatatatgagctataatttattaatgacttatcaatataattgtacaataatattatagtgattttggcaaaatatcctcattcttaaggtgtcaaataaggtacaataatattcattcttctgtatatgcatggatcctcattctcattctccttatcatatgatcctcatcctatcacacaagaaatgttatttttaccagcttatttcgcaaactgcactgacaaagaggtcaaaattttatcagcgtacatttgcagtggctaaaatctaacttttaacagcacatttacgcgctaggaaaa

SEQ ID NO: 143206 - DNA, 635 bp, Cannabis sativa
atccacataattattaatatttataacagttatatgtgttatctctttcttttttatatctttttatgctatctaagtttgttccaagtgaaaatgcaccaatagacatatacaattggctatatttttttgttgtcgacactcactcttaccctatgttgtaagatcttgaagagtataatccaaatttatgtcattttgggacgttggaggagggcgagctcatcaaatgatagaatatataagtttaatttttggttatagataaatatagaagtttaattttttacggtaattatacttaaattatatttttggaccttcaataaatacctgagtgttaagtgcaaggccgtctcaaatttcaagggggcctagggcaaaatttttaaattgggcctaaaaaaaatacttcatataattaattatagggatatttatatttaaaaaagaaaaacacaaaaacaaaagcaagcaataaaaaaaattataaaaatacggtctgtacagaatttttaacacttttacagttttttagagtatatttacataaaatacgatctttttatgttgtactcttgttattttgctgttgatttttgttatttgtatattattttttatgttgttttctt

SEQ ID NO: 143207 - DNA, 571 bp, Cannabis sativa
  modified_base (406)..(409): a, c, t, g, unknown or other
gaggaggggttagttttgaaaataaaagtgtatttgtgtattaaattaatattaccgtataaataaatgaacaattagttataaatatataaataaaaaaatctcttaatattttcaaaattttaaaatattaaacattcttattttaaattaaaaaaatcctcttagctgcatatctctctaacttaaccgcatatgtttagttttatttttcataaagttttttatattaaaactttaactaataattctcttcccctattttaagatgacattttttttatcattttcgttacataatatttcttttaaatttttcaaaacaaatttattgatccttttaatttttccgaaactaagagtaaatgttaaagtcatatgttgttatgacttatcataaattatnnnntcacattaaggataattactatatgagtatgaaaaaattgagataaaactgtttattattaataacaatatgtatatcataattttatatacacaattataacattcttaacaagtttacttttataaaacaaatcgtataaaaaataatttacaattagtt

SEQ ID NO: 143208 - DNA, 620 bp, Cannabis sativa
tgcccttttgttttgtctctttatgtggatcaattaattgatttattattgattttaaataattggtcttggctgaaataagtaattaaactacttttttttttactcatttttacaaattgagaaaaatcaaagaaaaagaaaaattctattttcctctcaaactctccccctctttcggcctccttgagcagcaaggaatctggggttttccttggtgattcaaactattttcttcagatttagtaatctctaattgttggtaaggttcttataactttcttctatgtttcttcaatttttttaaggaaaaatggatagttgcatgcttggtttttgttgttgttgctgctgggtttatgggatgttttctgtggtttttatatgtttaaattaattggattaaagtaggtttgattcatgctagatggattaaccaagtttggatctttttaactcaaaaactatgatttctatggaaaattgatgagttttgttgctttgcttgttggggttcatttctgttgtttgcagaagtttagatttacacatttgagtagatttaaacaggttgtgattcatgttagtgagttttagtcaagcttgagttttgaactcaa

SEQ ID NO: 143209 - DNA, 646 bp, Cannabis sativa
cccttaatatattttattcttaaaacacttagcttcttataaatgatatttcaataaattaatataattactgaaataagggctaaactatttatgtctgtgaagccaagctcaaagaaaattatcatttcatttctaaattgttatagaaattaattctatatatatgattagcgctctcactttattgtactaccatgttctcaagatgtaagtattaggccgatccaattggtcagcttcaacgaacaagtcgaagaacacaaataatacaattaagccaaaacctaaccatctgaggattaagatctattgatctaagatcaagtaagtgatattaacttagaaaaaatataatggtaatttgatgatatattttccattattaatatcagtccaatctgatgtatatccaatacatccgatactagtatactttgctaatgtcctggaaaagacattccacttatacaatgtgtaagtaaactttatcgttgattatcacgtcagtgtaaatctaggacactgataaatcacggactaaagactttgaagcatataatcacaactacttttcactatgatgacatcactgtaattgtgaaaacaatatgttctgcatttaataaaaattgtatattaaaac

SEQ ID NO: 143210 - DNA, 557 bp, Cannabis sativa
aactatccctctgttaaaaggatttcatctttgaatttaacctgaacaactcttgatactgagtcctcatgtcggattctaacttctagatggcttcctccaccttactgtttctccagggcaccttgaccaaagctattgtcttattcctaagaactttatcttttctgtctaatatctgaactggctgttcttcgtatgataaatccagttgaagttcaaaattctcataactcaagacatgaggagggtctgaaacatactttcgtaacagggaaacatggaacacattgtgaactgctgatagagttggaggcaaagctagacgatatgccactagtccaaccttctcgagaatctcaaaaagtattataaacctagggcataacttgcctcttttcccaaaatgtttgactctcttcatcggagatacccgtgggaatacatgatctcctacataatattctacatttttgcatttcggatttgcataattcttttgcctactctgagaggcaagcatcctggctttaatcttttctatggattcactagtc

SEQ ID NO: 143211 - DNA, 699 bp, Cannabis sativa
ttggaattttgcacatggccattaacggtgcaagagcgagaaatgttgtcttaagtgagcattagcaatggtgtgtgttatcaccagtttgtactaaaggaatagtggttcaatgctacgataactaaaaatttcatcaaactttgtggtaattacaataagataaaattcaaatcgaaagatattttacctaatgtacctaagcaaattttctttaaaagtgtgtatttagtcaatcaaagtagatgaatgttatattttaatataatatttttgattgattaaataaatttacaaaagttacaagtttattactaaagagataatatttaatcttgtggggattgttatattattttgaaataatataatatatagattaaatatgtataataaactatttatatgtaacatatgataatatatattagttgtcatcattttgtaacatatggtagagttacttgttattatgagtaacctccacaattatcaccaatattaagtgtgtaaaaaggtgttacacatgaaattcttaaaagttgttgagttatagttgttggagaatcatttttatactcatttattgagtccataacctccatggaaggttacgagttataatttcaaatggtgatatcctacactaggggtgtgcatccgatccaatccaacatttttttcctcatccgatccaat

SEQ ID NO: 143212 - DNA, 691 bp, Cannabis sativa
  modified_base (26)..(62): a, c, t, g, unknown or other
aggggcaacaataataataataaatnnnnnnnnnnnnnnnnnnnnnnnnnnnnnnnnnnnnngagagagagagaaagagagagactaagattggaataaattaaatataatatttgagattttttgggttttatattgcacgagaatagggaataggcaataattttaaaatgaaagctatactataatcggcattttaaaaccatcagagattccctttaaaagtgtctcatttcaatttcgtatgggttttaaaccgtcgactattctcaacgactatttaaaaccaacaggtattcttgacaattgccatcgattttaaacactcatttcattttattagcaatggtcctcgaaaatactgattttaggaccgaccggaatagtacctattgagttcaaatttggccaagcgacagcggagtcgtatttattactaatgctaccacatgtacataataagaataggaaagtaaaagagacacaatatttttatagaagttcgacccccttagttagcggataatgacctgctcctccttttggttgtattaatactagagataatatcactaagatcataagggttgtggattctgaagtttatgggcgtcaccagcaatgatagagtggcatgtgccacattccagttccaagaagacgctctagtatggtgggacatggtgtccct

SEQ ID NO: 143213 - DNA, 656 bp, Cannabis sativa
  modified_base (611)..(611): a, c, t, g, unknown or other
aatgatttttgaatcaaaagatatgaagaaaacaagtttgaggcacaggggtatgcattgcatacccctgtgcgcgcggaaggggttgtctggccgaggaacgaggctgcgtgcagcctctgtggctgagaaaccttggcgtgagggggggcaaaccttgtctaaagggatttagtccgagcgagccgcgcctgtcctcatgcgcgcgtgcgtgtgtgcattccaaaaccagatatttttattcaaattcaaaaaatcattgctaattcataaaatatccaaattaggttctgtaaaagccaaaatttattaattttttgtctactttccagtaaaaataattcaagatcgaaataaaaaatatttcagtaacatccattgcgatttctaaactatcatcacataagcacataaaccacatgaagccatccaaataagcacaaatcatcgttttaattaatatttcatgaaattaaattattaacatgactctaagtccagtttttggaactatttaatgtaacgccctaatgctaaggcacgctacaatgccatttcagttacagtgcagtctttgctaatcaaagaatttcttgaaaaacgtgtcaaantaaaacttttatattaattaataaactctataatatacaaaacta

SEQ ID NO: 143214 - DNA, 717 bp, Cannabis sativa
  modified_base (591)..(594): a, c, t, g, unknown or other
ttatttaaaaacttaaaaaaaaaaaagttaaacccataaatttctcataaaccaagaattctgttatatagacatactttatatagaatagatatataaatttaaatgattactatagcatataaaaatctacaataatgtaagatatgacatgagaattatgaaagcttacttggtagaataatttattagggtaagatgtggtaggagaatgatctaatttcttgactacttccaaaatcataaaatttatatttactataatactacaaaaaaaaataccattcatatatatatttatatagttttatatatacagtaaatcgctacctaaaaaatttacatatagatgttcatatatataggtacgattatgaagattttttttatagtttttttttttaaataattaggtatagttaaagaaataatagtggtttaaatatataaatatttttcttaatttttcttaattaattaattaatcaaatataattataaaactaataaaaagttcataatgagagaattaaggggtataattataaaactaataaaaaattaacataatgagagaattaaggggaaaannnntaaagctaattagagagattgtagagggaaaatttgaaattgtatacttaataaataataaaattggacccctaatacaatactagacataatttgtaaagtgggatacattttcctaaaacc

SEQ ID NO: 143215 - DNA, 634 bp, Cannabis sativa
ctcgttccttttgtatttgttgaacttccctctcctgatcagctcttcaattttgtcctgcaaaacccaacactctaaagtagtgtgaccaatatctttataatacttatagaattttatggggtcccttttgtcgcggtttcccctaatccagggatgcttcttgaagaccccattcttctcttccatagcatagatatggtctcgtggtactgggagctcagtatagttcatgaagcgcggtccaccttttgttttcggcgacgattccttctttggaggggacttggctagtttcaaacttcgttgtctccttggacagcgtctccttgggcttcaacctctggaatttttccctcggggactgcgggatcgtgatcgcgccactggtgacctacgcttatctttgcccttctccaactctgccagggaattctcaatcctctcatgtggttctgccatggccaagaattcgaccactgattctggtctttgagcttgcattttcttccaaaaatcggttctcggcaggacacatattattaacatacagactggtgaagactcaggagccttctcgacttttgttacctcagcattaaaatgcttaaaatagtcctgtaaagactcacca

SEQ ID NO: 143216 - DNA, 655 bp, Cannabis sativa
  modified_base (625)..(629): a, c, t, g, unknown or other
ttttttaaaattaaaataataatctggactaataaaattttgacacgtgacaattttaaaaaagtaaacgactcagttaaaattaggactaatggataaataaaaagcacgaccttgatgactattactgctatttttcgagattggggacttatctgtatcaaactgaactttttgaggacttttgccgcaaatttccctttcttttattttttaggaaacaattgcctctctcgcctctataagcgtccttccatgcaaacaacactcctaaacttagagaaattaaaataggaaattacatttgaatgctctcactctacaatagttataatagagggatattatttagacacaaaaggaatagagctaaagaaaataaaaatgaactttacaaaatacacttttgttttttatttttaaaattcaaaaataaaagtgcttacagaatatatttttatttggaataattacataaagcacaactttttttgtaaaaaaattacatttttacgtttatttatttatttacatttttacagttttccatggaaataacacgaaaataacaaaaaaagtacataaaagtaacatgaaaataacatctaaataacaacaaaaaatnnnnnacaaataacaaaaaattaacaacaaa

SEQ ID NO: 143217 - DNA, 1705 bp, Cannabis sativa
  modified_base (170)..(181): a, c, t, g, unknown or other
  modified_base (833)..(848): a, c, t, g, unknown or other
tatgttttgtataataattagtatcttgaatactaaataatgtgtaatattttaattttatgtaatttaatattcttaaacatttaaattttataatatgggtttgtctttttttagtatactagtattatttttataattttatgttatgttttgtataataattagtnnnnnnnnnnnnaaataatgtgtaatattttaatttttatgaaatttaatatatttatacatttatttttttttaaaaaaaattactctaaccaaatgtattacactaatattattctaaaattactttaattatttaagggttatataaatatggaaaaaaaaaaatattctcataaagaaacatacctcgtaccaaatgatgatgtgtgtacgagacatcataaaggaactttgtactgaaattttaatggaataaaaaaaacaagttacatacaacgaaatgatgagaaaaagaatagaaaaaaataagagaatgaccaaaactatatatggggtgcagaaaactaaattgagttgagggaaattagtaggtttcaaattgcataattttttcattatttaactaattatgcaatgtgaccactcatttaactaatcttacactaaattactaactagtaactaaattactaagtagtaactagtcttaattctaccgaaatttcgacagcataacggctataattgaacattctcggaaaaaaaaaactattaataacaacaaaatacaatccaaaacaatataaaacaattacaacaacatttagcaatacaaaaattttcactcatccaaccgcaatacatgtattcgcagaacctannnnnnnnnnnnnnnntatttaagatattcaaactcatctaacgtgcatattattctacccatccgaacgcagtacaatatttaagatattactagttatataatttatgagtaaatagttagtaataaaaatacatgagtagcaatgaaaattagtaaccagttaaataattgtaactactattgacatagttgtaactaactatttactaattactaaaaaaaataaacacatgaataaatttgaaaataaaaaaatgataaaaatgaaattaatttctaaactaattttttagaaattaatttctaaacttttgttttaatagtctcctatttcattctcattcacaatatttaacaaaactattagtttaaaatattcaatatatacaatatacaatacataaaaaatatacaatataattacaatatttttatacatacatattcaatataattttaaaatatttacatacaatacatattcaataaaacacaaaatacatacatatatactattaaaatttagatttttaccttattacaaaaatccggccactaataccgaccaaaatccagccaccacgcaccaccataataacacaatcttaaaaatctaaaaaaatcttaaaaaaatttgcaaaataaaaaataaagcaatataaattactaaaaatattagagattagatttataccttaatggacattgagattcaacgatttctccaccaaaagcggtaggcggagctaaaaccaccacaatcaccacctctaagcccagtttaccatgaaaaacaaaataaaagatgatcaaactttggggatatgttattgggtatgaaaaatgcaacattttttttaaaaaaaaaaa

SEQ ID NO: 143218 - DNA, 890 bp, Cannabis sativa
aaacgtttaatccccttcatcagagatactcgtagcaatacatgatctcctgcataactcttttacctactttgagaggcaagcattctggccttgatcttctctatagcttcactggtctgttgtaccgattctgggtctaattatttcctttctctagtttcatcccagtgaattggagatctacacttcccgccgtacaacatctcatagggagccatccctatagtactctgatagttgttgttgtatgaaaattctattagtgataggtacttgctcaaggagccttcaaaatccatgacacttgcctgtaacatatcctcaagtatctgaatttcctctcagattgtccatcagtctgaggatggaaacctatactgaacttcagtttggtacccatgcctcgcaggagactttgccaaaattttgaggtaaactttagatccctatctgatataatggactttggagccccatgtaacctcactatttctttcacatataggtctgcatattgatccactataaaggttgttttcaatggtaaaaaatgtaaggacttagtaaatcgatccactacaacccaaatagaatcgaacatccccatggttctaggtaatccaaccacgaaatccattgtgacatcttctcatttccactcgggaagagtcaaagactacaacaaccgtaaaggtcacagatgttcaaccttactctattgacaagtcaagcaccaggatatcaattctaccacatccttcttcatttcgcaccactagaagaagtgtttcgaatcttgatacattttggtagtgccaggtgttggaattatttaaccaggatctagatttactaccatgtatgttgtttatgttggaaattatttt

SEQ ID NO: 143219 - DNA, 665 bp, Cannabis sativa
taggttgttaatccaacatacttggtagtaaatctaaatcctagtaaaataatttccaataatagctcccttattattaaggtggatgataaaaaatagtgtatttaattaaatatttatttttattttgattttcagtgtaatatatgcttatgatttttatttcttaaaataatttctttcatctttaatatcatgtattttttatagttagaaattattaatgcttggttttatattttaaaaaatgatattttttgattttatgtatttacattaatttattttacatttaatgcttataattttaaagcggaggaaaatctatttttgttagaaaataattagtttgattactaattaaaatatgagaattaatataatgataaatatttttgtttacacttaggtacattctgaaatgttaataatttctctaaataccattaaaaatatatatattacttatcatttttattgttaaacactttattttattttgttaccaaaaatttcactattttcgggactaggttagaatgttaataatttagattaaaaaagtagtttcttcgatctcacgcaattcccatggattcaacctcgttcttcacaatctttacactacaataaaaattcgtgcgcttgcgagttgataaatgtaa

SEQ ID NO: 143220 - DNA, 1165 bp, Cannabis sativa
ttgataatcagataaataaaacttgttttgatttaagcacctaaggagaaagacttagttgatagtattgtactatcaaattgtaataattgctatggatcaatcaagtacgcaaatctcattatgatttaattattatatatattatagtattttatattatatacaaactttgtttcttgggattattaatttctctaacacattaatcatattttgaaaaatatatttttagtactgttttattcttattaaataataaaataaaaaaaatatttatgtttcttaaagaacaactattgtaacacagttacctattgccgttacaaaaaatataaatctgttattatttttattgaaaaaatataaaaaagattttatgatactttttaaaaaaagtaaaaagtattaccaaagctaaattataattaattgaaaattttgaatgtcattatgttttttttttttttttaaaaaatagtacttaaggtaatatttttttaattaaaaataatattatttaatgaataacatgtaaaaaaaaaaatagtggtttttttatttttacactttaaaatagtttcttttctatttttacggaatttcacacaaaaaccccaatagcaactaacgaagcaacctaaattacaatcgaaatctgtatagcaactaacataaaaaccactagagcaacccaaaccgtaaatttaaaaattagtatatggggtaattcccaaaaaaaaaaactaataattatacaattaaaaatatacataattaaaataaaaacaagaatataattaaatgtgtgtattacacataatattaagaaattattacatagaaaatataaattgacactttatttacaaaaattactccataaggtaaagacaacctttatactttttatgtgattttaattaggataaataccattttggaccctgtgttttacaaaagttaccaattggaccttctgttttgtgaaatgacaaaatagaccctgtattttctaaaatggtacaaataagaccctgagcttaatttttgacaacttttttttttattaatataaccaagttgaaaatacgaacagatacataaattgtaaacagttttgtcataacacttttagatcgcattattattaaattttattttg

SEQ ID NO: 143221 - DNA, 853 bp, Cannabis sativa
  modified_base (181)..(184): a, c, t, g, unknown or other
  modified_base (500)..(509): a, c, t, g, unknown or other
ttttattaaatgataaaatagatcttatactttcttaaatgataaaaataagacaatgatctcaattttgaacagttttattttttattataaataactttaatataatttttaatacgaatagatacaaaaaaatataatcagttttatcataacatctatagatcaaattattattaannnntattttgataaaaaatcagttcatcagagttttatttgtacaattctaaaaaatataaaatctattctatcaattaataaaataaaaaatatctatttgataatttttacaaaaataaatagttcaaaataatatttagcatttattttatcacttgtacaccgacatttagggaaagaaaatatttataactctgattggtacttgcccttcatgaaaaacagaaaaagacaactctgatgttacttgccacctaaatatatatattattatttgctcaaaaaaaaatatatctatattattattattattattnnnnnnnnnnttattattattattattttgaagtggatcgggtagcattattagatatatctaaactacatattttcatgcattttattttcatgtctaaattaaatattaaatgtatgtatggattataaatctcgttatatggtaattgtaagtaaattattggtagactatacataatgacctataagaagaattgttaatcaaaacttaattacgatgacaatattaatagtatatctattaatatctatataacttattaatcactccaaacacttctaattattctctccttaattctctcactttttaattttttattaaggtaaaattatttaaaatacatttatt

SEQ ID NO: 143222 - DNA, 1027 bp, Cannabis sativa
gtacttgaatttttaatcctataacaaacataataaaacactactaaaacaaaaaaaataaataaagaacataaaaacaagcataaaaaaactcaggaattgtagtattccgatcgagtgtacttggattcccaatcctataaaaaaaatataagaaaacactactaaaacaaaactaaaacaacacaaaaaaaaataaagaatataaaaaacaagcataaaaaaaacaataacaaaataagccataagagtcatcaaacgatacaacaccatcactcacaaaattagagctaaactacaaccccaaaaaaaaactgaattagtgaaaacaacaaaaaccaagtaaagtttatgttgttctagaaaatataaataaagaaaaacaaattttttttacttggaaagtttgagttgtctgttgttcttcttcttcatctgtattgttcttcttgcttttctctctcaaaacccaaataaaaaatgaatgaaatgagtgagttttggaagtttttgaaatagtgaagagtgaggagaaaggttttatgtaaagtctttgttgatggtctttatcttaaacaccaatctcaagaaattttctatagattttaacccacaaaaagagatagagacagagagaaataaaatacatatataaattcttgtgaatgaggatcacgtgggtggattgtgcccactttcaaattaagtaaaaaatgtgagttgaaattaaatttcaaatttaaataaaaaaaaattgacatgaaatgaaagtgacatgagagtcatcaatcaattcttgtaaactttttatatatacaaatagaaccaagaccaaggcagtatactgccgaaataaacaaaaaaaataaaaacagtaaaaaagttaactttgctgtgtcacagtatatttgaaaggaaattggaaaaattagtaaagtatgtaaatttcccttataaaaatactaatttttatatttagttaggtcttatatgtgaatgtccaacccaaagctcactaattattgta

SEQ ID NO: 143223 - DNA, 1002 bp, Cannabis sativa
acaaccatttaatagtaatctaatgacttaaaaaaatataaccatgatggttacaataaaaatataaccattgaaacctattacatattttaattgtaatatataatttggctagtatatatatatattagtaatattttttttttattattgttagtgtatatgttttggtaaatagtatatgtatttttttgttatacagtatgttatttttctaaaatgatatttaagttctattttctattgtacttttgttaatgtgacatataattttattagcatgctatatatatttttatttttatttgttgttattatatatgtatatatctattataattttgtaaggtatatattttttgttatatggtatataaattttattgtgtagtatattattttattttagatcatgtttagtttttattttattatatataaagatggtgtataattttgtaagtatggtataattattttatagttgtatataattttattaatattgtatgtacattttttttaataatattatattattttttttattttttattgtaggtgtatattttattgtatggtatatatatttttttgttgtgtatagtatgtcatttatttaagttgatgtttaatttctttttattatatataaatttttttggtatgatatacatattttaatagtggtatacataattttgttagcatgatatatattttttgagtattaatatattagatttagtattgttatattatttttttgtggtatataattaatttttcagtgatacaatatatcaaataatattgtatatatctatgatataatatatttattatttgtttttgttacaatatattaatgtgcaatactaaaaaatttatgtaacttaatttaattatgggaaatttacacagattactgttttttcccattttctttcttttatactgttacacgcccaaaataacttttatactgttttttttttttcg

SEQ ID NO: 143224 - DNA, 553 bp, Cannabis sativa
  modified_base (179)..(184): a, c, t, g, unknown or other
  modified_base (296)..(299): a, c, t, g, unknown or other
gtgatttgtaactcaaatcccatgatttagggaataattgttgtaaagattacagtcaactttgtaattaactgctcactatattattataaataggtgcaagcaagacgaggagggggttgaaaaaaaacctcatataggaggaaccctaaaaaaatcagaaatctaaataagattgnnnnnnggactatgcagaattttaactacaaaactacgtaaaaaacctcgtgttcatactttaatttttacagcctttattttttctatgtgaaatcattactgtgaggctcaaattnnnntaacgaaaatctacgttaacagttattgtttacttttcttactgacttgtgattcacaagtgctttgtggtacaagtaagggcaaggggaaactagggcaaccatgagacgatggtcttctttagaaaataaacatgtcgacttattcaacttgtgtgtttaagttttcaggaattattttggtctacactaatgtgtattttgacttacttttgtatatagccctttttgtaaacctttcgtaacaagagatc

SEQ ID NO: 143225 - DNA, 1555 bp, Cannabis sativa
  modified_base (40)..(54): a, c, t, g, unknown or other
  modified_base (881)..(884): a, c, t, g, unknown or other
tttctgatctatattaataaacaaatctgattatattgannnnnnnnnnnnnnngggcataaaacccaacaggtacccgacaccctgaccccaatttggacccggggcttagacctaacccgtagttagtgtttggatctgagacccatacccaaagtcaaacccagacccggactcggaccaataccctgaccgagacccagaccagtaccctagatctgggtccgagtccaagtctaggtttgagtccacgaaccggaatctgactaggacccagacccagatctggaccgggacgtggacccgaatcaaaacccagataacgactcgagacacaaacccaaactcagacacggacttggacccagtcccaaacccaagacccggacggagattggtgactaggacctggacccaggagcccgacaaagattggggtcccaaactcaaaattagaaccagaatcgggacccaactgggattggaatccaagacccgaccccggtctccgtcctagacccaaaccctgacacgaacacagaccaggattttggatccggatcgaaatgagacctggacccaagattgggatatagatcatgactcacgatcggagcctggactaaactcgtagtcggtgtctagatcttggaatcgtaccaagacccaaacctggagcaatttctagactaggatccaaaccaagactcggactcgcgacccgaaattggaacaagaaccggtatgaagcccttggaacaggaattggacgttgactaaaaaacagatctagacgcagaactgaacacagacccgaaccccaactaggatcgatagatagacccatacttgcgttaggacctgcgaccaagaacccagannnnaggacccatgacctgagaccttgaccaaaacccagacccatacaagaacccagacccagacccagaccaagacccggaccctaaaacagactgaaaccgggacccaaatcaagatccagacccaaacccagactcgtacacaaactcggactagaacctgagacttggaccaggaccgagataaggactgggacccagaccaggacaacgaccgagaactgaacatggactggggctaggacccagactgtgactgggactgggacccaggaccgagactgggatacgggacccaatactcggacctgagacttgagaactgaattatgacccagacccacacaacgccaagacccgagacaaggacaagtaccaaacaaggactaggacctgcactaggactaggatgataaccgagactgggacctaggaccctgaccttaatcggggaccttgacccatgactcaggacccaagacccaaacctagacccaaacttggacctgagacccaaaccaggacacaaactaaggacctagaccttgacttggacaaggatctagatttggactgttggaaattattttaccaagatcatagatctactcacaagtatgttgattaacaccttaaatatgaacttctaaaacgattataaaattaaacacata

SEQ ID NO: 143226 - DNA, 528 bp, Cannabis sativa
tattttatttccttaattagaaatattctaatagttagaggttttatgatggacgattgcacgcgcacccattactttactgatttttttttttttcaaaattagtgcctaagaagaggtaaaaacaatgttgattaagaccatctctcaagcggtatggctaagtggacatttacttaatgtggttaagtgagcgttgttgaatatgcagtatggagtgtctcttccatctcaattaatctccttttataatgatcataaagtctaacttttatttttaatgcacgcttatttaaaaaaaaaaaaagaccatctctcaaaaattgtggtacatttgacacataagtaattttatgatagatttacctaaaatttaaacattatgctccaatgcacaattataaatttttaatgtaaaatttaatatttcattaatgtttttattaaaaaaataaaattaataactttattatcaattttattattattttaatatttaagacaataaaaaaaatgagaaatgctaaa

SEQ ID NO: 143227 - DNA, 1551 bp, Cannabis sativa
  modified_base (498)..(510): a, c, t, g, unknown or other
taggatgttaatcaaacatacttggtagtaaatctagatccggtaaaataattccaacacatgtctctttatgatttaatatgaacaaattcaccattagaaatttagaaaacaacaaaaatacaccaggataaacattttactatagcattgatgtaatttttttggattatacttgagttgaactgtttgggaactccagttcaactttttgagatcttcctttcatgcatctaaaaattaaagtcaggacattagttttatgtaaattaaactagatttctggttaaattttagttttgtagtagtttttctacacttttttttatgaattcaaaacagcccctattttgattgattcttgtcgtcttctcaggtgaagtcaccggaattaatggtggttctctgtctggttaaattttcatttggactgcgttgggtttctgtgtggttgtgcgatagttgcccaggaagcatggatcctgggttgaaggtgtnnnnnnnnnnnnnttgtgtaatttttttttatttggactgtatattttttatttggccaccaagaagtatttttgtaatattgttacttttttttagttaaaactgaaaaaaatcatttgtataaatagggattcaccccatttcatcaataaactactgaaaaattctcattgaatttctccttctcttttaatcttcttattcttttctttctttctctcttcatcttttttttcttttcttcttatctattttatattattcataataattttataacacattatcaacacgagtctctacctgaggtaaatataaattgttaaagttcttgaattgtttcaaagtcatgatatattaaatatgtatttatatatatactcatttgattgaaataatttcaagaattttattacttttttcttctttgctatgtatattatggaagaggtttcaatggttacatcaaatatgtaaccacgatggttacatttactttttatcgttggattattattaagcaattgtgattaatttagaaattaaataaaaataattaataaattacctgtaacctaattttatgtaaagagcgcttagctttgttttggaaaatagcaaataattagggtttaattatgaaactagaatattatttatgagttattcttttatggagatttatttgaatttagggtatattatttaagctatatatgaaattttatgtttttatatgttttgtgcccagcaacattggaacgcgacatttcgcttatagaatcacattttagtatttagcagtagcggggcaatatagttagacggaatatcgagaatagtcgaggttttagatttgactaaaatacccctaactagcttggagtctttttgacataagtgggggtagaatggtctttttgaccatttagtttttgtctacttgttagattaattcaagcttgaatttgatattggatgtaatttagttagaatattattagtttatttcattttattcaagaaaagaaagaaaaatcaactctctctctc

SEQ ID NO: 143228 - DNA, 594 bp, Cannabis sativa
ctatgcgtatttagttagctattggtacatttagtatagcatcaactatcccactattaatatctcaatattatcaatttttttatactaataattaattatatatcaaaaaaattaattacttaagtactttcgctactaatttatttagatacataattttaccataattatcttttaagttaatttgctttgttactttttttatcaagaaagataatttctattaatcaaaccgagtctattaatgtttcaaaacaaaacgagtcaattacatttacaaggggatttccttcaaaagagaaacttgcaattcaattttatttatactagacaacttcctttttgtacaagattaagtccacttttgaagctctctttaatactatactatatatacaattcatacactttttcttatttatacacaaattttagtttagccaaatgttttaaattgcacctcctaacacatttttatgaacataatatgaattttatgacacattctaatatatttttaatttatttttaaaaattatgtgtttttgtaaacatatttattttttttcaataacaaaaaaaattaaaata

SEQ ID NO: 143229 - DNA, 913 bp, Cannabis sativa
  modified_base (144)..(146): a, c, t, g, unknown or other
catcagatttcctcttcttccccgacacggacttaggagtaaagtccttgggatagagcccatacctcacaaggttatcatcagaggtcaactgggtaatattccggcttcccccagctaccgagcaagtttttgagctctatnnntaagagcaagagtgaggggaggattgtgatatatcggaatcttcttaaaccgagtccgcgtaatgctcgcatccttcaccatgaagtactcatcaggaaaatgccttattttgctgatggccttgtcatccgtgccggtcaaccacttgaagcctggttgagagaaatagaagtaccccgacctgccttgtttgggggtggacttcaaatcgaagaactaggaaacttcgtggggagaaggagtaccccatccctaggaagcatagaggacgaagagggcagacaaatacttaatgcccttaggagtgaactgggccgggcagagatcgaaaaagtttgccacatccttgaagtacttgtgcaagggcatgaacgctccttgctgaccatgggctcccgaccaggcacacatccccttgtcagggtttgtggcacgattattgtgggcaggaatgtggcagtctagcttgcccaggtattcgcccttgtcaagagtttgaaggcgtgcctccgtaatcttggacggaggacttacccacctggcacccaaggtaccctgccttttatgaggaaccgccgcggcaagctcctcactaacgtagtccacgccctcaatcaggacgtctccgttagcatcgactggctccccagcctcgttgtacgccccgtaatttaggggttcaacctcttcctcttcctccgacttggagggactgccaggacgcacatcgtccagctcctcgatctcttggacctcagcgtcccct

SEQ ID NO: 143230 - DNA, 719 bp, Cannabis sativa
gagccttaaagtaataaataaactcaagaataataattaatgactataaataaccagaaggttcttacgtgggtttgaagtaaattcttcatactccacaagtccatcttatttctgggattttatagaatgtttacataatataagataatatttgtataattctctctatttctccaattgattgtccctgttttcccttggattttctccctattcataggaatcgtagggtgacaattattccctcgatatcttatctttgtaaccgctcatgaaacgtggacaatctccacgtttcatatttacatcacatggataaaaatagataactactataagtgctcttatctttatctataagtggttgtgttgagtgtgctttttctcctcgcaacgtagatgattatcttatgatgttttactttgaagataactttttacgcttaagtataatctgagaagtacttctcgcgtccttctgtaatgttgagagaagcaaacacgaggcactgtcataatgcgataattctgagatgaattatatcgtatgtaattgccttagtctttgaacatactcacgtgtatgtggattaataggctacaagctcttaaggaattcattatctaccctttccaacatgtagttgttctgttgtatcttctgagtatccctagatagaccttctacattgattatttgttggaaattattttac

SEQ ID NO: 143231 - DNA, 731 bp, Cannabis sativa
  modified_base (367)..(372): a, c, t, g, unknown or other
  modified_base (503)..(507): a, c, t, g, unknown or other
aaatataaattttaaattaataatgtttattttttaatagattattattaattttatgattttttgaggtttaaatttaaaaattgattattttattttaaatcatggtcaattttaaaattttgttaatttctttaagatttatatattatttaattataaggttagattttttaatattggacatattttaaattaaatggtagcattattttttaattttaaatattatattaaaattatattataggataaattaaataattaataaatttaaaattaacttagatatttctatagatattttaactataatattttcaaattgaaaattagttatttagttaaatatttaattgtttataannnnnnagttagaaaaatgatatttatgctatattatatcatttttacttattagaaatttataaatagtattttaaatatttaaataatcgagatattttcgtagaaatttgaaaaatgcttaatttgagatattnnnnnatataattaggataattattatttgtttattattttattcttaaaataatagttgcctaaccatatctattttaaaattagtttattttgttattttaattttattaaattgtaagactaggaaatgattatgatattgaaaatatctatttggttattttgaaatgatttatcttattagatatttaatttaatttaataaaaataattcaaataaacctaga

SEQ ID NO: 143232 - DNA, 668 bp, Cannabis sativa
  modified_base (456)..(468): a, c, t, g, unknown or other
tgatggaaacggtactctagaaggactcccaaaagaagttagacataacacatttgatcataattattgaatccttgaagtagttctatataggtacctataaatgatgaacatattttaaaaaatatgtaatttaaagagatctttataatttatgtcaatatgggaagtattgaccgaggttttcggcaaccaataaaataataatgatttagagagctgtaagaaataaagagggaggtttttacgtagttggggcgttaatgagtcttagtccacgagtctgtgtatttatgatagtatttaatacagagaatgttcttgatgagtttttactcttctagttcttttgaaacccagaattctcgacccctctttaatgagttatgaggggtatttatagtgtttttatggggtaatccctagaattaaggtacatgcatttctgtaactatnnnnnnnnnnnnncattcccaatgaatttatcataggtaatgtgtggtctaatccctaggctctgtagggattttatgagggtagtccttaatccctttcgattgatatgattcttcacagaatagccgtcactagactttattggtcatagcctagtgggtaccgattgggggttgtgctgtcagactttactgcgtatggcagtttcaata

SEQ ID NO: 143233 - DNA, 691 bp, Cannabis sativa
aaacaaactatacaacaaaataatgactttcagttttcttatttttacaatataagacaaaataaaggaacaataagaacttctgatttttcattttgaataccttcatataaataaataatgatgaacacaaatgtgtttactgttatacgaaaattaacaaaataaacagaacaataatattttgtaaaacaataaataaaatgatttcaaaaatataaaagaaaaaaccgataatttgtatcttgatttataattaaaaatttcctggtaaaatattgacatacatttaataatttacaaaactcttttaaaatatcttcttaattaacattttcataaaccatttagttgttaatttgatagtaaacaaaattgtaattaatattctttaacttaatttcttaaacataataaattaaaaaataaacaaaaataactctttgatttgaaagtgtgtacctcttttccaaaaagtataaataaaaaacagaggatatatgcaccagtttacaaaacctcaaaaaaaaaataccaacttaatcagaccaaactcaaaaactaatacaacaatatttaaagttatttaactaaataaaaaaaagtacatacttgttgggttttatgccctaaataaaactcaaatacaatgtaatccgtattattcaatatcaataaagaaacaaaagta

SEQ ID NO: 143234 - DNA, 514 bp, Cannabis sativa
cttttgagtagtataaataggggtcatgggtcttcaagttgtatatccaacaagagtgttttcaaagtgtgttcaaaagagtgagagtgtgttctaaagtgtcccaacataaagataaagtgtttcaaaagtgtgagttatacataagagtgttgtaaaggtgtctagtattaaaataagagtgtgagtgtttggtgtattgtggtctagtaaaaagtgttcaagtcttggtgtaattactttttcaatcattaaagtaattacgtttctcacgtgttgtggtgtccaacaagtggtatcagagccggatcaagttcgttccgaaagagtcttttgttgagtttcttagagtgatcgtgtgtggtttagtactacagaatttgcatgatgggtgaccttcaagtggtccgcggaatcaagaaacttaacaaccaaaattacaacacgtggtcgatgcacatggaggcatatctccaaggccaagacttgtgggagatcgttggtggcaatgaag

SEQ ID NO: 143235 - DNA, 963 bp, Cannabis sativa
acccgagatcatagttgatctatgtaatgagtggagagaagtcgtcgtagtaatgatcaagagagactggaaaaactaaaactgaaagttactcaaggacgagttttgtaagtaactatgatctacaacggctggatcttcgtgagcaattgaataagaaaaagcctgacttacgtcaacaactcaatcaaaagtaagaggatcctatccaattgcgaaatcattgagttggaggataaattgaagagataccaagatggggagtatgggaaactacctggttacgactaggacgaggaatctgagccctttcatccagacatcatgagcgctgaattcccgtagagatttaaaaaccctcacgtctcgtcatacgatgggactacagattcggtctttcacttaaataattttaataccatcatgcgagccagtaatgttacgaaaaaattacgctgtattttattccctacctcgctagttgaggcagcgagcagctggttcaacaaattcacccatcactcgatcacctcttgagaacagctgtctaaagacttcaagaaaaaattccaggcagcaaaagataggcgacctgaagcgtattcccttactaacataaagcaacaggcgctgcgagggttagaaacttgaacgacagtatccaacttactgctcttcaagcagggatcacgactgatctctcgacggctagaggcaaactgtgggatgatttctagggccgcccagtaaaaaacagcagcgagttcaatgagagaactctggtgtttgttcgaaaagaggaagcaaggatagagttgaagttattaaagactggctctagaggtaaacccagcactatctcgacaatcaccgactcgataaaggctgacaatccaggaggctctagcacaaagaagaaagatgactctaaggaatcaaccaaagataagaaaaaacaaaaga

SEQ ID NO: 143236 - DNA, 910 bp, Cannabis sativa
  modified_base (262)..(263): a, c, t, g, unknown or other
aagcctctttgacctgcattcttaacttttttaaaaatagaagatctgtaattaagcatttggatatttttcttaaaattttcaagttccttctttaaaagagtaattttttcatctttaacacaaaaatccatctcatatgcttttatttttaactcaaaagtttcaatttgatgagacagttttttattcattttaatcaacactctattttaagaagtaacttgaatccacttttcatacatgactttgtatgatttannaagagactcttcacagatttcaaaatcatcagaatcagattcttcttgttcaatggtattattcaaacataccagtctgcctttcacctgtgaatcacacaacacattagtcataacagaagttagagcaacattctcaaaattttcttcatcactctctgtttcatcatcactccacgtgacattgaaacttttcttattctttttcaaagtaattgcacactcggattgaatatgccttaatccttcacattccctgcaatgaattccctttttattagtcacagaaggtttaaaagaagcattttcttttgaaaatttcgagttattctttttattactcatctttttcatatattttttgaaaattcttggttaataaggcaatttcatcatcacattcactatcaaaattttcattatcaataactttacaagtgatacttttacctttatcaacaatggatttgggtttgtccttttgtttgatttgttgattcaattcaaaagcacgcaaggaacccattaattctttcaccttcattgtgctaaagtctttagcttcatccatagccaaaagtttagcatcgaacctctctggaagaactctaacaatttttctcacaagaacagaatcatcaagcttt

SEQ ID NO: 143237 - DNA, 1881 bp, Cannabis sativa
agtccaggaaatagctagagtgatgcactcgtgtataagagccatcattcattgggagtaagggcccaatggaggcttgaagcgaagatgttaccggggtaacttataaatgaacgtcaagaagaataatggtatcactaaggtaaagaagattacctaaattacttaaggtaacacggtaatgatggagagtactttataattgactggatagtcaatgttgtttataaggagaccattgaaattctaggaaaggattaatttattaagcaattatggtaaggcatactcacccacaatgggaaaaagcttatgaattgagattcaatttaatggacatgtatttgagtgattggtgaatgttggatcacaaagtaggttgtttattaaacaacaagttatataattgagtgtaaattaagttttagagtggttaaccaagtaggaagacaatgatgattgcaagaaagcaatggtagcgtatgaactagggagtaaaaccttagtggtaatgatggaaaagaacacgagactctcagatgttgatgaatcagcatcatcaatgagagactcactataagttggtttggtaatttgtaccaaggagttatcaataaaacaaagaatagacttgaggtatgtatatttctgggtgtgttgaaaagatcatcaagatctctaccaaacatagaaaagaaatttcaggatcacggaatgatctttgattaattgttactagttgagaattcgggaaatgtgtattttcagtttagttatgggtacctggtatgagtaatgttgccactaccatataagttacattaattcactttataacgttagttaactgtaagtgattgggaaattttaaagttgtgtcagttcaagagaaattgatgcaagttaaaataagtagaactgaacaagattcaagttgacaataagatgggaattcctcaaatttaagtgagtaaaaatcgatgaggaatcgcaagaggttaatgaagggagtggtggcaattgaattttattagtgaaagaatgaaagcaagaaatagaattaggaacaacgaagaagcatatactttctgataacccactattagcttaccttggaagaaagcgtacttaacttggggtaattcaagatagaaaatcttctggggagtcatctcagaaagcgtacgagtgaggacaaagtatgctagaaagattcatattaggatgcagaattagtagtcgttccacagatttctaagaggaaaaaaatgtgctaacaagtaaagatttacaaggtatcaaggtgagtttatattagtgggtggaaataagaaatgctctaattgaatacctatcagaaatgaatacttaacttgttataaagctaagtcagtaggtcagcttaggaggtcccatttaaggaatggaaagacataaatatgaattatgtactgtgggatcttatgattttgaccgagtagtaatgattggatatactgagttaatatgttgtctattagtatagataatttatacaataaataaggatatggaattcatacgagggaataatctaatcttgtgaaatttcaagattgatatcttttgttatgatgctaataattaaagaaggttattgagaaccatgcatggagattaaagcaaaaatagtatgatgttttattcttaaaaggtgggtaaccttagaagatcaatgttagaaacatgtcatgggtatatttgataaatgttagattatcttaaaaaatctcttcctttcacaaagtgtttgtctaaaagtgataattaaatgtactattagttaggtacttcaataagtgttgtgcgagagaaatattagatacatgtaaactgaggtaa

SEQ ID NO: 143238 - DNA, 817 bp, Cannabis sativa
gcctttgtgacatttagattattacttaatgttgattacatgttagtctaattcagagatgattagataacatgtgatttatgacctaaaagatctgaaattaaagagttaggttatttttataatctgtcattcacataaagaaagaagaatagcaattagcattaacaattgggtaattgaaacaacaggattcgacgtcaaggacaaagtgtcttaatctattcaggaattgaaggtgtatgcgacgtcaaggacaaagtgtaatactgccggttgatcttgaaattgaaaagacctgtaaaagaaacagaaaaaacaaaaggcaagaaagaagtgtagcaagagctgaaacagaagaagtcatggctgacaatgctaatggcggcaacaacggtaataacggaggtgccgttgaagaccaggcaaacggtcgtagtctgagagactacattctcccaactttgacaggggttcagtcttgcataagaccacctgccgtggaggccaataactttgaaataaatcaggccacactccaaatggtgcagtcttcagtccactttggtggactcccctctgaagacccaaatttgcacttgtccaatttcatggagttatgtcagactttcaaggtaaacggagtcagcgatgatgccatccgtttgagactattcctattttcgctgagggagcgggccaaaagttggttgatctccttgctaccgaactccattccaacatggactgatttggcaacaaagttcttgtctaagttttttcctccagcaaagtctgccaagctgcgaggagaaat

SEQ ID NO: 143239 - DNA, 507 bp, Cannabis sativa
ttaagtgagtccaagcctaaggtaattctctatgcaactctctctttagtttcttgagttttaagttatagtttttgcatgattttgagaaatttagttctgtagctgctgttgttgtttgtggttattttctggagcttgattgtgtttagatttgttgaattaagcttgttttggtggctgttagtaggtttgagcaagctttgagttttagaattcaaagcttggctttttcatggtgaaatttgattctgagcttgggtagttatttttttgcttggaatatgtctattggggtataatatgcaggtctggaaggtttggtaaggattggagtcgatttggttaagttttggatttgtttgggttttctggtgtaaaccggctaactggttttacgcctgtaaaaccggctacctagatttgttgctgggttccccgaaaaattcgtgttatcgattcgtgttaatttcagagctttaattggttaattccctgctagtttag

SEQ ID NO: 143240 - DNA, 576 bp, Cannabis sativa
ctcattttcatcaaatctcaagttaagtaataacaaattgaagaagatattaaatatttattatgatagtattaagaaagatcaatcaatcaagtttgctgtcaataattttaatatgattataaaaataaatatttagaaacttatatggtgataatatattggggttgaatataattttatctctagcaattggttagtagttttccatattatttattaaattaaattatgtggacctgatattaaaatgtactaaaaatagtatacttgtgtgtaacttagcattttttttctatgagatgcttgcccgattcaccctctctcgtcccatcatcctcttctattttcttagagagtaagtgatgttttccttcaattttgcattgccagcctgtagtcacttgaattcaataagaaaaaaagatttaaagccttgaggccatgtaaaagaagcctattagatcgaacaagacttaggctcaaaaataataaaaaagacagcttaaaagcccataaaaaattagatagtaaagataaaattgcagagaaagtccaagcccgatcaaagccaac

SEQ ID NO: 143241 - DNA, 699 bp, Cannabis sativa
gcttgagttcaaaactccaaagcctgctcaaacaacataacaacacctaaaaccacttccaatcaactcaaacaaacataaaataactacagaaataaccttcaaacaacaacaacaacaacaacaaaaactaaaactcaacaacatgcaaaactattttctttccttacaactcaataagcaaaaaggaggttgctagaaattataccttggcttggattacactttgagctgctggaaaacacagaattgaaggagcaaaaacaagaaccctagctgctctaaggctggccgaaagagagagtgagattgagagagaaaatgtgatttttctaacttttcataaaatgagtaaatgaatggattttctttattttattaaattgattcagccaaactaagctagaaaaatcagattaataacttaattaaaaatccacaaaagacaaagtacacatatgggcaaaatgacctttttgccttctcacatcaaaatgacacaaaaaggtactaaaggtattttgggaaattctaaattctcgactaatctcgacattctcaatgtctaacaataccgtcccgctatactaaaataccaagatgcgattctactgagccttacacgcgttccaatgttgctgggcaccgaacatgcaaaaatctgaaatttctatatatgacatataaaatgcattctga

SEQ ID NO: 143242 - DNA, 638 bp, Cannabis sativa
ggttattatataaatttgggttgtaatttaagttgttatgtgtgttattatgtgaatttcggtaaaaatacaaaaaaaaaaaaaaaaaaacaaacaaaacaaagcaaaaactgctttcaaatgttgaaaaaaaaaaactccgtattaaagtaaaaagtatatgtatctataggatccaatatcaaatttatgtttgatggctaattttttaaaaaaattacaattaaatatttataattcgatatttctatttaatcgattataaagttaatattattataacccaactaaattaaaaaaaaaatatatttttatatagagcaatttgtggcataaatacttaaatttaactttcacttgtaaataaatactacttaagtttaatttttgagagtaataatacctaaattataattttagaacttctataagtacatgccacaattaaattttaagagggccaaaaatatatttatacatgcaattagatttattttatatgagtgcttaataaatatatataatatatagtctataaatatactactagaccgtttgtttcaatgttctttgaaaactttttacattcattattatagttaattaaggggtgggcacgtagtaacatttgatagaaa

SEQ ID NO: 143243 - DNA, 596 bp, Cannabis sativa
attcttcttatcactcatgtgtagaaagaccacaataaaattatgttgttgaacaaaagcatcaacacatattgaatgttgcttgttctcttgctttacaatctcgtttatctcttgggtattggagttactttattaatactgttgtctatttaatgaattgcacgccatctgttttacttaacttcaagtattcttttgagttgttgtataacaggttgccttcttatgatcatctctgtatctttgattgccttgcctatgcttccaccttggataactcaagggacaaattttccccaagatctcgggcttgtgtgttcattggatacccggttggtatgaaaatctatactctacttgaccttgaaacccggttggtattggaggttatggagcatcctccaaaatctcaatgccacgagtgtgatccaatcacattcgaagaatccaacttagatcatgtcagctacccacacaacgatcctttagtttttgaggtgcaaatagcaaacatgatggtggcaagagtgatggttaatgatggagcgtcttcaaactgttggaaacttatttaccaagatcttagatctact

SEQ ID NO: 143244 - DNA, 582 bp, Cannabis sativa
tgaatcttttttggaaaaaattctggaaactcaaaatgcctccaaagatgaaaaatttagtgtggagggcatgtacaaactgcctccccacaatggttcaactcagaatcaaacatgcaggaccccattcacaatgtcctgtgtgttctcttgaagaagagtccatctctcatgctttagtctgctgcccgattgctaaagattgctgggacagggctggcattccctcgattatgcagcaacaacacagttttctggactggtgtataagcaattttcagagaatggaaaaggaggatcgtgagctgttggtggctgttgcttgggcaatttggaatgcaagaaatgaccgtgtatggcaaaataagatcaagacagtggaaaatattgttacgtcagcaaaaggttacctttcacaatggaagaatgctcattcttctggtttagagctcttatccgctggtttgaaccaaggcgacagagctgagcattgggtgcctccaattgaaaataatgtaaaggttaacgttgacgcaacgatctttgaagcttctcgagagtttggtgttggttgggtagcaa

SEQ ID NO: 143245 - DNA, 676 bp, Cannabis sativa
tatatatttatatatatatttgattagagagaaatttgagaacaatttaagagattgtaataaaacaaaaaatacaattttttaaaaagaataatacgaagcaaaaaatataaaataataaataataaaaaaaattggtgcaaaatttatgaaaaaaaatatttttctattttttataaaataaatagccaatatttattataaaagaaattcaaagaatgatttattgtagtacatattatctataaaaaaaacaaaattttgataaaatatatatatatataatttaattaagtttttttattgtctgaaaaataaacaaacaagtaaatagaatcacacattataattatcagtaataaataaattaattaattattagtttaaaaaaaaattaaaaaaaaaagtaaataagagtgactcattttaattatcattaataaaaactaaatgagggcatagttgtaactatttttaaacataatttagaaagtcacacatgtcactcaattaggaagagagtgcaaaagagagttttcctaacactcctcatctaattattattatcttattgatcaacattattaatttatattttgggatattggcggctaaaccacttgaactttacggtttgtaacacttaaccacaaaaattgaatttttggcggctaaa

SEQ ID NO: 143246 - DNA, 563 bp, Cannabis sativa
cactgaatcgtatacaacggccagcaaccttagcctaaaattctcttggattgggctggtatacttccctcaaaagtaggctatggacaatttggaggtggaaaacaaaatcaggtatatccaaaagatgaccaaattgggtgtcacagatcatagccaacaaattgacagacaaagtattcttaatattatcaagaacagagaaatactcgtacaaacacattttgatctgtagaaattagagggactgaatttattatcccagacctacaatttaacacacatggcaaatataaacaaataatatatgcaagtagccaaactataacaaaactattaaacaactaaaaataaactaaaatacagaaagaactctttgaacatcaacatccttgacaaaatcaaatttttacccattgttgatataaaaacagacaggaaacaagtacaagaaataatattcccaaaaaacaacatacagaaagtgattacacttttaaaaaactatgaaaaaactaaaacaaaatgagaagagataaaataacaaaactaaaatgaaaaat

SEQ ID NO: 143247 - DNA, 700 bp, Cannabis sativa
  modified_base (42)..(48): a, c, t, g, unknown or other
  modified_base (345)..(350): a, c, t, g, unknown or other
  modified_base (421)..(436): a, c, t, g, unknown or other
  modified_base (528)..(540): a, c, t, g, unknown or other
ttcagggggaatttttaatggccaaaaaagttcaggaggcannnnnnngtatatgtcaaagttcgggggaagggaggggaaattgctaattagccttaattttctaaggcccaaaaactatcttctaagactacatttgtaatatttttagcacattatctttctttcctcaagctacacttagccatattcctaggcagcctaactcagctgcccacaaattagctaagttttctctgtatgtttagatggggaattatttaacaaatacacaaaaaaaaaattataaaaatacagttttacagaattttaaatatttttatgatttttttattttatttacannnnnnacggtctttttatgttgtacttttattaatttgttgttgattttttgtaatctgtatgttattttttgttnnnnnnnnnnnnnnnnttagatgttattttcatgttatttttatgtaattttcttgttgtttctataagaaactgtaaaaaatataaaaaaaaattctttaaacgtannnnnnnnnnnnnttttacaaaaaatagtgtcttatgtaattatcgcttaataataaagctatttaggtaggagatgatccatatctgtatgacttgtatactggatgcttagtcgtccgaactcacttgtcagcaagatttttaaagctaggtactaccgtaatggtacctt

SEQ ID NO: 143248 - DNA, 907 bp, Cannabis sativa
tttacttcattcataatcatcttaagatcactattgcttactaagaccctaagacctaaaaaagattttgatatgtaatctagtaacaacaaataagtcctacaaacgatattaaaaaatttcctttaaaaataaataaaataatgaaataagcaacgaataatgtttttaatgtacccactatgattaacctttgagaggtttgctcaatgcagcatggattataatattttctgagaatataacaacacctaatccaactattctcgtggtgctcaatagcgcaaaaaattcctttacaaacttttatttctcatgaaaacatgaaacaattaataatattacccccaaataattaggggcaagctataaaaataagcacaaaagccttaaaaggcatccaagccaacaaaattgtggtgcaacaaatcttcacaatgtataaaatattaattcgctaactatttgactaaaataattatttatagaaaataataatataaatatactatttaactatgatggttacatcttttttataataaatattcaatttaactaggatggttatatttctttcataacttaatatataaaaattctatttttagacttgaattaattttaattaattatatatttaataataatagagtaattttaatatttgtaaatattttctttcatatcaaaaaaaaattatatagaaatacaggtagtttattaattatttttaattaatttataaattaattgtaaccgtttaataatactcaaacgactacaagtaaatgtaactgtgatggtaacatatttgattaaaccataattaaaatatataaagtgagtttattagctaaagtgttgtttggtaacacttttgtttttcaattttttaatcacaaaa

SEQ ID NO: 143249 - DNA, 521 bp, Cannabis sativa
cctagtaaaacatattccaacactctagagttggtgcccatacggagagatcaaaataatccctgctctgactcctttctcgttttattttagtgtatttatagcacggagtttggtagaaaatccaaaattgtcatatgtgaatattaatcactgttttgggataaacacttattggtttatcgttattgtgacatagggccgagatcattggggatagttctccacttgggttggccaaaatgtatgaacttggattaaaggtaagaaaatatattgtactacatagaacattgtctgtaatataactagtgttgttataaattgattaatattgagatataattaatattgttatataatgaaaagactaatcggttgagtaacgataatgtgattatattatgcatgtgatatagtgtcgcacctgataaggtgatgcaatttttctggcgacgtactaggcgtaagtacgggcgttagtgatatatgatgagtactaagtgtaggtacgggctcac

SEQ ID NO: 143250 - DNA, 637 bp, Cannabis sativa
aaagttcaaatcatccgccataaaagaaatatagtattttgaactttctatattttttaaatatgtatataaattatataatatataaactatatatataataaatatataaaaaaattctcttaattatcaggttggtcaggttagttcgggttgattgagcgggttgatattattttcaaccaacccaatataaagattgggcaggttatatttttgttatatttttcggtttgcattttttgttaggttatttcagtttaatttgggcggattgttcgagttggacggtttacaaaaatttatgtacaaccctactttcaacaatggagacgagtacagataagtcctaatctttacatcatagaattatgtgtgacaataaattttttcatattttatttaatatttgatattaatttttttttaatatttggtaggtgttcttttggtgaaatggaagtcacaactctcaagtttgaggttttcttttctcatattaataaggtttaattgcctaattgggtatttatgcgtgaccttatgatagataatgaacttttatagatggaagaaaatactctatttttttttttgcttaatgttgttatttttgttattttaacctttatcagtt

SEQ ID NO: 143251 - DNA, 948 bp, Cannabis sativa
  modified_base (64)..(73): a, c, t, g, unknown or other
tcgatccttattcatagtgtatatatgttgacttaattccgcactttatatacgcatacatatnnnnnnnnnnatacatataaatgtctaacaatgaatacatactcacctgattcccaaataaattatatttaataatactattaaataattaaattaaataatcatttataattattatatcactataagaaatgtcacttttgcaagcacatttttatcctggcaaaagttagtattgcgctggtaaaataaaatttacttgtgatgtgttggcaaatcaatgttggtattaaaacttttgccagcataaaatgaaaagccctggcaaaaataactttttccagagcgtaaatccactggtaaaagttagatttcaaccactgtgtaaaatttgacttctttgccagcgcagtttgcgaaatgtgctggtaaaagtagcgcagtacactacaagaaatgtcacttttaccaacacagttcgctactgtactgtaagaaattaagatctcatgattttttttatatggaagatctcatgattatttatttagttatgtgaattttaaaatttatatattacttatttaatttgtataagtatgtaatgtttaaatatttatataagtaaatattcaatgataaatatttttatatagcatttatgttgttaatattatttaatgaataatattttaatttaaatatatttaatattaattaatttatattattatttaaaagaagcaaaaattaatttatttaaaaaaataaaaaataaaagtattagaggcggacacatccgccgctaataatactatcacattataaatctgacactattattagcggtgggagtgtcagtttgccgctaatactgattattaacgaccaagtagtactggcggggcccgccgctattaccctttacccgcagattaatggatt

SEQ ID NO: 143252 - DNA, 1064 bp, Cannabis sativa
aagaagtctgccacatttttgaagtattgatgcaaaggcatcaatgccccttgctgaccatgggcacccgaccaggcgcacatccccctttcaaggttcgtggcacgattattgtaggtggaaatgtagcagtctaagtcgcctaggtatccatcctggtcgagagaccgaaggcccacctcagtaaccttgatagagggcttacccacctagcgcccaaggcactttgccttctatgaggaaccgcagcagcaagttcctcactgacataatccacgcccttaaccaggacatctccgttagcatcaactggctccccagcctcgttgtactccccataatttgggggttcaacctctgcctcttcctcctcggaggaggaactgccaggacatacatcatcctgcccctcaatctcttggacctcagcgtccccttcgtgatccccctccacctgggcagctggatcctgttcggcgttgggcaaagtggcgtgccgagtcactcgaggattagatgtgtcagccagatgcgtggttttctttgtacgagccatcattctatggctgggtacatggtttgaattatgtcctttgctagaggaaggtgggctagaacgaagacagggatgatgctcgtgcagaagttgaagcaggtcctgatcgatctgatgtctgttctcccaagactcacttgagttcatctacaaaagaccacacacaagatgagtgtttggtcagaatatcgaatgctaaacaagcaaatatgctgaccaggagtactcaacagattaaaaaacggttatgtttgaagaaaactcaagttagggcaaaaatatttctcaagttagggcaaaaaagttcatgaagcttagaataagcaagatgaaagatagacgttacgcaattcagaaacaagtattatgactgcaaaatcgcacgaagacatgataaagaagaatcgcagaggattttggacctagggtttcctaaacattttctacaacaaagtagaaggtgcatttgacatataaacatgcaaagataagcataaaggaaaccaga

SEQ ID NO: 143253 - DNA, 551 bp, Cannabis sativa
  modified_base (52)..(71): a, c, t, g, unknown or other
  modified_base (204)..(223): a, c, t, g, unknown or other
tcccttccaatgcatactccttgcatccaaccaatgccctggaaaggacatnnnnnnnnnnnnnnnnnnnngtaaactacattgtagattatcttattagttaagccctgtgtcttgataaatcataggaatatatttaatcacataatgttaattactttccactgtgctgacgacataataaacaagaatatcaatgtgatnnnnnnnnnnnnnnnnnnnnaaatcaaataaacatataaatgaccacatgaactagatgacatactaaataagtaatgaaaatatatctttttctttattaataattgaatagaaaagattacattgaaatatagttttatttagggcacaaaacccatcaaactcccacttgcactaacataaaacaatcaatatatttcaattaatcctcaattcagtttgtgcttttcaaatgtagttgcagtcaaaactttggtgaattgatcaactaagttgtcttcagtatccacttccttcaccagtactgttgggttttatgccctaaataaaactctgtttcaatgtaa

SEQ ID NO: 143254 - DNA, 874 bp, Cannabis sativa
  modified_base (564)..(577): a, c, t, g, unknown or other
gaactaaaacccaaactcgaacttagaatcgcaaatggaactagaaccgaactagcactaggactccaacccgaacccgaacgcgaacccagatcaaagcccagatcataactcaaacccgatcaaaaccccgacagagtcctaaacccgaacttacactaagactccaacccgaacctagaccggtaccaaaacccacacaataaccgggacctggacccagaatgaggatagggacctgggaaacagaactaggactaggacctagtacccaacccaaaccaaaacttgaacctaggacccaggttgtgactcggcaccagaaatggaacaggactaggacccgagattgggatccggatatggtccaagggattggacaaaacccgtagcgggtgtctggacccgaaccttgacaaggacccgaacgcacacccggacctggacccagtcaaaaacccaaaagtggccccgaacccgtaccctgtgacccaaaattggaaacaaaaccggaagttgaccaggactggaacaaggacttggacttggaatcataactcaaannnnnnnnnnnnnnagaactgtaactggaccaagacccgaactctaaaccagacctagacccgaatggggagccggacttgtataccaacccaaatcttgactcgggacccgaacccaaacctcaactaacaccgaaacatggaaccagacgactagggacacataaccaaggtcgggacctagaaccgcacccaagtctcgatcccgaacccaaactcagaaattggagctgggacttcaaccagaaccagaccgagacctgtgacagtgatccatatcttgactcgggccttgaacagacaagtagtcg

SEQ ID NO: 143255 - DNA, 791 bp, Cannabis sativa
  modified_base (279)..(283): a, c, t, g, unknown or other
aactagggctgtacgaaaaaattcgtaaaccacccaaaccaaaccgaaaaaatcgataaaaattacaaaccgaaataactcgaaaaaattataaacccaatttgttaattgtggggttaaaaataggtccaacccgcccaattaaaccgaatgacctgaccaacctgattttgaattttatattattttttactttttagtttttattatatataacgtaaataattaaatatataataatataaaattatatacttaattgttagtttcaaagtcatnnnnnttgtgttgtgctttggtggaatgtgtttttttttaataaatctttttaatttttattgattttgactttgaaaccaaaaaaaaaaaagtttcggttaacctgcccaaacggttggtaagtttacaattttttttttttttttttttaaattggatggattgcacttaaattttaacaatccgaactttaaattgggttaggaaatatataggataaatcgtccaaaccgaccgatatacagccctactcaaaactatatgacaatgaaaggaatagttctttagccttatatcaactgttttttcttttattattattttatggatatggacacacatgtattgtttggaaaattctttactttaatatgtgggactaggattgcacacattaagtcgaacctcatcaccaaataaaataatttctttccattaaagtcttgatttttagttttgtcaagttggacatttgagtacgatagaaatgtcaagttttttttttttttttt

SEQ ID NO: 143256 - DNA, 1082 bp, Cannabis sativa
  modified_base (402)..(408): a, c, t, g, unknown or other
  modified_base (939)..(943): a, c, t, g, unknown or other
  modified_base (1020)..(1034): a, c, t, g, unknown or other
taccatcaattgtacttgaagaagcagcattgttagaagcttcatccttaatccttttcctcttacaaaagtttgcaaaaccgggaggcggtattgcaatcaagttccgttcatgagctcgcaattctgcttctagcttatccatgtcgggagagttaaaattgttgatcatctaagatacaacaaatccattatactaaggaggaagactattaagtatgaactgaacccactgttcttttgataatttattccaagcaagtttgctttttggaatatcagattaatcattaacaggtgtgagttaatgctctttccaggagcattttcacattaaagagttcattgtcaaaggcattgactaggagtgggttggggtgtgggttgttcattttgacactnnnnnnntcaataaacagaagtaaatcatttggttcaatacattcacacacaaattcagaaaataacaggtataacataaatgtttataaaaataccaaaactgaaactggtatagtgagattttctcacctagaaactcgagaccagactcctatttgaaagacacgtgtactcaatttccccaaggaaagatgagatgtcaatgagagactcctcaagctcaaacctcgcctgaactagactcagcgagatgatgcagatatgaccaagtataatcgcattcatatgactcgcattatgtaggaccaaggaacggatttaactcgcatataccaagatatctgtgagtatccccacgagtggggctcattaactggccgaccatcaagtttatttttaccctatttttgtcatttttttatttctaataattcaaccctaaacctattgaagaatagtataaaaggaaggctatggtctctttgtccaactaatgcctccaaagctagaaacctatctttctgatgagacctcttnnnnnttcttcttcctcttgaatttttgaaaaaacactaatcctttcttcacaaatattattcagccattagtgatagagtnnnnnnnnnnnnnnntcaagttggtcctcaatcatagtacgtaagactatgaagaatccaaac

SEQ ID NO: 143257 - DNA, 691 bp, Cannabis sativa
  modified_base (32)..(47): a, c, t, g, unknown or other
gtatatatgcgccctgtgaagtttggagtgannnnnnnnnnnnnnnntagtgtttcggtgagtgcaaaaattgtaatttttgacttttatagtttttagaaattcctaagagatcagaaatcgtatttttgtcataacttttgactagggtgtccgttcgggacattctatataccgtttcaaagcttattacgagctctataatatggtgtatattttagagcaaaaacataagttttattttagtgtatttataccgcaagttttggaagaaaactctagattatcttatttgaatattaagcagtgttttaggataaacatttattggtttatcgttgttgtgacatagggtcgagatcatcggcgatagttctccacttgggttggccgaaatgtatgaacctggattaaaggtaagaaaagtatattctacttcatagtacgttgtgtaatacaattagacattaatattgagatataattaatattgttatataatgaaaagactaattggctgaatattgataatgtgatgttattatgcatgtgatatatgggcttacctgattaggtgatgcaattttcctagcgacgtattggcgtaagtacgggcgtcattatatatgatgtgtaccgagcgtaggtacgagctcacctgattacgtgatgccattttcctggctacgta

SEQ ID NO: 143258 - DNA, 610 bp, Cannabis sativa
atatcctcctcttgctgcatacacccatcacagttagcatctaaggacattcctcgcttcctcaattccaccttagccgggatacaatggttaaacactttccaaataaaatttttcattttcggagttagccttgaccaccaaatgaacttccaccaagcttttaatttggaattttttgaacatgccgccaaatccggattactaaatcttaatttataaccactagcaaccgagtaattcccgttgttagttaaatcccatgtaatccaatgtggttgatgaatagaagggatgatgccgagaacccatggaatgtcatctttgtgaaaccaactactcacttcattgattttccactctccattagcacacagcaacgaactaagagtgacatcttgtggtattggcatcttggttcctgaaaaggaggttgtcgaggaagccatgaatcatcattaattcgaatattgcgcccatctcaaacacaccatctatacccctttgttaacagctcacggtcccaaagaatccctttccaaaccgaagacccaaaatgacccaatttggcctcaaagaaggtttcgttaggaaaataaagggctttcaa

SEQ ID NO: 143259 - DNA, 1097 bp, Cannabis sativa
aacttccctaaatggaaagagaacattaacattgctctcattggtgaaggtgccctgtttgtgttaattgaaccgtctcatgagcagcctggtgacagtgcaaccaaagctgtaaaggagaagtacaagtgttggcagaatgctaacaacaaagctcgatacttcatgctttccaacatagttggcaccttgaaaacaaggtttgcaaacacagtcacggctgcagaaatcatgacagagttaactaatctattcggaatggcatcaatccaatctcgctttgaagcgacaagaaaatttatcaatgcacagatgagtcctcatcaaaatgtgcgtgatcaccttctccagatggcaagttatttccaggaagctcagaatcatggagctgaaatggatcagacaactcaagtaagtctaatcttgaatagtctgactccagcctttctgccttacacttcaaattatgccatgaataagaaggaacaagactttcacacgttagtcaatgaccttgagacttatgaaaatttgattggaggaccgcagaagaaggggcctaaagctcataattttggaaatggtaatggaatgactaaagctgaggcaaactttccctctacttccaaacccaagaacaagatgaaatgggagaatagcaaaaagcctgttcaagctgtgaaaatagttaaaaagaaaaaggctgctactcctggtgatacaccaaaaggaaaatacttctattgcaatgaaaaaggacactggaaaccccaatgccctaaatttctagcaaagaaacaaggtatttcttttcccacaaagtgatgtgttttagtgaattattatccacttggattattaattcttgacctactaaccatgtttatttgtttttcttcttatttcagctccagctgcttaaactcagatgctatcttagcgagttgaatcggatggttcgacaaaagggtggagatagtccaagattaagatgaagctcaaattttttctttattatttttgaattaattattttagtttcaaaataatttggatttcaattattagtttttgattttattccatatttttcatat

SEQ ID NO: 143260 - DNA, 810 bp, Cannabis sativa
  modified_base (357)..(358): a, c, t, g, unknown or other
  modified_base (678)..(684): a, c, t, g, unknown or other
aatttacataaaataaaataaattctgaaaaataattctaatttatgttgttctaaaattaattaataaattaactttcaacacaaatataattttccgatttaattcaatttctaagaaaaaggttaattattcaagtatctagaataaaatcaacttaaatattagttttctatttaattaaatataactagaaaaataccacaagtttatagaaaataactatctagatatttcattaactaattacttattttcttattaaaatgtaatatattttagtctatttattttaataaattattaatgaaaaatgtacttgatttaagttggtttaaaattaattaaataattaannttcaactttaatctatttttcaatgggaacatttcaaaatattagcatttaaatgaaatgcaattcgaaatcatgtataaaatgattaataaaataaaattaaatatatttcgaaagttattctaattcaagttgttctgaaataaataaaatttccaacttaaacataattttctatctaattatatttgttgaaaaataactaatatttaagtatctagaataaaatcgacttaaatattatttttttatttaattaaatatattaaataaaagaaaaaaataattaagtatctagaaaaatattctaatttaagttnnnnnnnaattaattaacaaattaattttcaacttaaagatattttttaattaattaagtatttgaaaatataaattagttactagaaataactatctagaatatgtctcattaaactaagtgtttttctaaa

SEQ ID NO: 143261 - DNA, 710 bp, Cannabis sativa
atggaagagctcttatttcggtaattatattagtttactgaaatatcatttataagtagctaagtgttttaaggataaaatacatcgaaggataaaacataaaattatttcctactcaatgtaaattatacatagaggatctttaattatttagattgaaacaatagataattcatatatagtgtgtctgtattggatatatagagcgctctatttaattaagagtgtgattctgaatctatagtagagtcagaagaaattaataagtcagggaattaatttacttagtaaattttagaattacttattgtgagcttgaatttataggcccaatgtccccacattatctgggataataatatcttgtagactcaattaattgatttaataattaagtcaatcagaatgagaaaatagagtatgtcttatttcaaaattttcactaagttttagcaaatttgagaagaaaagagaaataaaaatttatttgttaattaagacactttgtgggtctaattaatacatatatttaattttttttataattattaaaataaaaaaaatgtatttaaataaatagttgagataaattgtaaaatttgaaaaagggaatttatttattatttttttttttgaaaggtaaaatcaacttttattaaccttcgaaatcagttaccaaagtaggcaacaactcagttggaatattttcc

SEQ ID NO: 143262 - DNA, 633 bp, Cannabis sativa
ccacagttctcctagtacttcaattcccctcagtatggtggccaacctcccttcttcagttaaccttgctactttcgtagcttctgtcatgaatctgcttatataggctctgagaggctgtcctggtctttgtatcacttcgaccaagtcttctaaatgtaatgggagtgggcgagaagaagagaattatgcatggaactctgaggagaaggctttccatgaattaaaccttcatggtggtaacttaaaataccactgctgtgtagcttctgaaagtgtagcagggaatactctacactgcacatcacctcgtaccccttgtaaatccatttgcatttcaaaatatttaagatgtgacaagggatcctccttccctgtgtacatcttctaggtcggcattttgaacctgaggggtagctccaagacgttgatcttgggagtgaagggcgatccgcgtgctcggtctaactcgagataagtgagtttttggctggccaggccttggaacatattttttaattcatctaactgtgcctacatagatgggtgaactacttcagcctcttagtcgacctgtttcacatcaggatctcttagagttgggtcctggatgcggatactgggttgaacagc

SEQ ID NO: 143263 - DNA, 516 bp, Cannabis sativa
ctaataatgaggtcgaatacgaaggcttgatagtaggactgagattagcaaaagccgtgggggccagaagaatagaagtctacagtgattcacaactggtagtgaaccaagtatcgggggaatatatcaaatgagcggagaaaagatggctgcgtatgtagcaatagtccgggaactgctccactagttcacggactacaaagtagaaagaatccacagagaaaagaacgctcatgtagactgtttggctaagttagcctcagacactgaaattgagaaactaggggtagtgcccgtggaatgccttgcggaaccaagcattaaagtcaagagtaccataacaacagttgaacaagagctcaactggatggtcccaacatcgaatacataacgaaaggcgacctgctcgaagaaaagggactatccagaaggatacaatatcaagcgcaccgttatgtgatgatggacaatattctctatcgaagaggactcagcatgctgtacctaaggtgtgta

SEQ ID NO: 143264 - DNA, 649 bp, Cannabis sativa
cctttatattctcagtaatttcctcttaaaaatataagaggaaagatagatatataaaaatgttaaaatatttacgaagataacaataaataaaacaagaaaaacaaaattaaagatcaaatttaatatccagacaaattaaaacacaccttataaaaacacattcttcattagtactaaatgttgtatttttagcagcactctttggcataatctatactaaacttttattagagacaaataaaattaaataaaatttagttgcacaatttttgataaggtgcctgattttattaccttggaaaaagtcagtcccttttgataaggtgttgatgatttcctttttttgtacttcgtgctatactttctcgccataccttgcacttgaacgacaaatacaaccatgtcataaaaaattatatttcatgtaagtttcatatgtattgaagtgtactacaacttcatatggcaaacaatccatctaataaccacaaaaacttaacaaaaatttatattacttctacacatgtaaaagtcttaaaatgcaaaattaatgtttcaattttggctgactggcctaaaggttagaaagtttcaattttttcaattgttgttgaaatagtttatattgtttgttcttatgtcattg

SEQ ID NO: 143265 - DNA, 890 bp, Cannabis sativa
acctgagaagattaatcaagacaatatcatcacaataatattgatcactaacaaaaaaaaaactgaaatgagaaacataaaaagccacacataattaagacaacaaaaatatatatatatatacagttacaatcacaagaaaaaaaacataaagtgggaagttctaacaatacacaaacttgatgaattgaacttgcatctatactatatcatataacatatacatgaacaataaataatcaaaaaacatgaccataaacagaattactgtgtacttaaatcagtagaagttctaaaattatcttagttttttctattaaataattaaatataaataaagaaaacatatattaatgaaactgagaattaacataaggttatcaatccataaaaacaataataaaatcagtatcaaaagtttaagttattttttctcaacgtcatcagcgtcacacaatttgttttaaaaatttgatatccctcctctaaaagtttgaagagacaatagtcttttaactgcacataaacaaactttacattagtgggttgaaacacaaaataaatataatattattgtaaatttatattttatttttactacaattaaccaaaataagcatcaatacataagaaattatagaaaataataacaaaagttactataaagaaaatatttccaaccgaaaaaaactaaaaaaaaaaattaaaaggacttattttgtcaaatataattagtgtcggtagtagatccacgagcatttattcaatcatttaaataactattataatttcaataacattaataacttcttaacttaaataatattaattctctgtactttaaaaaaaattgaaaaaactacaataataataataataaagatcggaag

SEQ ID NO: 143266 - DNA, 1048 bp, Cannabis sativa
tagggcataaaatcccaataatatttatgtctaatcaaaatatgtgtgacatagaaattctgtggtgttatgaatataattcggagttcaatgtaaaagttgtttaaactacatgtatcaataacttcttccactcgtatgtgttatagagattctgtggtgtttttaatatagtctagagtcaatataaaagatctttgaattgaatatatcaataacttcttctgctcctatcagatcacaagatcttttattaaacaaaatcttaaaaactgtttaagaattggcaattattcataaacattgatgataaaatctaagtgttgatgtggtattatctcattgcagagattactataccatagattttgtatcattaataaatacaaaatatatataaaaaaaacatgataaatatatacatataattggtattgacatacaagttatagaatataaagcccaatttcataaaagcaactcatgatgaaatcattttaaagagaaaaatattatattaatactctcaaaaatataacaatgaattgtctgtaataatatgaaataggaaataaaattttcatactaaaaaaaaagaaaactaaattgttcgataaataaagcaattatttcaataattaaagaaaaaacaaactttatcttcaatggacaatctccacccttctgtccaactatccctctcaactcgctaggataacaattcaagttaagcagctgaagctgaaataagaagaaaataaacatggttaatagatctagaattaataatccatgggaataataattctctaagacatatgaattcacaacaaaattagaaatatcttgtttctttaaaaaatatttattataatatattaataaggtaaataaattttgaaaaaaattctttattttatagaaattatttttttaataaataaaattatccaattggatgaggtaatttcaatattataaaaagaaaagaataattttacatttttatatattatggtgtcgtttggtaatacatttttttttctaa

SEQ ID NO: 143267 - DNA, 886 bp, Cannabis sativa
  modified_base (45)..(53): a, c, t, g, unknown or other
  modified_base (128)..(142): a, c, t, g, unknown or other
  modified_base (225)..(228): a, c, t, g, unknown or other
  modified_base (621)..(621): a, c, t, g, unknown or other
taaaaacatacttgttagtaaatatagatcttggtaaaatatatnnnnnnnnntggcctcagagccatagtaattgatttgctttcaagtaatatggatttacaacgatgtatgtgtgatttggatgnnnnnnnnnnnnnnntatgtgtttattgatgattgattgatgtttgcgaaatttttacataaaacaattggatttttgttctggaattatttttattnnnnagtatggaaaaaattaagctattcacttttgtacagaactcaattttgattttatttgaattagttatgatttttgaaattaaaaaaaaaacaaaaatcaggaggtgtgacacctcctatgcgcgcgcggatccctcttttctcggatgtgtgtagcttcggacaaggctcctgtccaagttttctcggtcagaagggcagatctgtctgaatttggggccatgcgcgcgcgggacaccttgctgacagcctcctcgccggaggtttctcagccaacccctccccaggacgcgcacggatggtatgcatttgcataccatctgtatgcaatgcatatgtaccaaatccttttttttttttcatttttcatttttcattttttcatgctttttnatggaattaatttcgaattttttgtgtagttttgcatttagatttttatttttcatatttcaaatctaattatcagatttaaattaattaatttttttaattaatttaagatatttgtagtttttgagccttgaaaataggtaaaaatctatttttttttttgcttagttggttagcttattttttaaaatttgattattttatattatttttaaatttaaggtcagatatttaatattttaaattatttaattaattttataaa

SEQ ID NO: 143268 - DNA, 751 bp, Cannabis sativa
gttacttctgaccaaacatattatttagacacaaataatttaattttagtgacaataaattttgtgactaaaaatatatttagtcacgacaaattgtgaattttgtgtctaatatttttagacatagactttttagtcacaacgtaagaatgataatttataattagtcacaactttttcacttttagtcacaagttttgttgtgactaaaaataaaattttttatagtggttgccggaagaaattatgtatcctcttattgacaggttacttacgcttgttcttactcttattgatagaacatgcattgtcaatcataaaaattatcaagacaaagcttagaaacaagatggaaacaattttttgaatgattgcttagttgtttgtcttgagaatgatattactacaacatttagaaactttatacaaatataaatatagataaatagatagatatacataatataatttaattaaatcttaaaatatcttctttattttaattccaataattattataatagaaactttattatttatgatttaaaattaggactaaacaataaatttcggagcctcaaacctcaaattttatcttccaacatatataccacattttgtaaacttttgaaaaaatatcatagtcatcaatttctatgaatcatctcttttctcttagattatatataataatatatataaacgatatgtaatgcggaaaaactatacatatcgataatatatatacaat

SEQ ID NO: 143269 - DNA, 967 bp, Cannabis sativa
cctgattatgccttgcccacataatcttattcatataaagacaatccatatattatgttccttcagtggtttatcttgatgatgcatatcaggtcttacctggttatgtctcactcgcataacctttgacatatattcacatgttcaatatcttcaatgtatactataatatatgaaatataagggtaataatcctaacttgcatactaattaatttcccatataccatactctatagcatgcacgaaataacgcttacagaggataataaccctacttcatgcttttacttgattagcaatattattatacatcattgtttccttacctttgtatatatcctagggtaataaccctagaccacattattattaacttaggatactaatttaccaagtctaacttaattatgccttgagcgcataatcctttatttcaacctattaagcatggtatgacacttaaaatcatttaacaagtagggtaataacccaaggccagataactgctcacgttagggtaataaccgtaatcccggttcttaattaatgacatccatataatataaaacatgagcgccaccgtgcttagctctacgtgcaaactactgtcttacctgatgtcccacaaatgtcgagattccaaatcctcgggtgttcctgagcaagcatcagtagtcctagtcacacattcccaagatttcacaaataggattaatcctaaaattcactttcaataatcacataattaccattacatttagagattaaaatatagagctccaaactagctttccaatgatataaagaacgtccaaaacggagtcccgagtcaaaaagtatggccagaaaaaaattcagccttccccgatacagtccagccagaattccagttggagcagccctgaaccaaccagaattccagttatctgggcagaaacaacacgaaagaatatcaacttttaagc

SEQ ID NO: 143270 - DNA, 641 bp, Cannabis sativa
catccaccagacgtagagcatgcaagtttccgaacaaatatggggctttatagctacaaagtcatcccgtttggttttaaaaacgctggagctatgtaccaaagattagtaaacaaaatgtttaaagaccagatcaggcgaaatatggaagtgtaggtggatgacatgctcgtcaaatctagaaaagtttggggtcacatagacgacctggacgaatgcttcaaagtcctcagaaaatacaacatgaagttaaatcccttaaagtgttccttcggagtcagctcgggaaagtttctaggctttatcgtcaatgcccgaggaattgaagctaatccagaaaagattcaagccctcctggatatggactcaccaacaaaaacgaaagaagtgcaaagcttaactggtcgtatcgccgccctcagcagattcgtgtcaaaatcaagagacaaatgtgtcccattcttcaacatcttgcgaggaaataaacagttcgagtggatagaagaatgtgaaaaggctttccaagagctaaaggcacaacttgctgaacctcccgtacattcgaaacctcttgacggagaggagctgggaatatacttagctgtcacagaacatgccatgagtgtcgtgctgatcagaga

SEQ ID NO: 143271 - DNA, 1450 bp, Cannabis sativa
aatttgtcccttgtttgtctaagttgtatattgcgacctctgagcaatggtttggtgacattgagtttgactctgaatcgaagaaaaggaccccatccttcttctaaagaatcatcatgaacctccagaaattcaccaatgatatttcccaaagctttggctaaagttttggacttactcaggaaaggcagtctataacattggacccaaaatggagaaaagataagatcatcagaagtgaccttttgcagaacacttggcgtgtacaacactatgtggtggttttgaaagtggtagggctccttgagaaggaccctttttttatctccttcacaaccaaaagaaagtacaaacatatcaggtggtttttcagtaattgtggtttggaatctaccattccaatggtctttcatttgcttttggaatgtggataaaaacacagactttgtggtgagaactcttgcaactaacacagtatccagagtgccatcttgaacctctacatcatcaaggattagaggaggttcatcttcttcaacaatagtcatcttgcctttcattttgtcagtgagaggattcatggttcaggcaaaaattctgattgtttttggattgaagggagcggttacagagatgcaggaagcaagaaaaaaggaaaaaaaccataaaggacttcttaactgcctcagagcacaactaacggcagactgctctcaaaaatccacgcagaggctttgcatccaattgatttggtttcaagtatttttattttattttattttagtaacttgttagttagttttgaataaaaattaatttagtatattttacttagttttaattaaatttcttaatttttgaatttagtttttttgattgattaatttaattgtctctatgtggttttgtaggagtttgaaatacaaatttttggattccttacggggaaattatagcgaatgactccaaatcatagcactatgtgaataaatattctcattttaaaatttgtagagaaatgatccttttatactatttattatttatattgtcttttgccacataaaatcaatatttttttcatattttttttagaattagaagaaaattacttaaagcttatgatatatcgatattagttttaatttttttttttaattttaaagttatggtcaattttttttaattttttatgggttattgtgggttgttggcacggccggctaataacctgtgcaacagggccccaaaataataggggactattattattattattattattattattttaaaaatataaaaaaaattgttaattaatattgagaataggaaaggttgttgttggtagttttccatagcataacattaatattaatgttatgtacaattattatataaatacacaattgacattcccattttcatctcattcttcctctttctctca

SEQ ID NO: 143272 - DNA, 556 bp, Cannabis sativa
taaagattgagttatactcagatcataagagcttgaagtatcttttttcttaaagggacttgaacttgaggctaacaagattggttgagtttatggaggactatgagatttcacgttgtagtaccaccccagaaaagctaatgtagtagctgatgcactaagtagacaacctcatggtactttggaatgtttggctcttgaggactggaaaaggaaaatcacaatgggtgattataacttgcaatactatgaaggggaagaagtagcttgtatctctaacatagtggctacaccactgctacttcaacaagttaagcaacgtcagtggcaagatgaaaagctaagacttatttggaactgaatctaggaaagtgagcaactagattggtggacagttaatggtaaagggtacctataccatatgggaaaacttgttgttacagatatccctgattcaaaggagtccattttgattgaggcccatagatccaaatttgttgtacatcctggatgttcaaagatgtacctgttggaaatattttaccaggatttagat

SEQ ID NO: 143273 - DNA, 716 bp, Cannabis sativa
ccagaagtatgggctgaagctgaatccaaaaaagtgtacatttcgagtttcttcaaggaaattctcatattttattgtcagctctcacgaaattgaagcaaatccagaaaggatcggagctctcctagacatgccttcctcaaagatacacattagattgatttttagttattgtttagttagtgctggatttatgtgcagttgtcctatatatatagtttatgttttacatattttaaaatacagtaagtttgtcgatgtttttttttcttatttgttctgagttgatctctcgttgatatgtgatattgcagtggtgttgatatcatgttattctttcgttactttttaattttttagttgtttaatagtttatttatagttaattcttgattaatttgtatattgatgtacttttgatgttatattgtttttcagttttgtttacactatttttctaataaaaaatattatatttttgtaattttaaaattttaaattatttgtttttgaaaaattaaatttataaaaatgtaaataaaatttataggtcgtaaaaatacaaataaaacattaaaaaatattatgtaaaaagaacataaaaaaatgtatttatgaaaaaaaaaaattcttttgtttttgtcattgctattttttttttttttttgggaattcagtaagtatattcattaactataccaatttacaaccaaaga

SEQ ID NO: 143274 - DNA, 941 bp, Cannabis sativa
  modified_base (26)..(34): a, c, t, g, unknown or other
  modified_base (566)..(569): a, c, t, g, unknown or other
gtatttttagtatagcggggcaatannnnnnnnnattgggaatgtcgggaatagtagaaattttagaggtgaccaacatacccctaagtgaccttttatgttggttattgtgggaagggtaaaatagtctttttgcctatttgtgttttgtcctttagtggactttgttttagtttaataatctgatttttattagttaaattagctgagattaatttttaataaaacaatctttttattcatttatacaaaagttggataattcatgaaaaagcaaatctctctctctctctctctctctcaattcctagggctgctagggttggtgtttttcctgtaattcttgtgaatctcagttggttgttagtgatttaagccaaggtaagcctttgagtaactccctttggttttcttaagtttcaagtttagaattttgcatgattttgggtattacagttctgtagctaccgttagtgtttgatattgttttctaaagtttatttatgattagaaatgttgaattaagcatgttttgatggctggtttgttgattgagcaagctttgnnnnttagaactcaagcttggctctttaatggtgaaatttgattttgagcttgggtagttgttttattgcttggaatatgtctattggggtataatatctaggtctagaaggtttggtaaagtttggaatcaatttggttaggttttggagtttttttaggtattctggtataaaccggctaaccgattttacaatgcatgtaaaaccggttacccagatttgctgttgggttccccaaaaaattcatgttgtcaattcatgttagtttcagggctttggttggttaattccttgttagtttagggtattaccatgttaagtttcagtagacagggttttggtttaaaatctaagtccctggttgtgatttagcgt

SEQ ID NO: 143275 - DNA, 926 bp, Cannabis sativa
  modified_base (432)..(433): a, c, t, g, unknown or other
catataattattattattataaaaatcaattaaaatatattttaaaatattataaactagggaactaatgtattcacaatttttgtaatctttatatatactaagtattagtagcatcaaatgtatatttgattagagtaattaaattagaggtgtgtagaaagtcattcgattcaattacaattgactgataggggtgtgtagaaagtcatccaatccaattacaaccaaccaattcaatcccaatcgatcaaatagaatcgaatatccaatcataattggatcggatcatatataaatttgaaaatctaattaaatcgaatcggttgttggatgggacatgtgatccactgaataaccgaccaaaccgatctaattattatccagtgatcatctaattatatttatatatttttaaaatacatttataannttatatatttaatatattttatttgaaaatatatattaattgatttaatatacatttaacacatgagattaatgaaaaaaaatcttagatctaaaatattaattctcatcttcctaaacgctaataaaattgaatgaattttatttttagaggttttattatgagaccacaagaattaagttggactaaactaatgtttaatatgtatgttggattattaagttttaaattatgtttttttatatttttttttctttttaatgaaatcaacttaaatggtagataaaatagattggatgaatccaatacattctaataaaaaatcagtcaatgcatctaatggttggaaccgatccaatccaatacatccattggatcagattggattggatgactcaattcgattggattggatcggatgacaaaattcaataaccaataaataatatgattggatcggttgggtcgagtccaaattcattgaatgtgatcc

SEQ ID NO: 143276 - DNA, 537 bp, Cannabis sativa
  modified_base (253)..(263): a, c, t, g, unknown or other
tcaacatgaatcacatccaaatcatacatacatcgttttaagtccaaattcttgaaagtaaatcaattaccatgactctgaggccagttgttctaatatgttttaccacgacctagatttactaacaagtatgtttttttaacatcctaaacatgaactcctaaaatgatatgaaataaacacataaaaggtatgagaaaccttagattggttgcagtggaattaaatgactccttccactcatatctctaannnnnnnnnnntttctgtagcagagtatcaccaaatctaagcccaaaactccttttgttgtttggattcttcacagtcttacacactatgattgaggactcacttgctatatgtaggtatgcactcaattactaaggctcgaatttggtttgtgattagaagaagaaaggaagaagatgaagtctcataatcctagttgtcaaatagaaagaaactaggttttagcttttgaagcattaattggataatgagaccatagctttccttttataataatttcaccta

SEQ ID NO: 143277 - DNA, 511 bp, Cannabis sativa
  modified_base (391)..(391): a, c, t, g, unknown or other
attaagaaaagtcaagaggtattcttcatcagcatcttctaaatcatcttcatcaacatcttttgaatcatgttcatcaacatcttgtaaataatcttcatcaacatcttctaaatcatcttcatcaacatcttttgaatcatcttcattaattatttgtttattcgttcttttctcctcaatcgcccttctgacttgaggtaagagagcataaatttataaatttatattttactattattttaataagctatttttctcttctctcatttttaatattttattacagtataaatctacaaaataataattttctattattttaataattttttttttaaaaaaaaacactatatatactatcacacgttttattattattattattatnattattattattagggaaattactctatattctattttataacttctttttttcaaatttacggtttgggttgctacgatagtttctccggtagtttctatgtgggttgctataaggatt

SEQ ID NO: 143278 - DNA, 2265 bp, Cannabis sativa
  modified_base (366)..(368): a, c, t, g, unknown or other
acggccagaaaccctaaacaaccatctcgtaacaattccctagctgttagtactgagattactgggatccgagatccctgaaccaatccaacaaaaacgaagggttcttcgccttctagttctaagattaccatcttccgtttacaatcgatactgctaagtacttagataagagatccactccaagtataatgtcaaaattcgctaaacccatttcaattacgtcagcactcaactccctatcctcaattctgattggcatagacctaacccaccttttgaagattactaattctccgccaagcagtagggttccaaaaccctatatcataactatcatgcagtctatccaatttactaaagatnnnggctgccacataagaatgagtggcgctagagtccaataacacagagaagtaagagttattgctcgagagctgacctgttacaactgaggggctagcttctgcatttgcttaagttagagcaaaaaccttagctggagcgtgttttgctgcagtcttctgctcttctttcttaaactatgggcagtctctcttgtagtgtcccggaaacccacactagaaacacccttgctctctacactctcccagatgatgctttttataacttgggcattctgggtaagtgtatcgggtttcagagctaccctgacagttacctcaaccttagttcccttgaaacctcgtgttttgacttgagccaccggttgcagtaggtgcctttcttttctggtcagtggtcgagccactacctcccctactaatgcctgaggtaggaggattaggagccccaccaatgacctgagtccctcaagactcctgagtccactccactgcgcctttagctcgtagtgcctttcccaccttatcagcataggtggtattgtcatcaatggtgatcatcaggtcatgtcttatattcaaattcagtccgtctaggtatttctctttcttactaaaattggatgacactatttccgagaccaaccttaccaatcgatcaaactaagttgtgtatccagtaattttctttctaagttagttgagtaaattcttttcttttcgcacttctgactgcttcattatagtacttcgcattgaacaattcctggaattctccttggtcatcgtagtaccatcatgggtcagggataccatgtcccaacatactagagcgtcttcttgaaactgaaatgtggcacatgccacactatcattgtcgatgacgccgataaagttcaaaattctgataatagttgttagccactacttagctttcataatgtcgggacctcccaggaagattggagatgcctgcttgcgaaacctttcatacagtggttcctttcagttcactacaacgactggtcctgcctgcacaacagggggaggagctacctgcatttctagagcagggattgcaggagcaccctgctgcctttaacgtctgatctcttcctctttttgttaattctagcttgcattgttgtaaacctattttcccattcttgggcaacctgggcaacctatggcgggttaacatcaccccgacctcgtgccctgcctctaaggcctctactccagccacaaatgtttgagggaattaaaactccctaaccgccactgaatccgaccaagttacactgactcccggtgtttcgcctggcatccatactactagattagcccgtgtaaccaagagttagtctagtcagattgtgatcaagaataacttgctaattaccgcttattttgaaaatttaaaacatgcacctattcagctatcaggctaaaaaaatgcttcccatcaggcttttcttaaatcatactattaagataaactactaaagtaataaaaccttactgaaccgtgagacgagctgatcgttgatgatgattgtccatgtcgtgacgatcttcgtaagataacctagcagctctaataccaaattataacaccctaactgttttaggcatgttaacgtgattttaaatttaactgtgcaacatgttgctaataaacgactttattaaaaatcgtgattatttgaaattttacttaattaattaaaacataaaataccatacatataaaaaatcgggatcccgtttacaaaagtatttataaaaatttcactgttcatatacaaaattctatcgcctagcgactatacaaaataagccttgatgtcccaaagatcgtacgctccaagcctaactgccccgacatgtacaacctcca

SEQ ID NO: 143279 - DNA, 722 bp, Cannabis sativa
atctcgcatttgatgaacaaaggcctacgttcgctgaatggagagacaaagagatagaggcattaagggctcaccatgcagagatcgaagatcgtagtcggcaagctaccgtgctcatgcgaagagcctaccagactgtaggtcagcaaatgccgaacgtcattcccctggagaaacggaggatgatccaatgatgaatacctcccagaaaaccaatggttagccgttcaatccccagttactagttccactcgtggcccaggtaggcgggcagaccttgttcaggaatacatcaggaggagccatacctaacggatccaaacagaataatggtgtaattccacctatcaactaagcgaatcaatcgctcaggcaaccaggctcttctgtgttcgataggttgggaacaactcatgacctaaggaacgatctaaacagaagaagggaacagacgagcagaatactacaacgatcgtgcagcccggagcccatactcaaatccccgctcagaaaagacgctgacgtaatccaaatcgaccagaatgccgagcaagtcagcccagccgtacaggcgcagcttgacgagttgaagaatatgtttcatggcatgaccggtcagtgtaacaatgtcttgagttagaccgtgctcgcggtactcccttctcaccagagatcaatctcctgccactgcctcacaagttcaaaatgccaacgtggaagat

SEQ ID NO: 143280 - DNA, 634 bp, Cannabis sativa
  modified_base (27)..(51): a, c, t, g, unknown or other
tagattctggtaaaatattcccaacannnnnnnnnnnnnnnnnnnnnnnnntttactttcatgtaatatgaatttaaaacgatgaaaattgtttgtgtgtttatttggatgtgttcatgttggtttatgtgttatatcatgaatttatgtgaattaaataatttttcatgaaaataatttatttttcgatctgaaaatattttatttgtattccttgtgaaaaattaagcaatttgtatttttacgaaactcgattccaatataaattggaaaagttatggatttttgaagtttcgggttgagttgttgcatcgagtgcaccaggcactcagataagacgggttctgcgcgcgtgacaggggacaaattccctatctgaatcgcacgcacggcttcggacacgatgcaccctgcgcccacccgtgtcgtgatgctgcgcctgccggggattcctgcacgtccaccctgcaaatccccaaatccgcgcgcgcccgaggcatttgcagcccctcgagggctgttcgtgtacccaggcagccaacaaccccaaaaatccaatttttgtgggattttttcccaattttgaatttttggaattttcaaaccgtaaaattaaaataaaatatttttttta

SEQ ID NO: 143281 - DNA, 810 bp, Cannabis sativa
  modified_base (521)..(524): a, c, t, g, unknown or other
atgggtcgtcatcaataccgtcaccaacgaccatattgattttattatccaagccataacgagctagttttgtagaaaccctcccactacgatgaggagtcgtgaccttctaaacaggaacatttgtggtagatttcttagttgtaacaacctttgttggtttaactaaggttgtgggattgtcttctacatgagtagaagatgatggaacattagaaggagttatatctgaaagcatttcttctaacactactttactttgcggcttgaagtctttaatatagtcatattaaatgaaagtagcatttgtagaaacaaacactttattatccttgtgactgtaaaatagtccacccctagtctctttagaattttcgacaaacaagaaaacttcagttcgtgcttctagtttgctttctttctttcttaagacatgagcagggcactcccaaatcctataatggcgtaaactaggtatacgaccattccatagttcgacaggtgtcttagggactgctttnnnnggaacaacatttaaaatgtcattagtcgtctgtattgcatatccccagaaggacgttgaaagagttgaatagctcagcatagacctaaccatttctaaaagtgtgcgatttcttctttctgcaactccattttgatgtggagtgctaggggcagtatactgtgattcaattccaagtttaactaaattttctttgaactgcatatccatatactctccacccctatcagttcccaagatctttaatgttttacctagttggttttgagccaaagcatgaaattcct

SEQ ID NO: 143282 - DNA, 665 bp, Cannabis sativa
atacgccttgctcatatccagtttcaaagccatacacccagtcttcccttggcgctttcgtttaagatagtggagaacttcaaaagaaaccataatgttatcagaaataagcctacccggaatgaaggcgctctgagaatccgcgacaatagagtccataaaaggtttcatacggttggtcattaccttagtgacaatcttgtaaagaacgttacaaagggcaatgggcctaaaatatttcattgtctccgggcccttcttcttggggattagaactacatttgcatcactacaagcttcatcaaaagtccccgtagcgaagaatctctgaacaacacccacaacatcttttttcacaatatgccaacatcgttgatagaaagccggggtcataccatctggtcctggactcttgtcaggatgcatttgaaacaccgccgtcttcacttcttcttccaagacaagtcttgtaaattccaaattagccatcttaggaacaacatgatcaatacagtcaattacttccctataatcagtattagaagccaagaatagagacataaaatattgtaccacaacatcagataacccattctcccaatccacaaacacccctggtcatttttaagcttcgaaataagattactccgtcgcctattacttgc

SEQ ID NO: 143283 - DNA, 986 bp, Cannabis sativa
  modified_base (237)..(237): a, c, t, g, unknown or other
ataatttaagttgaaaattttattattttagaacaacttaaattagatattttcaagtatttattttattatattttaattattttcgaaattttatatttcaatataaatgattttcgaaaattaaattaaagttgaaaatgaattattttattaattttgaatcaacttaaattaagtaattttcattattaaaatatatagattaaaataagtgattaaataaaaatacatttnaaataatgagctttaaatcaagagtcattcgatctccattatggttctacatagtttttgttttagtgagtaatcatccctaatggatgaatgttcattagcaatttaacgtcgtagaatattgaaagatacgtattatttgtaagtgttttattcttagtattgatcaccctaatggtggccactaagagtaagacttacaaaagtatgaaacaatggtggaggctcatgaaataggaatgaccttgactctcacctaaacgggacaacgtcgaattctcttttcgatcgaataaaaggttactagaatgtttgtcattttagatgagttgactactctattcaatggatgatatctttgactctcgcctaaacgagacactgtatcagtttgttgaaaacattggaaaataattaaacatgttttattttgaaatttttacaaaaatatttgctttacttgttattttttgaacttgtgtattaatttatataaccaaatgatttatttctgtttattgatatttgtagtgtcaaaatggcaaacccacactccaaccctctcctagaacatgcctctgcaaatgaactctataatgtgaaaatgcttccttgtaagagcattaattcccacttgttgatgatgaatctgaagttccagaaaacaaatttgttgggaattgattaatctagagaacaatgggttcaattcattcttaatagtcttcctccagagtataatggatttg

SEQ ID NO: 143284 - DNA, 905 bp, Cannabis sativa
aaagtccttgtcacctgtcatatgtctaaagcaaccagtaccactatcaaaataccacatttgagatgcatcacttttatcagaaaaaccagctagacactttttcttaatccatttttgtttcgtacctttatgtttcttttgagatttttccaaattaccaaaataatttgttttaaatatatttttcacggtgaaacatttaagtctgatatgtcccttcctaccacagaaatgacaaataggcacaaatctttttacctgagatcttactctttttgaaaatcctggagactttgctttagcaacacaacttctgcagcgaaaggctttgaatctgttgcaacaaacttcaaatttgtaacatcaggaaagttcattagaacactagattttacaaattttgtgattccagaacttttaataccatttgatccaatgccaacaaagcctctttgacctgcattctaagctttttcaaaaatagaagatccgggattaagcatttgtatatttttcttagaattctcaagttccttctttaaaagagtaattttttcagctttaaaacaaaagtctgtctcatattcttttatttttaactcaaaagtttcaatttgatgagataattttttatttattttaatcaacactctattttcaaaagtaacttgtatccacttttcatacatgactttgtatgattcagcaagagactcttcacagattttagaatcatcagaatcagattcttctagttcattgatattattcaaacataccagtcttgctttcacctgtgaatcacacaacacattagtcataatagaagttagagcaacattctcagaatttttcgtcaccactctcagtttcatcatcactccaagtgacattgaaacttt

SEQ ID NO: 143285 - DNA, 514 bp, Cannabis sativa
atgcatcccaccaaaaatttaatggcatttgggcttgagctaacaaggttaatcccatttcagttacatgcctatgttttctttctactctaccttgttgttggtgagtataaaaacaaggatgtctaaacaagatgcctagtgtttgtaagagaggttgtaattttctgtattccccaccccaatctgtttgtaaaccctttatactatgatcgagttatttttccacgaaggttctgaatgttagaaagatagagcatcagttttactcttcataggataaatccaactgtatttggtaaaatcatcaacaaatagtatataatactcataccctttagcagtagggtttggggagggaccctagacatcaaagtgaacaagttgtaagggttgagtagtttttaaagaagagctactgaaatgcattaagtgatttttaccaaattgacaagcatcacaaaattgtaaatcagatttaggcaaatttgtatttatttcttgaagaactttt

SEQ ID NO: 143286 - DNA, 586 bp, Cannabis sativa
gtttaagaactcaagcttggctttttaatggtgaatcttgattctgagcttgtttagttgttttgttgcttggaatatgtttattgggatatattgaataggtttggaaggtttggttgagtttaaggttgttttgagtgagttctgaattttcgaagttttcctacactgaaccggccgatcgattcagtgggacctgtaggaaccggaattttggtttgtccccaagaaacccctcagaactggaattttggttagagaatcgatctaccggttggggcagttttggaaagcctagtttcttccatttttgcgatatttagggtattaccatgttttttatcgataggataacttttagtttcaagtttaagtccccggtaagtcatttaccgtatcactcaccaattttacgaaaaatgttatttaggggcctgtaattcgtcgagtatctgttccacacaggttggttggcacatctgaattcggaaacggggtaagattagtataatgatatgcatatgtatttacatgtttagtgtgcatgttagttaagcctgttagattacattagaaatgtatgttg

SEQ ID NO: 143287 - DNA, 866 bp, Cannabis sativa
  modified_base (824)..(829): a, c, t, g, unknown or other
ctctgtgttctttatttatcttttcatattatatctaaattatatcacttatcgcttactattaagactcattgtggttggctaaaagcgaggtcaacaatacaattttgtatttatatgtttatcatgctttatgtgttttatattattgagaccaaatctatggtattttaatctttgtaaagagataataccacataaacacatagattttaaattaaatgtttaagaataattgtcaattcttatttaattattacgattttgtttaataaaaagatcttttgatatgataggggtggaagaagttattaatatatgcagttaaaagaccttttatattgaactcaagactatattcataactccacagaatctctataacacatagggttggaaaaagttattgatatatgaagttcaaacaatttttttttaacgctagatcatattcataacaccagtatatatctatatcacacatattttgattagacatggatacaatataataaacaacgtaggaagctagtagaacttattttcaatcctacaagtgttctaatgaacaagttactatctaatttttctcccaaattatgtctacctgtcgtggcatgtccatgtaagtcaaagatagtgtacaggtggagtatagccccgtcaatagcagaatagagcctccatgaaagatatagcaaaatcatcaagcagtgaccaaaggaagttaagcgagcccacaagcagttgtaccaacatccttggccagccaaggggagcctataggccggtcagggtgggcctattgttgggttttatgcccnnnnnnaaactcatttcaatataatccgatttacttattaata

SEQ ID NO: 143288 - DNA, 559 bp, Cannabis sativa
caagtgcggatattcgcattttgtggattggattggattggatcgtgcggattagattggatcggatacttagtgaacacccctaaataggagagtgaaattctattttctcaaactttgttacgtatatctaaggttatttctgttgttgagttaactatatatcctatacataatcttataaataaaacattttaatcttctattaaaataaaaagaaaatatctaatttaagttgaattaaaatttaaattcaaatataaatatttaatggttgaataaaaaatatcagttagatcttttattttaattattatctatttaattaaacaattatccaataatttacttaattaataatgaaaagataattaatttaaattattttaaccaataaaataattaaaataaattaatcacgtgtctttatatgtcaccctatacgtgtggattaggcctacatgtgtgggccatattttgaggtctaaaattaatttatcaattttaccataaataagatttattatttattttaactaataaataataattgattaat

SEQ ID NO: 143289 - DNA, 1023 bp, Cannabis sativa
aaaaaaaaaaaaaaaaatcgaaggggattgctaagttgacctatgatctgccactttgaaatacatgatatgttgttatttttttggaagagagatatgttgttgaatagagggatttttcctataataagcaattaagggcattaatttatatttttaccctaaaaaagaaaaataaacaaaagtagaaaataaaatcacgggagcagatttgtgatctagtcgaactacacccatctcaaatctctacgattttcattcaaaacccagaaaataattttcattcaaaatccagaaaattcaactccaacaaaatgtagatttcaactaaaaattaatctaatcccaataaagccaaatacaaaaggtaatacagaataaaaaaattaaaaaaaaaaaacacagaaatttctacctccattgataaaaaaaatacaaaaacaacctaaaatcaaaattcaaatcgtattcatcaaagaatttaaatacaatgagatcggataaacttcgaaacttacccaaaaatgaatctgataacaaatacaaggtacaaaaatttctaaggattttcttcctaattaagttattttaaaaaaaaaagataaaatttttttagattatagaaatcagataaataattaatgatatagaaaatttgttgatcttaataaataaatgaaattagattacaactaaaaaaatactaatgcatacaaatataatcaactgttttttaatctagaaataattgtatatatgttattttggaggattataatagttgtttctttataaatgaataattactattgaattaaatctcatttaccattgattgtcagaaaatagttgtttaacagttgttttgatagataaaaatagttgtttaacagttgttttgatagataaaaatagttgtttaacagttgttttgaaagataaaaatagttttttaacatttgttttgataaatataaatagttgtttaaaattatgaacacaatctgaaaaaaaaaaaaaaaa

SEQ ID NO: 143290 - DNA, 628 bp, Cannabis sativa
tataataacgagctttgaaaatacgacccaccaaggaatcaggctgacttaacaggcgccaaccttgcttgctaagaaggcttaaattaaagtctcttagatttctaaaccccattccacccttagactcgtgaactgttaatctctcccaactcttccaatgtatccctttattattctttgcagaagcttgccaccagaatttgcacatcatttgctccatttccggacaagcttccacaggtagaaggaagacattcatggcatagcttggtaatgattgagccacagatttaattagcaactctttccctactttagacaagaaccttccttcccagctctgaattcttttcctcattttatccttcaagaatccaagcatagacgtcttattgcggcccaaagtgttgggaagacccaaataaaagctattctccccagcttcagcaattcccattaaagaacaaattgtatttttgacattctgggcagtgtttggactgaagaaaatggtgggcttctgatgattcacttgctgtaataaaattataaataatatatttttattaatatttttttattaggattatatgtataataattacaaggctaattagtaattttt

SEQ ID NO: 143291 - DNA, 599 bp, Cannabis sativa
ctccaagtgcctatccctgtcgagccactcgtactggccttgccactggtcctctcatatgctttgcgagtaagtcgttcaggtgggtaacaactaaattcgccagctgccactgatctaacctggcaatttctcttatattcgatgccacaagtccttaaaacggaacctacgtaatccccgatggctcgcaccctcgactccattagttcagcctcgaaggtgacgttagggttctagggagtctttgattttgaaggcttggaagtcataatttcaaagtctaggtcatttggttcaaaagcaatcgtgactctgggtaaaaataaaggcctagccagaggaattgacaaaaaatttgggggttcaggccaagcagcatctcgcaagaaattgttggattttgtgccctaagtaaaatccatttcaatataatcagatttactaatttatattagatcagaaatcaattttatattgcatggttcacatgatttatttcatgattatacttatgtataaattctattaagtccataacatatataaatgtgtatatatttgttcatgattatagtgtcgtcagcacagtggaatat

SEQ ID NO: 143292 - DNA, 620 bp, Cannabis sativa
ttttctagtttttaccaaccactaacataaatcagaaatggttgccaaaacattaaaatcaggaagttctcgtattctgtaaaatcttttggaagcaaacatatataatatatcatttattgcacaatatattttatttggaaacaaacaaaaaataaaaaagaagaaactaaaaagcctaaaccgtcatttacaagttacaaaccattactaaaactttacgtggggccaccatatagtataaataataaagaatggattatatataaataaaaaattataagataacaggggcatggcctctatagagcttcaaatacatccgcccctgtttgtgtgtatatatatgtgtatatgtaaatgtatatattacatatatatataatatatatacatagtactatacttttaattttatttagttaatatttatttttttgggctaaataggcttttggtattcctttgtttggtgtttggcaaaaatcactgctcgttatattggaaggtttatagtatgcttatgttatattatttataatatttaaaaaaaaaattacttgaaaatgcatattagaagaatttgaatatcttatatattcatccgtagtgaagtaggt

SEQ ID NO: 143293 - DNA, 594 bp, Cannabis sativa
ggttgttgatgacacacaatggatatgttgtaaagtcaggttccttcagttatagttgtatgtagaaatacaggatttgatcatcctttatcctcaacagttgttatccttctttcacttggtattttagttgtaggaaagttttttcttggttgcattccaggacctctttcagctttcgttgtaattcttcatacttacaattgattgaaatgtattgtccactagtttcataattttcataattcattcgattatcaaattgtccattgtaaaagattaggaatggaatgtcttctttttcctgtgattttgaaattattattagtgtaagacaacaattttgaaactgttttaattctgtaattgttaatgttagtaatgtttctgaacatttttatactgattttcataacaaaaaataaattgatctttatgaaatagagaagaaacttactgatattgcatttcttctgttcaagtcttgtatatccaattatgaatcctgtttttgtcatttttatttgttttaataatgtcatgaaactaaaaaaaaaaaaaaatgaaatgcaactagtacgaaacgttttaaat

SEQ ID NO: 143294 - DNA, 629 bp, Cannabis sativa
gtgacctattacttaagaactgatccaaagttgagcgtgcttaacctagaataatcttaggatgggtgacctcctagaaattttcttagaaaacgtgcgagtgaggacaaaacatgttggaaatactcatgttggtttgcaaggccaattgtcaatccagaaaacagttaaagtaacatacctatgtatatagtcattagttcatggggatgtccaataaagacttgaagcgggagcctacaaagtaaattttaggacaaaaaaataaaaattaaaaactaaaaagcacattattattacatataactaaaaagtcaagtgtccagtaaaaagtgtcatactattattaatactatttttagtgtttgatcatatataatggtattaaacaatgataagagctgacagttgtacattttctgttttgttagttatccaactaattaactttctgttagttagttgttagctttcggtttcaactaatcttactttagttgctgtaattcttgtataaattttgtataactgtattcaataatgattgagctctttcatgatatctttcatcttcttccttcttctcttttctctcttttctctacttttagatttcctttactgttatt

SEQ ID NO: 143295 - DNA, 532 bp, Cannabis sativa
  modified_base (348)..(350): a, c, t, g, unknown or other
  modified_base (438)..(441): a, c, t, g, unknown or other
agaaaaaaagaaaagaaaagaagagtggccgagagagtgagaagattaagaaagaataagccgtttaataataaatactaataaaatgagaagtcactattcagttaaatctttctacttaaatagtaatggaaaccaaaaattaaagagaattataaaaatttgaaaaaaattagaaaattaaagaatgacaaacaaagctcaattaggatgccatgtcatcttgcttagcaagagaattatatagatatatagattatgattatttagttaatttttaaataagtgatatatataccattatgaagttatatgatgtacaataagtaatttaagaataatgttgtnnnatgtatgaaaatagtattaaggtataaacttagttaggggattatagaagttggggacgtgtccataaattatgtatagtatgatagnnnnttatggttacattaattagtgggctttaataaatacaatagatcaattattccttttaagcttggaatttaaataacaaattgtagtatct

SEQ ID NO: 143296 - DNA, 685 bp, Cannabis sativa
  modified_base (322)..(326): a, c, t, g, unknown or other
taatagagacgaaaacctacaaaatacttatcatatgagatcactacggtgttaaatgcttcaacgaataacttatattcgaaaataataaaatatattaaataattatttttaaaatttgattattttaatcttatattttacattatttaattaattttataaaatgaccttatttgaaatttaaaaataagacatattttaataaaataatctagaaaattttgaaaatctaactaaatagtttgtcaactttcaaatttttgttattttatttaaattaatttataaaattagataaatgatatttatttatcatttnnnnntattagatatttaattttattttcttttaaaaataacataaatttagaaaagttagttgatatttttgaatagatatttaggtttgttaaaaacctgattttttaaatttataggtctaattttaaaattaattatataatttaatttaattattttcgaatataatatttaattatttatttttttttcaaaaataatttaattatttaattaatttaaattaaataaattctatttccaactatccaatttgttgcatgtgtgtgttttataattgtttgttattaaaacttattttatacaacgtattattatttgatctaaactgctatggttaacttgttgacagatccattga

SEQ ID NO: 143297 - DNA, 836 bp, Cannabis sativa
ttgttgaaaagtaagtcagatcattttttctataaaagatcaactgctagcatcattttgttagtactatatgttgatgacatcgttattactggaaatgatactgaaggcatctcatcccttaagtctttcattcatacccaatttcacatgaaggatttaggggagctcaagtaattcttgggtattgaagttactcggagtaaacaaggtatttttctgtctcaaaggaagtatgtacttgatttgttaactgagacaggaaaattgggagaaaaacctcgtaatgctccaatgaatacagctgtgcatcttacacgtgatgggaaaccatttgaagatcctgagaaatatcacagattggttggaaagttgaattatctaagcgtgactcgtcttgcattcccagttagtgtcattagtcagtttatgtcttcttcaacaatccatcattgggtggcactagagcaaattttatgttacttgaaagaagcaccaagacgaggtacaatttacaaggatcatggacatacccggattgagtgtttctctgatgcaaattgggcaggctccaaggtagatagacgatccactttaggatattgtgtatttgttgggggcaatctgatctcttggaagactaagaaacaaaatgttgtgtctagatctagtgctgaatcagaatatagagctatggtacaatctgtatgtgatgtaatatggatttatcaattttgactgaattcgggtttaagacttctattccagcaaaattatggtgtgataatcaagctgctcttcatattgcctcgaatcccgtattccacgagcgaact

SEQ ID NO: 143298 - DNA, 1296 bp, Cannabis sativa
gccacgattcgtaatagaagaaactcggtggatagtatcttgagcaaggatggtgtgtggattactaataaagaagagattggtaatgagtttactgtttttctgggtgacattttcaaaacgcgccttaaggcccttttgaaagcttagactacttaatccctgatcttctctcccctttggagtagcctgagcttgaggtgatcccaagtcacgaggaaattagacaaacgctgttctctatgggaagcttgaaggctctgggtcctgatggtatgtcagttctcttcttaaaacactactggaactttgtgggaaaggatttctttgatgcaaatgtggactttttagggaatatgcatagaggctttaatgctagacatattagtctcattcctaaggtccctaaccctaaaaaagtgtcctagttcagacctatctctttgggcaatgtgatttataagtgatctcgaaaatcattgcaaatagaatcaaagtgttcctgcccagattaatttgtcctactcaagcagcttttgtctcatgccagaacatccaagataataatgttttaatccatgatatcatacactcttttaagaggaaaaaagggaaagaagggttttttgatatcatgattgatcttgttaacacgtacgacaaactaagttggcaatttattgaccatgttctgcgtagtttcaagggccctgacaagttctaccactcggtccgcccgtgtatcacaataacgtccttcaacctatttctcaatggaagaaagtttaacagtttgaccccagagtgtggcatcagacaaggagacccctatctctgtacatctttatctgggctgttgaaaccctctcgtgcatccttgagcacgcccttgataacggtaccatcaatggtataaagctaagcagagatggccccaaactctcccatcttttctttgtcgatgatctgatccttgtaggcagggcaaaccttgaagaagcaaggggtatgtggcattgcctggagaaattttatgattgttctggtcagagaattaataagctcaaaacctccattttctttagcagtaacacgagtgatggtgtgaaacgaggcatcaggcaagctctgggactgaactgtgaaatgggtaacataaactatttggacctcctactttttagatcccgccaaaaggatgcaaattttaacttcatccttgataacctggtgtcaaaactccatgggtggaaattaaaatcgttatcaaatgctggtcgtgctacgttgatcaaa

SEQ ID NO: 143299 - DNA, 510 bp, Cannabis sativa
  modified_base (27)..(36): a, c, t, g, unknown or other
  modified_base (390)..(399): a, c, t, g, unknown or other
attttttggaaaaccgtaaaaatgtannnnnnnnnnaaaaaaacattctttgaatgtaaaaatgtaaatattttataaaaaaaatagtgccttatgtaattattctaatttttaatgcccacaaaagttcaaggcccataatttagtacatcttaaagtttaagaggtaaaaatattaattaatttttttttccttaactacgtcctaaagaaattattttatttattattatttttaatttatggtttatttgtttttattttgttatgatttaattgctatgtggatttttataaaaaatacaaaaaaaaaatattttaaagtgtgaaaattaaaaaaaaaaaaaaaaattattatcattactatttttttggaaaattctacaatgnnnnnnnnnnaaatggatatattgatgcacccttgtctgttttagcacttgaaataattttttagtcaattgttttttttcatggtcatgtatgttttaattatttaagacatcctgcaaa

SEQ ID NO: 143300 - DNA, 521 bp, Cannabis sativa
ggggtaatctgatatacccgatgggtgcgatgccttgccaaagaatccatgcatcacttgattgcagggtgccaagtcgctgagttgaagccccatcatttcatatgttgacttgagaagaatgttcaaggaggctccatcgtccaccatgcatcttgctatagtcatgttcctaatatgtgcagtaatgaccaaggggtcattgtgcgagaaactgacttgagcaccatcttcttctgtgaaaaatattacaggctctccaagctttgcttgcttagagcccctgtcttcaacttcgaggatgtcactttcaggcttgtgacggagtgtccgagcatagcgctccctagctttgctagtctctcttacaatgtggggtccaccaatgatgaacccatgtgtcctaccactggaggtggcattggatctccgttctggccaccttgtgcttgagtttggtcactttgcacataacgatgtaggtggggattgttctgccttatgaggtattcaatctccct

SEQ ID NO: 143301 - DNA, 589 bp, Cannabis sativa
  modified_base (125)..(126): a, c, t, g, unknown or other
accaagacccagactgggatcgaaatgctggacataactctggaccgaaatcctgacccagaccgaaacttggacccgcacgtgggacccgaactttgacatggaccagaacctagacccagatnngggtccaaacctggacacaaaccctgacacaaactctgacccaaacccaaacacccacacctagaatcagaccaaaagctagacccggacaaaaacccaaacttgaccccagaccaggatcagaaccaaggacttagacccagaactgattccagactctgatcgggattggaacttgagactcggatccaacctagaccaagacccaagatgcgaacccacacccgtagcctgatctggacctagactgaaatccggacccgaaccctaactcagaccaggactcgaattccgaccagaactcgaacccaaactcgaactcagaattgcaaatggaactagaactgaactaggactaggaccaggacaaggaccgaaccccaaaccccaacccatatcaaaacccagacagagacctaaacccgaaccgagaataggactcgaacccgaacctagaccggga

SEQ ID NO: 143302 - DNA, 762 bp, Cannabis sativa
aaaaaaaatcaataggtaattagacaaaatttaataaataacactattttctattattattaagtatcattttttcagttttcaattctcatgttgcaagaaaccttaaaataaatgtataattatgtgaagtaaattaatttattgttgtttcattagtaagaaaatttacaattttaaattagttttattataaaattaatacatttatttggatgttatgattaaaaattaaaaatataaactatataatttcattattcaaaatgtgtaataattatttatttagaaaaaaaattcaataactacaaaaaagataaggtactaagtataaatatttttgtattataaaattttaaaataaacaataaaaaatatatctttttatttttttcatttaaaaaaaattacaattttatcgaaataaaacttattaatattgtcagactatttttgtcttaccgcgcaacgcgcggttttgttctctagtatatatataaaggaaggtttgaagagagttgagttggcttcctataaagatagtatcatcatctttttattttatggtgattttaaattttttttaattattttttataataacaataaaataaaactaactaattaaaaaaaattaatcaatgacttataatattctaaaacatgacttatagtattctaaaagagcaatttgcggcgagaccctcttatgttttgatttttatacacttaacccccttatctttatttttggtggcaaaa

SEQ ID NO: 143303 - DNA, 626 bp, Cannabis sativa
  modified_base (163)..(182): a, c, t, g, unknown or other
ataatggaaaagaaggatcttctttgggttaaatgggtcaatctcatctatctcaaagacaatcccttctggtcacacattctaaaaccagactcgagctggtattggaagaagctttgcaagctgaggcgtattttcccaagggaggacataatgaaggcannnnnnnnnnnnnnnnnnnnggcgaccttactgtataacagcctccttaagcaagattgtgatagctactataaggctatttggaactacttgaacttgcctaaacaccgatttgtgttatggcaaattgtgaactctcatcttcttactcgtgacaatcttaagaagtttcatgttgagattgttacttggagctgcccggtatgtggtgatcatttggaaactcatgaccaccttttctttacttgtagcctttcgcaaagagtgatgtccagaatttttgcttggcttggatacattgcttggccgatctctctagagggctggaaaaaatggctcactctcaagccatcggggttacaaagaagcattaatatagcaatccttgcagccacttgctactgtatttgggtaaataggaacaggtgtgtttttgaagtttgttcaaaaactgtcaattgggt

SEQ ID NO: 143304 - DNA, 2800 bp, Cannabis sativa
taggtcgaatactcgcacttgtcgtttctctgaaaattctcttgatattaattaaataatatattttggtgttgcgaaattcactcgacaacagagatgaatgcataatgaaatatatacggtaagccgtatctcatagggattcctttgcttcggagggagccaaggtcactttgatagcgagcaacttcttgtcattttagcttctcgagactaatattatcataattcttataactatacttctctagcgttgagaggatcttcctgcaagaaaaacacctcgttgtttgctatcttggctcgtcaaactatttacacttagtttatatattgtttaatatacgctaagtatttttagtgttggcgctttctatttcacgcagcgaggttgaggtctcgtcatgaacgtctgcacccacatggtttctcgtcaatacacaagctagcagttcgtatgtttctctctcgcagaagacttatcagccaactgacttataaacatactctacgaattatatttccaaagatttgttccatgctaggcatacttgtcatttgcatgtttgagtctttcccagctcgacacgtgttctcttctgatgtgcttgccgaacttcgggtataacggttgacccttaaaaatttctttttaattaaaaagagatttttagtgattacaaagggtattttcgtcatgctcctctatttttgaaaagacgcattccctctaatttttgcggttgtgcgatttcgaggtacatcagaattaaatgaccatctttttcacgtccgcttcgaatcacgtcgattggataaattctattttgaaatcattatcatgggtataaaataaggaaaaggaaccacctttgcaccatttcagaaagtttgagaaaaattgttaaacttcttcgttaaagatcaccattaaacccgtctaaagacttgcatgccatccgtgtcgttgacctttttcctgcgagtttcctctgacttcattttatcaaggtgatccttgcttcattcgaaggtttgtagacggatttccaaggcattgccccaagccctaacttcaaacggtaagttaatttcttctttctcatggttattacatagtgtggattagatacttgattcatttttatcgttatcatctcatctggttttggtagtttttgagggttaaacctgttcatactagggttcaggcaatatgtagattgttttaagatctccaactgattaccttctagtttgataaaattctctccagggattgggactactttgtgctggtagcaatgtcccgctcttgttcaagagtttatcatccagaagctttagagtttgactttcctatagaattggccatcccatataaacaccatctctcaaaacccaccttcagatcagagctaaacgatgctagggttagggaacacacagtgagaacccaacaggaagatatgtcatgtcgccacaggcgcttcttgtaagaaatatccgaaggtagacgccggttcttgcgagaagcagcctggctagaaccacccaatgtgttctttattcatgtggcaaagccttaatttttacccaacctcacaattgcttttgaaccaggtgacttggattttgagattatgcctcccaaaccacgtacgtctaaaactccgtaggatcccagcgtcaccttcctggatgacttaatagaatcgaaggtgcgatctatctttggctatacaggcgacatgctgaagacctgtggaattgcacttgggcaatcatgcaaggttaggtcaatatgagagggtgaattcagttgctaccccctgcacgctttgccagtagtaacccaagaactagtggtgagactagtactagtggttcaactagtatgggcgttcggagccttgagcatatttgtgcaggggcctccctccctcttcgggactacttcaaggattatataaatcacattggggttgccccattccagctaaatcccatctcttacaggattctcgctagtttgaaagtcttgtacaaaattatgaattggggttggctcgcgcccgtagaaattgaatatctttactcagttagagtcgttccatcgaggaagaacattgcgggggctttttctatcttggtactcatgctagtgagccaaaaattatcgttgactttccaaataagatttccttcaaggatgacttcttctggtcgtctggtctctcccccattggcacaaccatgtttcgcaaactctgtaagtgattgttttcttctttcttattcacaatagtcttcctttttcaagtacttgactaatgttttgtttgttttgacaactcttctgacgagacctacagctacccgcaagatggttagtaggcacaggcgcttgatgactctcccttacggtcttcgatcataaaaattgcttttgaacgaagtaaacttgcgattggtgggccttctcgctgacaaagaatacgcttgggattacaagattcccaagtgttatcccaattttttcactctggcgtggcaacacatgatggtgacacgtggactcgactccgagtatctgctcgcagaatagtccgaacaggatgcctcatatgcatgcttgaagcaaaccaatcagcaatccgcccagtgcgaccaacacttcgcgaattcatcttttgcattgtaagtcatcagagaaatccctataacttgggaatcagattgcagagatatggcaagctgcccaaatcccacgatcagtgtattctatatttattatgca

SEQ ID NO: 143305 - DNA, 610 bp, Cannabis sativa
gaacgacagtcttgaataagtaacccaaactgagatggcatttgaactgaacctttgatagcctgaacagtgactaaagaatcagtttcaatttccacatcagttacgttcttcatctttatccaactcaagacttctttcattcccaccacctcagcaatctcaggagcgaccactctaattttactccccgaaactgcttggacaagcttcccagtcgagtccctaactatgaacccaaagccaaaccgattttcactttcgatgaactttgtaaaaagtggttttgtccaatgctccttcccattcccaatattaacattgagtaatggaaatgacccttgtgattgagcattttgccaattgccaagattagtccttgccgaccgaataacatccaaaactgttgttgatttattgctccatagttgatcattacgtgctgtccaaatgcgccatatgagcattgccgcactctaagcaacagcccgactgaaaaaattcatacagaaagtgtttacactattaaaaaactatgaaaaaactattgcaaaatgagaaataatcaaatgaagaaactgaaattaaaacaataaaacatctcgaaaaa

SEQ ID NO: 143306 - DNA, 505 bp, Cannabis sativa
gcaatgttgttggcctccgtaccatttaccgagcttagatggaaaatgcgaatatggatacaagtttctttgaagaatctgaagaggaaattcttgcctactatgagaagaccaagaaggaggaagaagatgccgaggcagcgacagaagaagaattgtccaagtctcctactatgtaggcttggttttaatttatttttattttgtttaagaaaatggccttagggtcgagacaatggttcgccctttgtggcactttttgtaaagacaaatttgcaaggttggaaggccaactttgtttttattttatctttctggaacgcctcatacttttttatttaaacttaatatatatttgtttgcttgcattttcattcacaatttaaacaattatattttgatcaaatgcaaagtactcttaagaattcccattgctcatattttcctttgatattatttgagtagttactcatctgctatgtgcgcgagcagtttattatctgcc

SEQ ID NO: 143307 - DNA, 868 bp, Cannabis sativa
tcacttttcgtgggaaacttgttcttatcacatctttgtattgtccgtgctatgattactgagaacatcagtttccagccgtttcgtttctttaatttttgggctgaacacagaccaagttgtttctgataattggtgcagacctttgaagtgtattggattaaaagggatctatctgaagaccatgcgactcaaacaaaaattgaaggctttcaatagcaactatattgggaacataggtgaagcctatgagaaagctaaggattgtcataaagaagcttagctcctttgccaagctcatgctcatgacagaaattacattgagagagagtagcaggtagttgctcacttccataaccaggaaaccatgtatctaaattttttgagtcaacgaagtaaagttaagtggatccaaaagggagacaaaaatactgcctattttcatgccttgctaaagaagcgaaaggaggacaataaaattgtctcttttatgacagatcagggtagcttgaacgactacgtccctgatgttgtcaagcactttctggatcacttctgaagcataatgggcagagctaaagacacaactatggaaatccaaccgagttgcattgctatgggtcccaaactcaatttggactagcatgtatatttattaaaacctttcttttataaagaagttagagctgcaatgtttagtattcctagtactaaatctctaggccctgacagatttggttctggtttttttaaatctgtgtggtctgtggtggggaatgatattcacacagctattgctcatttctttgaatccaatctgtttcctgctgagcttcataatacgaccctatctctgattccaaaaaac

SEQ ID NO: 143308 - DNA, 597 bp, Cannabis sativa
tattatattttatatttttgctcgtatactcagatcctaaactcggaaccatacccgaacccgaacccaaactcggatgaattcatgtcatgatatggtgttaaaatattaattttttagtaagaaaaaatttaaaaataattttaaaaaatttgtgctaagcaccattaaatttttaaaatgacaaaaaacgattttttattcgcactttaaaaactaaaaactgaaaacacaaccaaaaaggctcttagtctttcaattttgtcccttctacacgactgtgcctacttttgttggaactcgacaacatattttaatttttaatagagtatttttattgggtactagtagtgtctattatgttttataaatggcggtccacaattagataaagtggtatcttttagcaattttctttttaataatatatactaacatcattaagagcatctctaacactaaaatttgttaaaggtgtcaaaaatcttcatatcatttacaactataatattttattttagggtaaatagtggcataagtacccaaaattttaggtttgtaagcggcataaacccaatgatttttttagtggcataa

SEQ ID NO: 143309 - DNA, 797 bp, Cannabis sativa
ttctgacacttctcgcacgttcgtgagtgagttgacgaatcctcctggactgtggaccagtagtagtacccttgcctttgcaccctttgggcggtcactcgtccgccggagtggctcccacattctccttcatggacctctgctaagattagcttaccctcctgcttcattatgcactttaagtacggcccatggtaagatcttttatataattggtcccgaagtatagtgtatcttgacgctcttactacaatttttctcgtctgcttgcggtctggtggcaacttatcatccttcaagtattcgaggattggctgtctccagtcttcgaacgtgtccgtcagaatttcagcgcacttaatttcttccttcgctgaaatactaggttccgaaataaagtcaaatggtattgtcctcgtaatgtggaggggggaagaggaccccaagctggccaaagcatcgggatgcatatttgcttcacgggggatttggctaatctggaaatagtcaaaagttgcaatcaatttctttacttcggataagtacctggccatttttagttctttagcctcaaaatctcctttaacttgctgaactataaactgagagtctgactggactaataccctctcggctcccatttccttcaccaattttatcccgtggacagagcctcgtactcaccgtcgctgttggtagctcagaaacctaactttatagattgctctatcatttctccatcgggtgacaacaacactattcccactccgcttcctctgacatttgaggatccgtct

SEQ ID NO: 143310 - DNA, 716 bp, Cannabis sativa
aatttagtttggatattaaattttatttatttataaaatttgattactttttggttaattaaataggaaaagaaactatttttttattgtggttattttaatacgtaattatagatatttttctattgttacatagtaaaaaataattatttagttaattataatatttaaaatgtaaagtaattaggaagttaccttttcacacacaacacaaaaaatgattcatttatttataaatatgaacttctttatcaggaaaaaaaaataataataattgtttacgatgtcaataaaaagcattgtaatgttggattttttgtggcgattagtgatcttataattagtgaactaaagcaataccaatgagttaattgtttaaaatatttatattttgataattatatatggttgaaacataactaatgagtatataattgatatggtaaataacttactttttaactatctctgtataattgtttaatataattatacgacccaccttcaaatgaaaaagaaaatacaaaagaaatagaaagtaactgtaaatttgtaaataaaaaacgatacaataatattaataacggtataaaacatataaaataaaattgccacgttattcttagtaataagatacaatttacgtttgtagatgtaaattccccattttttttctattttctcaaaaacgtcaattttctaattctaacctttta

SEQ ID NO: 143311 - DNA, 580 bp, Cannabis sativa
aaattaaaaacatgcgcctattctactatgaggctactaacatgcttcctaacatgcttttcttaaatcatactattcaaataaactactaatgtaataaaagcttactaaactgtgaaacgagctgattgttgatgatgatgattgtacatgtcgtgacaatcttcaaaacacaacctagcaactctaataccgaattgtaacaccctaactaatttagatatgttagcgtgatttttaacttactgtacagccctttcctaatcaatgaggttatcaaaaatcgcgaataattaaaattttgcttatttaattaaaaacataaagtgacatacatataaaattttgggatcccgtttacaaaatcatataaaaaagtttaatattcatatacataagtttttttcctcgcaactacacaagaaaagccctgatgtcccaaagatcgtacgctccaggcctaaccacctcgacatgtacaatcttcatctgctcgctctaacgggtgctgagccttagccttccccttacctacacatggaaatatcactgtgagtcgacagactcagtaagaaaagca

SEQ ID NO: 143312 - DNA, 645 bp, Cannabis sativa
aagttttatgtttgtaagcgacataaacctaatgtttatttttagcggtataagtaccaaatgtttataaaactgtaatttttctctaatttttagcagtatcagttacttctaaatatttttttaatagattcaaaacagagtctatattgacgaaaatggaagaaaattacagtatttttatgccgctaaaaataaacattgagtttatgtcgcttacaaatataaaactttgggtacttatatcgctatttaccttaacttttatgtctttatttcattgttttagagaattcatatttaggatgttagattatagaactataattcaacatacatgtttgtaaatctagattctagtaaaattatttccaacaatatcttattgaaaacgtgtagaagtttgaatatgtaaataaaaatgaaaaaaaaaaaacttgatataggaaactaaaattgaatatgaaagagagtgaaattagttgagtgatatgtaagaagaataacatcatcatcaatgaaaattgtgtgttcaagtggtattttgttaaataaaagtaaaaaaaaaaattgttgtccaatccttgtgaaggtatttttgtaaataaaatgacaatttatatttggaattatttcacaaataca

SEQ ID NO: 143313 - DNA, 979 bp, Cannabis sativa
  modified_base (788)..(790): a, c, t, g, unknown or other
aataaatcatgtgaaccatgtagcataaaatgtaatttctgatttttattaattagtaaatctgattatatggaaataggttttatttagggcataaaacccaacattaaccatttttttttgttacttttttttaaactggttttttatgttaagtacgtctaacaaacaataggaaaactattacactaaagatgatgtatttgctgtatatttctgcttgaaccagtttcttaccttctctttctctgaatgtttctcttagcttgtggaagaaccactcccatgatgaatcattcttcgagtctcctattctgaatgccaatatgaatatgtggttattagcatccattgttgatgatgtaaacaatgtccctccgtatgttgttttcaagaatgtgccatctaccacaattaccggtctacaatgaacccatcctctaattgagtttgacagtgctaggaacatgtacttgaaccggttcttcttgtctgttatcaattcagtgactgtgcctggatttgctttttttagcatatgaaggtacattgggagttgctggtatgagtcttctggctttcctcttgacaattctagagccttttctcttgttctccaagccttttgatatcccatcgagaccccaaactcatgtagcaagtccttcatgatgacatccggtgcatgcttcctgtttattgagtcgtacttcttctttactatttgagcaatagtattgtatgttgcttgcctgtgattttccattatgacatccaatgagcaggtnnngttgttgacatattttctaatcttgaacgtttgtgtttattttaactttgaagcacgcagaaaccagttgcaattttcgtcaacacagttaaccatgtattccctcagttcggacctcttcgttctgatttgaaagttctttatcattgcatagaatccgattgtcgttttcagtatgttcttgtcact

SEQ ID NO: 143314 - DNA, 560 bp, Cannabis sativa
tatgaaaatttgattggaggaccgaagaagaaagggagtaaacctcatgattctagaaatggtaatgtggcgactaaagttgagggaaactttgcctctacttccaaaaccaaaaacaaaaagaagtggaagaatagctagaagcctgttcaaacattaaaaggaaaatgcttcttttgcaatgaaaaaggacactagaaaccccaatgccctaaatttcttacaaacaaaacaaggtatttcttttcctataaacatatgtgttttagtgaattattatccatttggattattaattcttgacctaccaaccatgtttatttgcttttcttcttattacaacccaaactgcttgaactcggatgctgtcttagcgagttgaatcagaaggttgaacaaaaaggggtggagttcgtccaagatgaagatgaagctctttttcttattatttgtgaattaactattttagtttcagcacaatttggatttcaattattagtttggaattatattccctattttttatattgttgcaaacaattcctttaattttggagaat

SEQ ID NO: 143315 - DNA, 1315 bp, Cannabis sativa
tacgggaattaaagtttgcttttttcgtttcattgattgaaaaatattagtataaagtttatggaatgagaattttgaatatatgaaaatagaattgaaaaatagcattaaaatcgataatcaaagtttattgttaatctgtaatgataatatgactgaaagaagatggaaaaattaatttttatttcatttattatgcatataatatttttttaataataataagaatttattttaattaatttttgtttttaaaattattttttctaaaagaattattagttttgccaataccacatgacactttattgatcaactaacgataaattgagtgttgacatcaactttatatgattggaatataaaaataatgcattatgaaaaaatttgattcataatctcacacatgtttcttcttctacataatctcacacttgtttcttttttgttcaattcataataatttttttccatataaaaaaaaaatacttttcttatattcttcaaagtaaaaaagaaaacctcacacatatatagttatatgaatacatatatatataaataattcaataattatttcatttaatattattaatttaatttatatttattattatgtttttttaaaaaaataataaatttaatatagatatttttatagaaaatttattaaataatagtaaaatattaatttgtaaatttatgttttaataaatataaaaaaattgagagaattaaggagaaaaaaaaaataattttggagagattttaaaccgccacgtcaccgcctcatactttttctttatatagatatatatagatatatagattattatgtgttttttaaaaaaatattaatttaagataaatgtttttatagaaaatttataaaataatagtaaaatattaatttataaatttatgttttaataaatattaaaaaattgagagaattaaggagaaaaaaaaaataattttggagagattttaaatcgccacgtcaccgccttatacttttcctttatatatatatagattattagagcatctcatcaaatcggtaattttattacttaaatgtaactcactttataaaaagtttactctaatagtatggtaaaagttatccaaatttgttacctagcaaaagtattcgaatcacaatgtgggacaatgtgggatgatgtaaaatttatatcataataaatgtggggaattgatttttcatgcttacatgtgcttaaattttttggggattttttcatttttacatttcaaaacagatttttttttttttttttttacttttttacag

SEQ ID NO: 143316 - DNA, 617 bp, Cannabis sativa
tagtcacaaccgggaatttcgggctgaaccgggttcgggcccgaaatgccaattggattgcttgaatccaatttagttaaaggtgatttttgagaaaaaaaagattaatttctggttgtgttttcctctcacccgaaaccctctctctctctctctctctctctctctctatctaacctagttcaaattgagaaaatttcttgggagcttgcttgaatcaagcttgattgttgtgaagttgtgtttggaggcttggaactagagtgtggaggaattgagatagttttttttttcagatttttaattgagttttcttgctgaattttatggtcgtaaaagcttggaaaattagttttgatcttgtaattgcatgtttgtgttcttgagttaatttgagcatgttattgtataaatctttctttgtatgatgcttagaattttaattaagctttagctgggattttggaggtgtttttaaggttgttgctgctgatattatttgaattcagtgagttaaagctcaagctcttgagcttgaagattgcttagttaaaacttggtttttgtgatatttatgctatctgaaattctgagttactgctggaaattggtgtttg

SEQ ID NO: 143317 - DNA, 880 bp, Cannabis sativa
  modified_base (445)..(447): a, c, t, g, unknown or other
  modified_base (632)..(642): a, c, t, g, unknown or other
ttacaacaacatgatgaagttgtcatgtaccctttaaattatatatatcattgaattgatgatagtgattcctaaaaaaatataaagtttgataaacatcatagtaactcttgaagagtatatattttagagaatactttaattattttatttgtgtatataaaaatgaaacttgtaatggttacttatatgttgtagtgattttacattaccttatgaaagtttcattgaaatataaatgatagtgaacttgaagttcatgaattgagttattttgaatgatcaatcatatgaaataaattgtcaaatgatttgactaaattttgttgaagaatcagaagattcttctcattgttaatttataaggctaaaaaaaagaatgtgcatatatttgcatgtagaaaaaatgaaagtatattttcatatttttatttttttttaaaannnatatatatatatatatgtagtatttcatttagtttctcttttatatttgtttataagatacagttatatttttattgataattattttgctgatataatttatttcaacatatatgattttatttatttatctagaaaataaatatatattaaattattgaagaaaatatttaaattatatttcnnnnnnnnnnngagccattgttagatttttattgcataatttcttatcgatgtgataagatcaaatgatcatggatttacaaaatttgtagatttatgtatttttaattacacacgactcattcttagaaatgaattatgttcacaactattgaacttaaacttgaagtttattgaacctgaaattcaatgtcatatagtatatatgagtttaagcaaatattaatttattgtgatatattgaaatccc

SEQ ID NO: 143318 - DNA, 875 bp, Cannabis sativa
  modified_base (788)..(802): a, c, t, g, unknown or other
tagtttatatgcatttttttattttatggtgtatatttttggtttattctacatcatttttttgttgtatatatgtgcatttgttttgatatttttagttgtttttaagtgttttcaacatatttttttagttatttttttattcatgtgtattttttatggtatatatttttaatttcttcctgacaattatttcttttagttgtatgtgtgttactttgtagtttagatacatatatttaatttattttttgacacatttattaaaatacaatgataagatttttattttttttagttaacacaatgtgcagtagtagatattgacatattaattatatattacccattatattacaggaaaattaccctatatactattttttttttttaaatttacggtttggattgctccgatggtttctatgtgggttgctatacatattttggttgcaatttaggttgttctgttagttgctatatgggtttctttgtggaattccataaaaattattttgaagtgtaaaaataaaaaaaaaaaccctatattatataccgcattttaaaatcataagattttattatttatattattaatgtaattatttatttgacttttaaaaaatgaattatcattttaactgccactaactcaaaaagaaaaagagaaaaaaaaaattgaaagtatgaaattgtaacagcaaattccataaaaaaaataatatagtagtacaaaaagataaatcaagttgtcaaagctaagtaaaaaaaaaggctaattagtaatnnnnnnnnnnnnnnnttgacatgtactaaatcgtgctctctgaacttttgcggccgttaaaaattcctcccgaactattgagattgtt

SEQ ID NO: 143319 - DNA, 862 bp, Cannabis sativa
ggctggccagctcccgagagcgagctggactatcacttgatcctcgtttgagtgaaggggtcttcgttggctcagatgctgacttggccttccttttagtgagttgtactaccacgcggcataggttctgtccacgtaagcatgccatgtcacgaggacaaaaattggaataacagaaacatataatcatgattatattctattgtgttgacaacactataaccatgaataactatatgctctagatttaatagaatttatatattaaacatacaatcatgaaataaatcatgtgaacctacaacataaaataatttatgatcttttattaattatcaaatctgattatattgaaatgagttttatttagggcccacaacccaacaaactctcacttgcactaatataaaactaaaagtgcacttcaattaatctcagcaccttgatgtctagatcaagtgtagtatgtattattagctttgtaataagatctaacaagttgtattcaatacaaactttcatccaccattacatctccttaatcacaaaatctttgatattgtgacactactacaaaaaaagactttttatcccggtttttaagggcattttatcccgattttcgctaaattaaaaaccgggatatatgccaatgtgataaaaagtcatactaaaaccgggattaattgtcaaaaatataataaaaaaaataaattcgaaaaaatttatatcagttccataaaataaaataagaaatagatatacataatcgatatacactcaaaacaaaaatttatttacagattaattaaaaaaacatacaaaacattttgaactgaaatattcccattaatcaataaaa

SEQ ID NO: 143320 - DNA, 574 bp, Cannabis sativa
agccatgatttctggtgtttcagcagttagtgaaactctttcttgcctcttgttccttctgtttctcctacaagtcttctcgatttcaggatcaacgggtgatatgactccttatccttgacgacgcatacacttaaaattcctgaaatagatagagacaatattgcaagaaacagattagcaaatagcaagaaaaataaaccaaagcagaatttagtataattttatgttatattaatcttatacaattccccggcaacggcgccaaaaacttgttacaaaaattattaaatactacgcaagttcacgcaatcaagtaaaactcacataagtgaggtcaaaccacggggaattagattaattactattaaattatacttatgattctatttggcaaatcaatacttttaggattgaaaaagaatgaaagtaattcagaaaacttaagtaacacaagtgaaaaattgataaagaagagataatagggaggagaatcctgttgtatgtttacctaattgttaatgtctaattgctatccttttcttgaagtgaatgacaaattataaattaacct

SEQ ID NO: 143321 - DNA, 543 bp, Cannabis sativa
aaggatatcgttaccattatggataatttttctcgttttacttgggtttatatgctcactaacaaatctgatgtttcctttctaattcctcaatttttttagcttgttccaactcaatattctatgaatattaaggccatttgctccgacaatgccaaggagttcaaccttactgccttttatgctttgaatggcgtcaaccattttcattcttgtgttgatcgcccccaacaaaattcggtggttgaacggaaatatcaacatatattaaatgtggcccgaggtcttcttttttaatcacatttatctttaccttattggagttatattgttaacactactgtttatcttattaatcacactacttctaggttgcttaagatgaaatctccttttgaactcttacatgataggcagcccccttatgatcatcttaaagtttttggatgccttgcctatgcatctactcttgatgctaagcgccataagttttctccttgagctaaggcttgtatttttattggctatcctcatggtatgaaa

SEQ ID NO: 143322 - DNA, 960 bp, Cannabis sativa
gcaggggcggagccacagccaagagaagagtggccatggcccccccaacaattttaatatcccttttgtatatataagtaaatatttatatatttataaataaaaatacatatataaataaaaactaattaatatatataatatatgatagtaaaatgtatagacaaccaataatatatatatagtataaattaagtgtttaatttattaaaaataaaataaaaattaattttttttagaagtgaattgatataaaattaatttatatgagtagaaggtaaataaaataaggcaattgcttattaattattaatttttaattttttcttctactatttttactacctattattgttatttttttttttacacatttgactcaaaatcattcactaattgataactttcatagttaagtgttaaattttattaaatataaaaattattttgttcatatatatattttgttttataaaatatctactaaatttaaaatttaagatatgctttaattaaaagtatattaatatttttaatttaaataatatagagtactttttattttattttgatattttttatagacattttttgacatacaaaagaatttatttttaattttaaaaatgaaaataaatatatgataaaaattttattttatactaaattttaaaatttggccccccttgcattcaagtcttggctccgcccctgaccattggattcctaatcataaacttaaatctttctacacaaataaccctccctcctcttctttgctgtactatttcattaatgattcaggtatttgggatctgtccaaactcagagcctattttgatgagtccatgattaatgatattattaaggttcctatttctagtctttataataaagtgttagtttttatgccctaaataaaactctatttcaatgtaatctattttattcaacatcaat

SEQ ID NO: 143323 - DNA, 616 bp, Cannabis sativa
gtgtcatactcgtcaaagttctcttcgtactcttcgtcattggcctcatcttgctcttcagatcccacgttcactcttgaggctacttcctcgtcgtctaggttttgagcatcctgaggaggacggggctgacgtgtattgttgcgagtttccaccattgttgatccaacttttctaattgttgtctgtttaaagacgcttttttcacctctcaacgaaagcaccaaaatgttgacagaggttttcggcaaccaatcaaataatataatgagaagagttgtagaaagtttaatgtaggagatttttacgtggttagggcattaatgagccttagtccacgagtctttggtatttatgagattgtttattatagagaatgttcttggtggatttctctcctattttctgtcttcgattccttcactaaaatcgatcgacccgtttacagtttgtttgtggggtatttatagtgtttttctgaggggatccctagaaatggatcacttgtctttctgtgtttagcttcctaggggcacatattcctagtagatactaaataggaaatacatgacctataccgtaggtatcttaggagttaggtggatataatctttta

SEQ ID NO: 143324 - DNA, 623 bp, Cannabis sativa
  modified_base (567)..(574): a, c, t, g, unknown or other
tttatcttattagatatttaattagatttgataaaaataatttaaataaacatagatattttaaaattagtttgattttaaatttttgaaaagatattttaggttattttaagaactctaaattttcaaaatagttggttagttaaaatgataaattaattatcttaatatcttacttcacaatttgttacatgaatattgtgtttgttttatttaaattgtttattcaaaactttttttttaacaaacccattatttatttgatctaaattgttatgattaacttgtttattgatccaatgatctgattttaattatagtccgattgtcactagatcttataaatattttgtaataggtaaatttgtatttattttatctgtgtaaacctagaaacatgatagggtccctccaaatcaatttgacatgtgtgagcctatatgtttgtttctaggcttaaatgcatataggaagcccatttatttctaaatatttaaatgaactaggttgctaaagtaaaatattactcatatgatagttttatttaggcccaattagtattggacnnnnnnnntgaataacaattatttaatgaaaggttaaatttctctcatttgggcctt

SEQ ID NO: 143325 - DNA, 735 bp, Cannabis sativa
  modified_base (238)..(239): a, c, t, g, unknown or other
  modified_base (306)..(315): a, c, t, g, unknown or other
  modified_base (387)..(406): a, c, t, g, unknown or other
gggcataaaacccaacaagatcatcctattctttttatactattttacctagggttagatttaaattatatggcattaaaaaattgataataattgggaaaaaaaataccttaagtggccggccacatagtaaattctccaagtaaattcaccaagtaaattctccaacttattaattcctcctttcaccactatagattttgaattacactcaattgtatagaacactctatatgtnncacgatatagatacgctatgaaaaattaaccatctttctaattctaataatcaaagatcctctatannnnnnnnnnatcgagtagggataaatttaccatttcactcctcaatgtattttatacttaaaacacttagcttcctataannnnnnnnnnnnnnnnnnnntataattactaaaataagagctcttccatttatctctattaagctaggctcagaggaaatcaccatatcactctatgtccagatagaagctatagattccatgtctaagattagagctcccactcaattgtactatcatgttcccaagttgtacgtgttatttgaaacaaatggtaggctttaactaacaactctaagaacataaataacacacttgagatcgaacctaaccatgtcaggattgagatctttcgatctaagatcaaggagtgatattgacttagaaagatgcaatggtaagattataatatctttaccaagatcaatat

SEQ ID NO: 143326 - DNA, 605 bp, Cannabis sativa
gctattagaatcacatcttagtaagtatagcgggacaataaagttagacattggaaatgtcaggaataatcgggattttagaatttcccaaaatacccctaagtgatttatgaaggttttgtgagggcaaaggcattttggtctttttgccgatattgtattttatcctttagtggacttagtattgttttaataatttgattttaagttattttcttggctgaaatagtagataaaaactctttctattattttaatatttcatttttacaaatatcaaaaaagaaggaaaaatcacattttggtctcttctctctctctctccttcgaaacccttggggaaaggcagcaacttgaggtgtttttttagctggtttttactgattgtaagttgattcttggaggatcctttgaaggtatagttttagtaaccttctctttagtttccttttattttagagtaagaatttttgcatgaattgttagttagggttttgtggttgctatttatgtttgatgttgttttcagaggtttaattatgatagattatgatagtttgagcatgaattaagggttgttgatagatttaaccaagctttgagtt

SEQ ID NO: 143327 - DNA, 916 bp, Cannabis sativa
aaaaaaaattacatttttatgttcatcccttaattttataaacatgagctaatatatagctattaaagatgctttttaaataaaaaatgtcatttttcttttatttaaaagtattaattggtttttataagaattttcttaaccatcttatttgacttggaaaatataaatcatcacaatattaataatatagcttggaggacttggctagctggaaattatggaccacaaaatcctatatgctttttttcttttaataagataaaataaaatcctatacgtatttgtattttactattattatagcttttttttgggtgaaaaattattttctaatgctaaattcatacatatgtagatttttttttttgtgtgtgtttggacttttttatgcttctattaatggagataagggagttaagtgtcaagttaataatcacgtgacagtttttaacgggtgcaagtcattaaatttgtatttattatttcaaaattaatttaaatatatcaataaaaaaaatgacatgtaaataattacttgacaattaatagtcagatacttacaaaagttttaaaaatataatttaagtattattactgtcaaaaattaagtttaagtatttatttacaattgagagttaaacttaaatatttacaccgtaaattacttttatatacatggacgtaacttcttcattgctttgtatgctcataaaaaataaatatataaaaacaaaagaattttttttaagtatttttattattatttatttagggtgttaattaatttttttggctaactaggatttttgtaacctaaactttaacatgtaccaaatcatgcgccttgaacttttttggctgttaaaaattctccttaaactattgagagtgtaagatttaaggacttttgtct

SEQ ID NO: 143328 - DNA, 590 bp, Cannabis sativa
  modified_base (458)..(467): a, c, t, g, unknown or other
tgggaaaaacttctctcttagaggaatacccctcaagatatagctcgcaagctaacctcatactcccatacggctcctccattccacatctcactttgatgaagatgttgaactaatgcatcggtcattctgactctttgcctctcaacatttcaatgttgccttagtaccatagtcctgctaactttcaccttaggccaacattgctatgatgttatcttagtacatgagtcctgcagactttcaccctagataactggctctgcctgtgtcctgagtcttcttgactttacatatggaacaacaatcaatctacatgatactcatctcgatgcttgtaatgaataactagtttgtgagtgaaccgtgaaggtctctcccccacttcatttgttggcgtcctcgacaacatgcccacacgtaaatgactgaccgccccaactcttcatgcacaccannnnnnnnnnaagtgcatcccgcaggatgtgactcataagttaactatatcatatagcacccctgttgatttccacatgcatgcaatgtctgctcaaccatccaactgattcacacttgcatcacgcccttct

SEQ ID NO: 143329 - DNA, 997 bp, Cannabis sativa
  modified_base (135)..(138): a, c, t, g, unknown or other
  modified_base (333)..(333): a, c, t, g, unknown or other
ccactcattgccaattggttttgagatggaaccctatgattctcaacatggtatcagagccatatccctaacggacttttcgatccacacctattcagatggttaaccagtcgcacgagatccagatggtgcaannnngcttgagatccgaataaaaataagcgagctaatggcatgacttgtgataaggtgattcaatattggtgagcaaaaatagccaccatcttgaggggggatattggaaaacattgtcccacatggaataaatagtagagaattgagccatatataagaacatgggctactcaactcattgccaattggttttgaganggaaccccatgattctcaacagtaggtttcttggattttttgctcacccctacctatcataacccacgttcgaaaattgtatacccacggtcaaaagtcttttctcccatcatcttctccaactcccttaaccgaactatccactcttttttctcctgttttttttgtttgaacttgtatagtacttgcgatagctcattcttcttcgtccccttatccattgccgaaaaaagcggctaaaatgggtgttaagttcgttgcaagcaaattcaaaagaaaaacgtccagttgttgaggatgatgacccgaactttgttctgctagtagtgaaatgcaacagtaagaagaaatctaaaattaatgttcctccaaaaatttcacccaccgagagtaggaaagggaaggacgaagctaatcatagttcagaggtttgttcctggttttatttttgtttttccccaacattaaaattttgtttatttatattgtgggttgtgtatattcttttgatttcagtttagggtttagatttgtgtagttattataatatttttgtatcgttatttaggggttcataaaatagccgatccaatttaatctgcacgatccaatctaatctaatctgcaaagtgcggatatctgcacttgtgcggattggaaaatt

SEQ ID NO: 143330 - DNA, 734 bp, Cannabis sativa
agtagccttcttctctgttgatgttggagttggtgccgattgatcttttatttcttcatccactggttgtaccatatcaggcccatcatatttctttccctgaggacgagttgctatatgagtttccaattgccccatccgagtttgtaaatctttaatggaagatctagtctctgacataaattgcaataataaatctgtttgaagaccagaatttccactagagctttgttgctgagtctgtttttggttctgtgactgaatttgatttctctgttgatagaacccactattccttggatttcctccttgattaaacccatagttgttgttattttgaaagtaatttccaatggaaaattattcacatcttcctagcactctgcatagggatgaggacctccacatagctcacagaccactcaagcttgttttgcttgaatagacatcaattttgttagggcctctacctgggctgtcaacttggtaatggcatccacctcaagcatcccagccaccttctttgtttggctactttcagttggccactgttgattattcagggccatctcttccagcaaatcataggcctcatttgcacttttcctcataaatgcttcactagttgctgcatatataagggttcttgtgttacctaccagcccgttgtagaagttgtgaaccagcatccacttctcaataccatgatgagggcactttctgatgagatcctt

SEQ ID NO: 143331 - DNA, 1118 bp, Cannabis sativa
  modified_base (1067)..(1071): a, c, t, g, unknown or other
tacatgtcatacaaaattaataaaacgaaaactagatagatgttgaaaatacgaaaggtgcattactgcacacctgatttaatatgatatcgaatttcgcataaaaacatattacgtactattataatatataaaatactaacatcactcttttttttatccttcaaaatacacttggcaatatctttaattcttttctatttttatacatcaaagttgtatatattacactatctattaatttcctaaattttttatttacatcatttaaatattctttctctaaataaattttgttgattttaaatatacattaatatacatatataaaaacagaattaaaaactaataaaactagtttagaatagtaaatagtattgtcttagacaaagtgggcccaaactttttgagggcatgagcaaaagtttaaaattggaccttttaaaaaaaaaaaaaagtaaaaaaatattgtgtgcattagaccacaattatattactaatttttttttaggatatgttctaaatttttaattataatttttttatttatgtatgtgccatagaaaaattaaaaaaatatatatgccttttctttcaaaaaaaaaaatagaacttaaaaaatggagatcttgtgtaatagttcaagctgcgcaatgtttagatcggtcctggtcttagatatataatatttaatagggattttatcataaatatgggaaaatatggtagattacttttatatgtcataaataaataatgcaaaaaaattaaaaattaaaaaataattaaaatttaaaatataggaaaaaacaataaataaatttaacaaaacttgtaatattaagtttcgccggaaaagtcactaacactggaaaagatactgaaaaagttaccaaaaaatttattatcgccggaaaagtcatcgaaaaagtcactgttgccggaaaaattgatggaaaagtcatcgtcgccaaaaaagttactggaaaagtcaccagaaatagatgtctcagatataaataaaaatagaattggtttcattacataatgaataaaaacaaataacnnnnnccggttataattgaaatataactaattctgtaacataatgaataaaa

SEQ ID NO: 143332 - DNA, 580 bp, Cannabis sativa
tataatgaaatgattatttagtttctatgaagaattattttgatttggaagtaaaattaataggatgattttgttatgagtttctttaaattcattgcactatatttctttcttaaaaatatggttgaatttttaaacaaatgactaatcaagcaacaagaagatgacgatattttgattataaaactatctcaactataagtggtaaatgagtaataacgttatgaaggatcggttttattaaaataaaatatagtgatgacattttatttttcattttctttattattaatatttatataaattaattttaaagaggaaaattatactattccaatttttttaacatatattttagttatgtatacgagtttgaattttttttttttcctttttaattatgttatttaacttttattatcgatcatctattataaattttgaaaatccttttagctccatatatcagtagttattttttaaataatttttcaatagttttcttataaactttctaattttatgtattttgtgaaattattatcccagcatctactttattatcttttagtaataatta

SEQ ID NO: 143333 - DNA, 1222 bp, Cannabis sativa
  modified_base (895)..(897): a, c, t, g, unknown or other
tatatattctggatttaacataaattgtatattaaaaccataaacatgaaaactacatgtaaacttaaatgactttcaatcttctattgatagcaaataatattttattaaaatagattatatttagggcataaaactataacaaactcccacttgcactaacataaaactagaagtgcatttcaattaatctattgtcttgatattcatatcaagtgtagtgtgtttaactttacccaagcaataagaactgtaagattgtaacaagaaatagctttctctaccattacttctttttatattcataataaattatggaatatcgttttctatatgtattacacttatagggatactaaattctttactgtctcataagtgcatctaaatgtacagaagacataactctcattctatccaaaatgaaatagagataaagcaatcaagagctttctttagtttaaataacagtgtcttttaaaagcaactgaattatttagcttcactggttgaaataaattattatagatgggttcttacacccttccagaataattcctccaccctagagtaattattatttccgatataaagttctgagttggtgtagatataaagattttatatacacccctatcatctaacatgtaggtcacttttagagattctttcttgattgtctccctatgttcccttgttggattacatctttgagggctcccactcaatagtaggagtctggtttaatgcatacagaagtgtgcatttaatctcttactattggtacttaaggacatcttgttgtgacattttatctttatctagaaataataagtttgttttagactaagtcatcaacatagcattctagtattaacattaatgtaaaatactnnnttaagattaagtaatcattagagacaccataaaatatttcacaaggactagggtttgtgcttgagtcttttgaatagacattgcatgatttcttatcttatcctcataattctgataagttataattatctatgtgaatggttagattaacttgtcttagctttattttaaagtttctttcttgaacatattattgtaggtcatcactagtgtctgttgggattttaagctctaaataaaacttattttaatgtaatcttatttgttatcaataaaagataaaaaattattttatgttgcatggttcacatgattactttcatga

SEQ ID NO: 143334 - DNA, 797 bp, Cannabis sativa
tgtgagcggctgcagactcactggaactatgaaagggaacaagatgcatggatgatgcaaaatttttgtcgcaaccagtctaaaacagccgctgcatttcctgctttcctggaagaaatccttgcgccttggggctccgttgataatgaagagagggactccggtggtggagagtcggattgttgagggagtatttcttttctctttagttaattaacttagtttaactgtgatgtgttgtgtagatgaaataagtgtgctagttaagtgttgctactgtttgtgtttgttatgtgtctactgttgttgttaaatttagtagtgtgtgtagtaagctttatgtgtgttgatcatttttttttcatgtgtgttataatttgtgttagcttgcaaatgagaaaaatactgcatgtgtttttcagcttggtttagggtagcgctcgatgatgaaaaatatccattttgctccacgtgtggagtgccttggtttgtgtgtgaaaatgctaattttaagtgttattcttgtctaaatgctagcctatgaggaatgatttcaacgtttgtgtgcttgtgttatcccaccataccttgagtttttagaatagctaacactttgagagagtttaagcatctagaattagctagtgtaatccttgaggcgaactcctagcaagctttataacttagaaatgatttaggccatctttggacgtttgagcctttctaaccttccctatgaaatcaatttttccctagtcacccaaggttgagcaatttagcctattcttgttgtgcaa

SEQ ID NO: 143335 - DNA, 594 bp, Cannabis sativa
gggtgtgggtgtgggtttgggtctgggtctaggtttcagtccgtgtctaggtctgggtcttggtctgtgtctgggtctaggtttaggtccgggttctggtacaactttgggttctggtcaaggttccaggtcatgggtcctgggtcgtaggtactggcacaagtctgggaccgggttcgggtatgggttcgagtttcgatcacgatctgggtttgggtccgtgttcggtttcgcgtctagatccagttttggctccaggtccaattcctattccaaggtcctgatttcggttcttgttccaatttctgtctcgggtccgagtttttgtttgggtcctagtttggaaatggttccaggttcgggtcttggtacgattccaagatctacacaccgactacgggttgggtccaagccccgagtcgtgggtcaagatcctgatcccaatctattgtcccagtctcgtttcgattcgaatcctgcatcgtgttccgtgtccttgtctgggttcgggtttgggatcgagatcggggttaggtcttgggtcccagtcctagtccttggtcccgattttggctctaattttgagtttgggtc

SEQ ID NO: 143336 - DNA, 593 bp, Cannabis sativa
taataatattaaaaaatttaatattatattaatttaataaaatcactacaattgttaaaagataataatactgtaaaatcggtaaaactcaataatgtcccataagattataatccatattatgattatctcggtagattaaaaaataatctttcacaatattgaattgtttttgtctctcgattgccgaaacaagtaggagtatatgagtataccacttttaaagatgtgcattgaaatttatttttattaccataaaaataatttatagtattcatatttaaatttacacacaataaattaaaaggtgctcttacaatgcactctccaaataaaaaagttacctgtgtaatagacagtttgaaccttattttcagcgtgttaaatttatctgaatttttcaaaattttgtaggaaattttaaataagtataatgtatgctactataaaaaaaaggtctcaaattttgaaacaagtagaagtatatcggtgtaccacttttaaaaagacacattgtaatttaataaatacaattaataatataaatatatatataaaaattaattatataaaaaactatatataataataaa

SEQ ID NO: 143337 - DNA, 1196 bp, Cannabis sativa
aatagaattcatattcatttaatcatataaattatatatatgttacctcataaagtaaccatcttcattacatcaggttgcctaatcaggcaagcccgtcccatagcctggcgcccatatatcgtacaactgcatcacctaatcagatgagcctgtgctaaaaatctgcacccatatatcccataattgcatcacctaatcagatgagcccgtgaagcaacctggcactaatatatcgcatcgcctagtaaaacaagcccatacctaggcccggtacataattccatcacctaatttggtgagcccgtgccacaacttagcaccaatatattacatcgtacgacctcgtacctacgccccgtactcatatatcactaccgcctgtacctaataaggtatgatacacagcatatcgtatcacctaattaggtgagcctgtacctacgctcgatactcatatatcactatcgctcgtacctaataaggtacgatgcccgacatatcgcatcacctaataaggtgagcttgtacctacactcggtactcatatatcattaccgcgcgtacctaataaggtacgacgcccgacatatcacattacctattcaggtgagcctgtataacgcattcatggtatcatcacattatcattgcttaatcaatcaatcttttcattatataacaataataatcatatctcaatattaataaattcacaacaatactaattatattagaatacaatgtataatgcagtacaatatacttttcttacctttaatccaagttcatacatgttgtccaactcaagtggagaactatccccgatgatcttgaccctatgtcacaataacagtaaactaataagaatttatctaaaaaactacttaatattcacataagataatctaggattttctatcaaaccccgcggtataattacactaaaataaaatttatattttggctctaaaatatacaccatattgtagagctcattgcaagcttcaaaacggtatatagaatttctaaaatgaacacccgagtaaaaagttacgataaaaatacaaaatctagtctcttaggaatttctaaaaattgtaaaactcgaaaatcccaaattttgcactcaccgaaacactaccaaacttatccaaatcactccaaacttcacagggcacatatataccataaat

SEQ ID NO: 143338 - DNA, 596 bp, Cannabis sativa
gagtaaattggcttaaagcgggtgataagaacactaaatatttccataaccgtgcctctgcgcgaaaacgtaccaatttcattaagtctctaactctggacgacaactctcaagtaaccactctcaatgatattaccacctcttttgttcagttctacactgacctctttgcgtcccaaggcactcacactgacgctatgacttttgctacgcaaggtctctctaagcgcctcacccctactcaatcagcgttccttatctctcctttcagttttgatgaagtcaaagctgctctctttcagcttgcgggtgataaagccccgggttccaacggctttaaccctagttttttcaaaaaaaattgggactctgctggcagggatctctgccaggcggccttatatgctctcactaccaatgctgatcttaggccggttaatgaaactattttggtgctcatttccaaagttaaaaacgcttcacgagttaaggatttccgtcccatcagtctctgttccactctttacaaggtagtatccaaaaccattgcaaatcgcctcaaatctactctaccagaccttatttcccataaccag

SEQ ID NO: 143339 - DNA, 1711 bp, Cannabis sativa
  modified_base (1074)..(1077): a, c, t, g, unknown or other
  modified_base (1473)..(1488): a, c, t, g, unknown or other
  modified_base (1609)..(1613): a, c, t, g, unknown or other
gtattgcggacaactttccatgagtcgcctctgtcatgaatctgccgatgtatgctcggagaggctcacctggtctttgcttgactttgaccaagtctcctagatgcaacagaagttggtgagaggaggggaattgtgcatggaattctgaggagaaggccttccatgagttgaactttctaagggctttatttgctgggcggcttccgagagggtagcagaaaaaattctgcaacactcatcccctcgtatcccttgtagatccatatgcatctcgaaatacttgaggtgggagagaggatcttctcttccagtgtacgttttctaggttggcatttttaacttgtggggcaatgccaggagattgatctcgggagagaaagaagttcacgtgctcggtccaactcaagatcattgtttctctgtccagccatgccttggaacatactctttagttcgtctagttgtgcttgcatggctggactaacttgttcgacattttggccaatttgagtcacgtcagtatctttctgagcgggaatttgagcacgggttccatgctgtacgatcgtcgtgccaagctgatcgtctactcctctcctcctgttcagatcgcttcttagatcatgagtcgtccccaacctatcgaatacagaaacgcctggttgtctcagcgattgattggcttggttgacaggtggaatggcaccgttagcctggttggaattatcaggtatgacttctcctgatgaattactagacaatgtctgcccacctactgcttggcccacaaggggaacttgtgatcggagatttggcggctgaccatttatagtgtgggaagtattcatcgctggatctttgtcagtttcacccagggggatgacattcgggggttgctgcccgacattttggtaggctcttcgtatcagcacagtagcttgctgactacgattgtcaatctctgcatgatgggcccttaacgcttccatctccttgtctctccactcggtaaacatgcgcctctgctcttcaaatgcgagatttaccacagcgcggagttcctcctgatcnnnntgtagggtgttggtatgaccctgcatgagtccaagagcagcacagagatttcggatctcattatcatctccaatggtcgttcgagcgttggtggcaggcgaaacgtctgtgttatgaatgccctcgctgggtgctgaactggtattcccagtctcttgcacaccaggcgtgatttcatccacaggagtcctcacaccatggcccgcgtttgacggttgctagggattaacagctggcagaacccttgtatatcctggattttgcaatgcaggatccaccgcctgtgcatttgctagatcaaccaggcccctacgagtatgtaccaccatcgtacttgtcgttaaatttagagtgaagagtaattattgatacttctctcaatgaaagcaccaaaannnnnnnnnnnnnnnnagccaacgacaatgagtctaatttagtaagctacaagtagtttaaaacgattgaaatataataaagcaatataaggacataagaattttatagaggttagccccgagcagttcggtaatannnnnatcctcgttatttgtattaactcaagaacaaggagaaaggttctttttcttatagctcttacaaaaatatctcagaatatgaattcttagataatatc

SEQ ID NO: 143340 - DNA, 556 bp, Cannabis sativa
tcgggtcagccaccaccctggccgatggctttaacacccaccatggcctacggtggccatggaggccacgatgaggagcaggaaacacggagaggagcagtcgcgggtcactcatgaccgaaatagacccattcaagtctcatcgtgcatggaggaggaaggcggagcaaggggaggatcaaacattccggtccatggctcacggtggcaacatgggaggttcagagacctcaaaacccaattgggttcctccttcgatcaccgccaaaacatgtcgcatgggtctgagtgactcgactggtccatgcatttgtgcatggctagatacttatgtccctcttgcatgcatggcatgcatgatcctctccttcatttgggcatggtactcgaagccactcaagtggttgtgcatggccaggataaaatttttgagctcacatgcatggatgggtttcaagtttagaaactgagctcatatgcactgaacattacatatgtatataatttttacataaattaatttttataaaattaaaactacaaaaaaaaaaaaaaa

SEQ ID NO: 143341 - DNA, 711 bp, Cannabis sativa
  modified_base (63)..(70): a, c, t, g, unknown or other
  modified_base (151)..(154): a, c, t, g, unknown or other
  modified_base (256)..(260): a, c, t, g, unknown or other
aattaaaattaattaactaagtcttacaagcagtatgaactcaactagtatggggaccatggnnnnnnnnaaccgagcttccaataagtcgaaagctataaggaattaagaaagctataaggaattaatgagagagatttttacgtggttnnnncattaatgagccttagtccacaagtctgtatatttatgatagtatttattacagagaatgttcttggtgatttttcctctctagttcttatgaaacccagannnnncgacccctgccttaatgagtttgggggtatttatagtgtttttgtggggtgatccctagaattgaggtagatgtctttctgtaattctcagtaaaggcagacattcccaatggatacatcataggatatgcatggtctaatccctaggcttcgtaggggttcaatggacgtagtcctttatccttcttaactgatgtgattcctcataaacaagccgtcactaggcttactaatcattacgtggtagctgcacaaagggggttacgcagtcagactttaagacatatggcaatttcaatacgccttctcccatgcggcattaaatgcgaggtgactgttcatataggatctgacacctcccgaagattcttagttgtagcttttctctccgggagtatgtgagactcacgtgccctctccgggaggcatgtctaaggctgatccctttggc

SEQ ID NO: 143342 - DNA, 577 bp, Cannabis sativa
tttttttttttgaaaataagggtaaagttttattcaacttgaaatgatatcatcccttacaatagaaagcaaatttgatggaacaggaaaatcatcaaacatacaatctgacataaaacaggattgccttgcaatgcaatgagcagccctatttgcagatcgtttaacaaaagaaataaaaacatcttgtaactcagataataatgaacgacagtcttgaacaagtaacccaaactgagatggcatgtgaactgaacctttgatagcctgaacagtgactaaagaatcagtttcaatttccacatcagttattttcttcgtctttatccaactcaagacttctttcattcccaccacctcagcaatctcaggagcaaccacaccaattttactccccgaaactgcttggacaagcttcccagccgaatctctaactatgaacccaaagccaaaacgattatcactttcgaagatggctccgtcgacatttatcttgaactttgtaaaaagtggttttgtccaatgctccttcccattcccaagattaacatttagtaatggaaatgacccttgtgtt

SEQ ID NO: 143343 - DNA, 615 bp, Cannabis sativa
  modified_base (56)..(64): a, c, t, g, unknown or other
actctcgtcctatatcgaaatttggttctatttcactatagcataattgacactcnnnnnnnnnattttgtatcaaaatcataaataattaattgacgggtaggcaattaaaaaaattaagtacgaatgaaatagaatacatagaaattaagggaaaattaaatcatattaaaaccaaaaatcaatgtcaaacaatctccaaaattcgtactcccttgagtgcttctaatttccttctgaattgcttccaaaaataactgaagtccacttcatttatagccaataagggaaaagaaagatagaaaagataacgccacgttgaaaattcctaatttgccttgaattagatgggcgggctgcgacatgcacttctaatgtcgcggcccgtgtgtgaaatttcttacgtctctaggcttccattgacacgtgccgcggcataaggtttccatgcctagacataatctccatttatatcagttattttttagggctattttcaaaaataagagaaaaattattaagtttatgataaatatggcataaaaagtaaatgtcactatatatgacattatctaaccaatcaaactaaaaatatagttttttttagaaaaaaaa

SEQ ID NO: 143344 - DNA, 733 bp, Cannabis sativa
cacttatgtacgacctaaggaagccttttagcattgtataagggtcggaggtcactgtttccagtttcaccattattgaagcttcaaaggtacgacttgaaacaaaaatgaattcgaacgtgtttaagcttgttcttgggtcaagggaggttagatatgagtgtatgggaccctaaggattgtttttgacgtaagaaaatgaagctttaacgtccaaaacgaaagaacacgattttgactccattaaagacgataaaccgccaacgaaggagacaactctgatctgccaacttgggcctgttttcttgggttgatcttgatcgctctgaggtcctgagcactgtggagagcttccccaatcaaaaggacgtgtcaagagcaatcgaggacaaagttacactttgccgacgacgaaatcgacgtgaacgtcggcgaccatgttctgggctattttgaggtatttttctcaaatatttttgtagatttcgattccttattttattctaaggtgtttggtgaagtttcataattttctgaatttatttggaattattgtgaattatttagtttattttataaattaattatgaaaaatacttaggttgctcagaaaattctactttattttatataatgggctatgtgatataaactactataaaatttatagattgaattttcaagcgattttgtatttttcatgaattatttatgttatttcttaatttaatta

SEQ ID NO: 143345 - DNA, 529 bp, Cannabis sativa
aacctgaacccagatcccagatcaaaatccagagatcaaaatccagacatcaaaatccagacagaaatccagacagagacctaaacccgaatcgagactaggactggaacccggacctagatcggggcccaaacccacacaataaccgggacttggacccagaatcaagatagggactagggaaatagaactaggactgggacctagtacacgacccatacccgaacatgaacttaggacccagctcaagacccagcaccagaagtagaaccagacttcgacccgagactgggatccggatctagacccagggcttcgacaaaacccgtagtctgtgtctggatttgggactcggcctttgacccgaataatgataaggacccgaacccacacgcaaacgtgaaccctatcccaaacccaaaagtggacccgaaccgtaccctttacccaaaattggaaccaaaacgggaagttgaccgggaatggaactaggacttggacatggaatcataactgaaattggacatag

SEQ ID NO: 143346 - DNA, 586 bp, Cannabis sativa
atttttcgagatatgtacgagtgtaaagagtaagaaaaaaatttattaaaatttaccctaaaagaataacatttttaattttttttaattagggggctatattaacaagctttaacgcgaaatcagtcttcatattcacattttagtagtacaaattcattgtaactagtgggaaaaaatatttcgagatgggttcgaaccacatttcacaaagggttatcactatcagaaatgtgagattttaactcttttgattatattgattgtcagtgcttgaaaattacttttctctcaatgtatccaatataaaaaatgatgaacaacggtcttaacttcatccttatgaaatttcacaatttttcaagatgtgtaaggcgaaattttaagagaacactaatgagtgtaagagtaagagtaaggaaaaaacttgttaaaacttatcctgaaaagaagaatattttcaatttttgaattaagggcacattttattaaaatttaacgcgaaatcaatcttcatattaacgtcttagtagtacaaattcattgtaactagtggcaaaaaatattccgagatgggtccgggcca

SEQ ID NO: 143347 - DNA, 589 bp, Cannabis sativa
aataaaatattatattttggatgatgtggagatatagagcatcttcaaagaatgctaccattgaagatgctcttagttgagggtagaattagttcatacgtgtcacgctaggtggacttaattctcggtggaacgtggttaatgtactggagagagagttcttcactcacacatcaattggagttgaaaatgtgctgttggacacgtgtcaagctcaggaacttcgattagtcttgcgtgttagatagctgaaggaaaataactttagtctcttgtttgaaagctgaaaccaattacattgggccttatgtgatttaatgggccacatgaatgcataaactcaagtagatcactcctccatgttaatttaattaagtggacttataaatgtgattaaaaatagggggttttttcagttatatacaaatattgtaaaatatttataaaaatagcgttagtcaaataaatatatagtagggaggtgtttttaccgaatattagaaaaaacataaagcccactaatattagaaaaaacaaaataagaaaagaaactgattgagataacgtttgaattgattttttttttttt

SEQ ID NO: 143348 - DNA, 860 bp, Cannabis sativa
attaaacacagaaatcctataagctatctaaaccatacaggtactctcgtcctatattgaaattcagttctatttcactatagcataatcgacactcttttctcagatctcgcatcgaaatcataaaacagttaattgatggtcagacaattaaaagtaattaagcacgaatgaaatagaatacataggaattaggggaaaataaatcatattaaaaccataaagcaatgtcaaacaatatccatctaactctaatcaagtgtttagctacacaatgttgatcatggaagcaaaatcacacatattaactttaagaaagagaaaaagatagagaataaaataatgctgaaaaccctctgcagaatgcctccagtattgacttctatctttaaaattcgtactcctttttccctctaaatttgcttgattgaaatcaacttcaatttaccctttatataggctttcggggactaaaaagatagaaaaatgcacatgttaaatacctattcgaattaggaaaccaccaaaatctacgtgagacaaaaaatatgatttttgtgctgtttaggggggtgggccgcggcccagctttatcatgccgcggcccgtgttggaatttcacgtttcgacggtgatttttctattgcgtcgactgatagtattttagccataactctctctatattgctcagaattagacgattcaagacgttccagaaagataaaagagagatctagaacttttatgttttgactttttccaaaatataaccagaatatagtcgaattcagatttgaagtttcaactttatttttttgcgtaattttctctattttaaatatcatctttttgtgagata

SEQ ID NO: 143349 - DNA, 1791 bp, Cannabis sativa
  modified_base (495)..(496): a, c, t, g, unknown or other
  modified_base (751)..(765): a, c, t, g, unknown or other
  modified_base (862)..(880): a, c, t, g, unknown or other
ggtcgtgtgcttcagttggaggactattcctctgaagtgcgttctattattttgaacgaatttattgattaatagatcttatgatttttattcaaagaaaaaatatatgatatttttcttaagatatttaattaaataacaaaattatattgatgttgaaaattaatttatttaatgttagaccgacataaattagaataatttttctagttttattttattttattttttgatgaatttcgaaaatgtatttttaggatacattggatttcgaattctgtcatatatatttatagaaaattaaatttgagttttggaccaacttaaattaagtaattttcataatatttaatggaaaattaatattaaggatggaaaataattttttaatttttcagatcttcctagggtataattttacaaatattaaattaaaatttatatttagaattatctaaattagtaatttgaattaaataaatatatattaaaatnnatagattaaaataagtatcaaatgaaaatgtaactctttaaaataatgagctttagttataaggacattcgatctccattgttggttctacgcagttcttagtttagtgagattcatttccaatagatggacgttcattagtaatttaatgtcgtagaatctcgaaagataagtattgttgtaagtgtattattcttagtaacgttcatccaaatagtggttgctaagaataggacttacaaggtatgaaacaannnnnnnnnnnnnnnaaataggaatgaccttgactctcgactaaaataaagcaacgttaaattctcttttcgatcgaataaaagttcgctagaatggtttccattttagatnnnnnnnnnnnnnnnnnnnatgaatgatatctttgactcttgactcaaaatgaaaccttgtatcaatttgttggaaactttggaaattatttaagatgcgcttgttttgtattttcacatgcctttcttacttgctacttgtatgataattttttatttatattgaaccatgttattatttgttattaatgttgtagtataattttgagtcttcattgttggtctaacttaatttgttgttttgatggcacaaatcccaaaggattgtcatccgttagataaacataatagtgttagatctcaacagataagtatttgtaaatgcaacatctagttgtacatcaaaagatgataacttagattagtgtttacaatatgaaacaataaagagtaagaataactttgactctcgcctaaacaggacatcgttggattcttatttaattcaaaattatccttaaattcttcctcttagctttttcatttagaattttcttaaatagtatatcattggatgaatggtttataagtcattcgcttatgatgtcattctaatttctcttatgaaattaaatggcgtagatgactatattctcgacattctatcccaaaatgatataaatccttgatcttagaaatctcctacttgtatatgtttactttaggaaatttagacttagagttagactagtagtggtggtacaagaaagaataattactcatgtacacttagtacaaatttaagtctttgactttaaattttagttccaaatagaaattttatttcggtttcttagaatacattggaaaatatagtatgactttcacaagttattaatatccattttctatcaatagattcaaactgtactttggtgtatggaatatgagtttagtatcctgtgaacaggatccacttggactattcta

SEQ ID NO: 143350 - DNA, 530 bp, Cannabis sativa
  modified_base (45)..(74): a, c, t, g, unknown or other
  modified_base (262)..(270): a, c, t, g, unknown or other
accatgcaacataaagtgttaattctgatctttattaataagtannnnnnnnnnnnnnnnnnnnnnnnnnnnnnagggcataaaacccaacaaccctcccactacgacaaggatggaacattagaaggagttatatctgaaatcatttcttctaacactacttttcttttcggcttgaagtctttaatatagtcatcttcaaggaaggtaacatttgtagaaacaaacactttgttctccttgtgactataaaatagtccannnnnnnnntctttagaatttccgacaaacaagaaaacttctattcatgattctagttttccttctttctttctcaagacatgagcaaggcacccgtaaatcctataatggcgtaaactacgtgtacgaccattccatagtttgacaggtgtcttaggaactgctttagatgaaacaacatttagaatgttattttttgtctgtatagcatatccctagaaggacgtagacagagtagaatagctcagcatagacctaaccatttctaa

SEQ ID NO: 143351 - DNA, 705 bp, Cannabis sativa
tctcttctcagctgtgttttaaaatggaggtatttctcacataatgacttcttacaagctccgaaaactggctgttcttcactcacttggcaaggtatttgttgggggcgtgatctccttgtgaaaagcttaagactcaaaattggggatggttcaagtgttaaatgtatttcagatccgtggattcctcgtcactctgaattcactcctatttgcttcttgggagacactcagaatttagtctcttactacatcactgatgataaagaatggaatctcccactccttgctcgtgatttctcagctgtagacttggactatattttgtccattcctctatcttcttcatcagttttcgaccaacagatttggcactttacaaactccaatgagtacacagtccaatcgggttatcatcttgcaaatgaccttgaagattctgagctctctaactcttctaataaccagcatacttggtggaaatacttttggaacctgcaacttccatccaaggttaaaatctttgtttagaaagcttctcattgtgccattcccactgctgctgctctgtgcaagcgcaagattatagattctgcagcatgtagcctttgctcgaatgcctgggaatcggttgagcatgctttgtttctatgcaaacatgctaaaaaggtttggcgtgtggctggtatttctctgaattttgat

SEQ ID NO: 143352 - DNA, 1078 bp, Cannabis sativa
actattattttgtttaagcatgggattgaaagtatcatcagaggatgaagcttcactcactattttttttgtgagttgaaggagttctattcaagctagtggatcaagaaagatgtggctttcttaaagtaaaacacacgtatttatattaatctctctcaaacttttttaccattagataagactattatacatcagtcattgtgttggtaccaaaacccaaagtaaagcaatcaactcttacacgcatgtcactttgcttttgttgtgtttaaagtaaagcaaaacgatatatagtacataaagttgtaggttatatttgctaaaataaggatgtagtaccattgataagactacacacttcttattgtgttgctataaacttaatcagggtagaccaaatactaataactcatatgccccctaactcataactcatatattatatcagataaagttgtaggttatttcaatttttttaaaagtaatattatatcagataatttaatatttgctaaggtatataatatatttatccaataatatatatatattatttattcatagtatatattcacttgctgatttgggtatattaattttgtataaaaagtatgtgatgcatgacaaatttattagaggaaagagggatgctcatgttaagaatttaattctttgtccaggacctaatgtcttacaaaaacaataaattatgtaaagtgattttgtttctgtgaagagatgatgaccatttttattttattttttatttatattttaatgtcattcaaaggctaatcaatttttgcatgcatgtcactttgttcttattgcgtttaaagtaaagaaaaaagttatatagtacataaagttgtaggttatattagctaaaatgagaatatatagtactattgataagaccacacagtagtgattgtattattaaaacgtactgacctaagataataataataataatagtaataataataataataatagtaataataatttatgacattttttgtaaccaacaacataacacattaatattataatagggatccatgatattaat

SEQ ID NO: 143353 - DNA, 864 bp, Cannabis sativa
  modified_base (283)..(286): a, c, t, g, unknown or other
  modified_base (351)..(355): a, c, t, g, unknown or other
cttgctatgggtgggcacacactcaatcactaatggctgaatgttgttttgtgaagaacactaaggaattcaaaaataagagaagaaaagaaaaagaagtctcaaaaacctagagcgaaagaaagctaggtttattaccaggatctagatttactaacaagtatctttttaacatcctaatatgaatttctaaaacaagaaaataaacacataaaaggtatgaaaaaccttacattggttgcagggaattaaatgactccttccggtcagatctctaaccctnnnntcctttctatcgcagagtatcaccaagatctgagcccaaaactccttcagttgtttggattcttnnnnntcttacacactatgattgaggattcaattgttatgtgtgggcatgcactcaatcaataatggatgaatttaatttttgtgaagaacactatagaattcgaaatttagagaagaaaagaagaagtctcataaacctagagagaaaactaggtttttagctttagaggcattagtaggataatgagaccataactttccttttatactaatttcacctagggttagggttgatttatttggaataaaaaaatgataaaaatggagctaaaattctcttaagtggccggccatgatgtgggcccaacactagttagacttttgccatttttctcaacaatttgtctatttttcacaaatactactttttgcaatttcaaccctaaaatgccaaaactatttatttgataattaaaattattattaaataacattgtgatttataatatttattaattagactccacaaagtgttttaattaataaattaaccctaaaattctatttcttcac

SEQ ID NO: 143354 - DNA, 501 bp, Cannabis sativa
gtgctgtcattgagagctaaattccaagtttattctttgtcttaagtttcaactgacacatagaatggtggtacgaactcgtagaggcttggttgacccgagtgacgtattactgatagatcctaccataacccctgggaatacaagggtcccaccaagaaccaatcccgagcagccaaacacacatccacctactgtgggccaaggtgtgacttcctctctggcttgaatcacacgaggtgtgtaagagactcggaataccaattctgcagccgatcaaagcactccaagcattggaatcccatccacaaccaatgctcagatgacggtaggggatgcaactgagattcgaaacatctgtaatgcccttggactcatgcatggtcacactaacaccttgcatcatgatcaggaggatctccgtgctgcaatgaaccttgtattcaaagagcagcgacatcatttcatttagtggagggatagggagatggaaacattgaa

SEQ ID NO: 143355 - DNA, 868 bp, Cannabis sativa
gggtttacctttgttagaatgaatctcaaattcttttgtctatggctgccaccacttgccaccattaatgaataatgggtggtctttttggtcttaccagtaagaagaagaaaaatgatgagaagaggaagagaagaaaaagaatggttcacttgtgagcattcatggtctttttagtcttattagcaagaagaaggagtgactagggtgaggagaagaggagaagaagaacaaaaagaaagaggaggctgtaaaaaaaaagttagggttagtattttgttttatgaggttttaattaattttgtttaatattaaattattgttttaaatgttaagtgtaaaaataaaaaaagtaataaaaaaaaaagaaaaaagaaaagttaattttgctaatttcaatttgtcaaaagtctattttgacaaattttacttttaaatctcaacaaaatatgtagattatttaaatttatatttattattcaaaatttttgataagtaaaatgatattgtattttatttaaaatattatttttctaatttataattttaaaataataaattatataataaaataatcaattttaaaattaaaatatcatgattaagatatttataaaatatctaagttagtttcaaaaatttattattatttaatatataaaataattttttttttgataaatcagtgaattgtattgctcaaaacatatttacagtctaatagcacccatacaagggcctaaaaatctatacaatttctacaatttcttttttctcacttcatttcaacactttacaaatcaactataaagcataaaaccaatctctatctatactttgaattttctttggaaacaccatgttaatt

SEQ ID NO: 143356 - DNA, 1152 bp, Cannabis sativa
  modified_base (54)..(91): a, c, t, g, unknown or other
  modified_base (938)..(945): a, c, t, g, unknown or other
  modified_base (1074)..(1085): a, c, t, g, unknown or other
actgatagtgggatcgtgtctatgtcgtatccacgtaaattgatccctgagttnnnnnnnnnnnnnnnnnnnnnnnnnnnnnnnnnnnnnnattcgctaagtgttgattgctctgaacggatcgctgaatatcttactatggacatgccagcaaggcatcctactcagcctatcttcccgagcagatgttccaagtggactccacgtcagagtgcaaaatttggaataacatctatttttatgtttacaattataataaaccatacaaataatataaaatatttcatatatgtgtttattttatttaaaataaacataccaataacatagaataataacattcacataagtttattatatcactatatgtgtgtcatgtttaatttttaaaaaataaataatatatctatatataaaaattgtttatctttatcttttactttgataattgtgtaatgtttattttttctaattaactaatatttggagtttataaagttatatttgtttatttattttttgatataagaattgtatttcaatagaaaattcgttcactaattcattagaaaataatcaatgtatagaaacaatagaaataaaatatatttattttagtatagtataaattgactatgtctacttttatatttacaattataataaacatactaataatataaaatactttgtatatatttattttgttttctatttattaaacatactaatttaataaaccaaataataatattcacatatgtttattggataactattcaataatggttacatttttattgtaaccatcgtggttacatttttctttgacctgtaatagcaggttactcataggtaaacatttttttttagaattaattaattataattaactattttcttaaaatcattaattaaatatttaacaagacctcttnnnnnnnntaatatttataaataatttttttaattatatttaaatccttactctaattattttaacaataaagtcatttaattataatatttacaatacaatttattttctgacaaaaattaaacttctttttacannnnnnnnnnnnctcttcttataataaatttttaaataattaattatttttaaaatatatttaattattttgttacaat

SEQ ID NO: 143357 - DNA, 847 bp, Cannabis sativa
tatgccatggcaaaaggtgcctggccggttacccttctttcagttattttgtatgaccacaatacctctggtaattcctccggccaattccttttagcttctttgacctattttttcatggtgtctttgagtgtcttgttgactgctttgacctgcccatttttttaaggatgtgtcacagctgaaaaactcttgatgattccatgtgtcatacaaaaatctgtgaacatttggctaccaaattgtttcccattatctgaaacaatttttcatggaagtttgtattggcatatgatgttttttactacataaaccaataccttcttggatgttattgttgccaaaggcttggcttttatccacttggtgaagtaaccactgtgaccactatatattgtactccacctttgcctttgggcaactgtccaatcaagtctattccccatatagcaaagggtcagggactttgcatctgtattagttcatttggtggtgctcgggggatctttgaaaatctttggcgtttgtcacacttcttctcatgggcctttgaatcttcaatcatggtaggccaaaaatacccttgcattagtattttcttagataaacttttcccccagcatgatttccataaaatcctttgtgcaccttagacagaagtcgtgcagcttgttcttttgttacacacattaacagtggcatggagaaacctcttctatacattacaccttctactatgatgtatcatgtagctttactcatcattttttgagcctcattttggttgcttggaagttctctattgttgagataagttgttatgggtgttgggttttaagccctaaat

SEQ ID NO: 143358 - DNA, 604 bp, Cannabis sativa
tatttgctatttattctatgttttgtttgtcaaacttatttttaaataattatttcaataataattatatttaaaaatattaattgcaggttataccatacacgtataattttgatggttatgaagacatgaatgagataacgagtatggttgaactattacaccacatgtaggtaattatttatatatatccatatgacctatttatatatagtgtttatttttaattttattaaactttagtataaacttatttttgcaggctatatcaactactaccacatttaaaagatttactagcaattatttttaatattatgctatatataggcaatcattttcaaaagccacagtggtaaaccgagtctttgcattttgagacattaaatttttaaattattaaattatgaagtttttagcataaataaattgtgttgtttcatagtcaccattttcttttattgaattcacgaactcttttctcatcaaattttgtggctgtggaaaaaagtaatgaaggtataatctcattccttgtaactttttgactaaggtacatggtagagactaggagtattgtactcaatagtggtaaggtcaaact

SEQ ID NO: 143359 - DNA, 569 bp, Cannabis sativa
caatacattttaaactaacaaaaatatgacacttttttcaaaaccccaaaaatacccctcaaactctctctgcatctctctttctctttatctcagcatcccacaaccccatggtcggaccatggggtccgatgggtccgattggtcggacccatcggaccccatagtccgaccatcagatctggggttttttttcctttcggtttgagagagacgaagagagagggttatgtccgatgggtccgttcagtcttcatgttattttagtgaagcaataacataaattttttctgttgtgagtatgttgattttgagtagcttgtgctttagggttacacaatacatagtctcttctctcctggtttggttaggttaagcttcgaagaagaagaagaagaagaagtaagaaacttttattatattttattttcaaattaaaataaaagatgatttttcaaaattaccataaaaccctttttcaaattcgttgaaatacaaggctataatagtaaaaatctttttattatttaatttatttacaccccaaaattttctaaaggcaccccatt

SEQ ID NO: 143360 - DNA, 1063 bp, Cannabis sativa
tatatataggtacatttttaataggtattacctatgaataggtagaaattttaaatttatatgtttaatttagttgtctaattaaaagaaatcattcattttttatattatatggttgatgttgttctatggggccaagagagataaaaaaaaatgagtttgaattagagaaagagggataaaaataatgctaaaacatatttttgatataatataaaaagatagagattttttttaatgatagtaaaattaagcacagaaactctaattttttcttttattatctctccattggattaaaatcttatttttaaaattaacatttaattatagctatttttttaaaaagttcttaatacccattaaaaaataatccatatatacatatatgtagagtcgatccaatccaacatttttctactcatccgatctaatccaattagtaattgaatttgaaaaattatcatctgatccaatccaattagacctcaaaacccaatccaatcagaaattactaattggattagatcagttttttatttagatatccaattacatacctaagttttaatatttacttaaaaatataatgaaaaatacgcaaaaactaaatattacatttgtttaggtttaatactctataaaaatatcatcgttataagtgtaatgtaactaaaagttcgaaatatctaaagtaataataataataccaagtaatgaaatagaactaaatgttacgaaaataaatacataaaacaaccaagcgctgcaaatcaaccaaaaaagccactaaaatataaataatatatcttttttattattatttattatataaatcacttataaaataattttttaatgtacataaatataattaaattttgagattgacatctaataatcgatctagtttaattagaatctaacttttatcatctaataatccaattcaatgtaataagatatctaattttttgtaattcaattgaattggatcgattcaattcaattagattagattggatgtttgcacatctccgagaaaagaagttcatgacccgta

SEQ ID NO: 143361 - DNA, 668 bp, Cannabis sativa
ataatgccactgagatgtatggttatgctgatcttatatcagtttctctaataaaaactagtgaggtgcttgacattgagccaaagagttacaaggctaccttagaaagcaagtagagaggataatgattgaaagccatggatgaagagatgacatcacttcatgacaatcgtgcatggatactggtgaaacttccaaataggtacacactggtgagctgtaagtgaatctttaaaatgaaagatgtgattcttggtgttgaggaatgcagatacaaagtaaggctggttgcaagaggcttcactcaacgaaaaaaaggattgatttcaataatgttttttcaccagtagctaaacatagatccattagaattctattggctttggttgctaattatgatcttaaattggaatagatggatgttaaaactgcatttttgtatggagaacttgatggaaccatctacatgaacctgaagggtttgtagagaaagaaatggaagaccttgtctgcaaactaaacaagtcttcatattgtttgaaaaattatcctagacaatggaatatgagatattatgaaatcatcacttgaatcaagctcaaaaggaacaattatgacaactgtgtgtatttcaaatttaactcagatgcatcttatattttcttact

SEQ ID NO: 143362 - DNA, 910 bp, Cannabis sativa
accaccaccacctcccatcggtgtccctctcatcttcgtctcatacgtcggaccaccaccacttcccgtccgtcactttggtataaatatatgtatttatttattttgttatttcccgtccgtcgctaattagttgttttattttaatttaggtaaaattacaaagctaatggaggaaaaaggaaaatatagatttttctgccattgtattttttttctttttatttttttttacatttccgacggtttaaaatcgtcgcctataacagggtatatgcgacagttttgaatcgtgccctatactataggcgacccctatagtataaggcacggttataaaccgtcgtttatacccagttataggcgacaattttaaaccgtcgggaaactctcattagcgacggttttgaaccgtcacctattatgcgcgttttacgacggtcgtataggcaactgttatagaaaccgatgggaatactttaaacgactatttaaaaatgtcgggaaaacctatttttgtagtagtgacggtatacagtataaaacttgcataatatttttgagaaaaacatattatttttgaaaaaaaaaaattcgtctcacattaaaaaaataaaaaatttaaaattttcagtatgtgatataaaaactccatatatcaactctgtattaagaattctcaaagcttcatttactatataggccagatagctgacccaataaaaattagggctgaacatcgggcgggtttaccgggtttcgggttggcgggttttgggttcacgggtttcgggttcaaaaaattgaaaccgaacctggacccgaataacgcatgggttggcgggttggcgggttagcgggtcacgggttggcgggtttcggttggtcgggtttagcgggttggcgggtt

SEQ ID NO: 143363 - DNA, 1176 bp, Cannabis sativa
atggaaagtttttagtaattacacagtgtaattacatctaattttcatggggggctatgagaattggagagataactatatagaagagtagagagataactcgtttttgtctaattctggcgactggtatggtgacttttcagacaccgacagctactcttgcgactttttcagcaccgacaacaaactccaaaaaagttgtcagaattggcattgtcgccggaaaaatcaccgaaagtgatttttttcggtgatttttccggcgacaatgccaattccaatgactttttcggcataaacggcaactccgacaaattttctgacaccgacagctacgctagtgacttttttggcaccgacagtaaactccaagactttccagcccaatgacaactccggcgatcactgtagttttatttatttaaaaaaaaatatgaaagaaattttaatattttttatggtaattcaaaatggcatatcctatatatgttaagtttttattttaaatgcaatattttttttcttattaagtttctttaccacatttatgtaaattagttttatttttctcataatttaaatacccctacggtaataggaggaggaagtgcaatacccttattgctagtctcaattgtcatattcatgtcacattttcttttttaaaaaataatcactttttctataaatattttcagctattggatataataatataataatgaatggttatgatcaaagtagagtaacagattactctttttaataggcgtgaccgaatttatgccccttaatatatatgtttttaataataaatataatgttgaagcattcaaaacaaataaataaataatgtaggttaaaaggttataaaataatttacattaaatcccaatctatttactgtttatggaaataactcccagcaaagaatattaaaaaaaatacaaaatatattttcttataaggtaacattattatttttttggctaatttataattgtattttccatttaaataacaatatgatccatatatttacaaagtctttatttcttagttacttgcacacatttgtatccaagatgaacataaaatctagggatatttatataattaaaatattaatgtttgtaaaatttttaacgtccaaagctggttttttttttttttttt

SEQ ID NO: 143364 - DNA, 515 bp, Cannabis sativa
tccgctttgaaaatcttaaaagcattaaaggcctcatccttttgctttaacaaatatacataagtatatctactataatcatcaataaaagtaataaaataccttttacaacctctagttagatttccatttaattcacataaatcactatgaattaaatctaacaattttatatttctttcaacatttggcaaaggttttttaatcatgtttgcttttacacaagattcacatttaccataatttcttatatcacaatcaatcataccatattttttaactcttttcatagttgaaaaaccgatatgagctaatctaagatgccacaaaaataaagaatcatgctcaattataaaagtggaactagatgctttattattgctaacattgaaagttacattattggtgtgcaatttcaccattccctcacaagagtacccgttgcccaaaaatacattagacttggtaagtatgagcttaccggattcatattaatgccaggttttccaagtaag

SEQ ID NO: 143365 - DNA, 880 bp, Cannabis sativa
  modified_base (830)..(845): a, c, t, g, unknown or other
aagagacacccaactagagcaatgttaaaagcagtagtattaggcttcatagcaaacaaaggtgtggtactttttttttcctaggatctatcctattatatggaaatagataaccaatctcaagtgttatttcaatgtttactcgcatgatatggcatgtccatgtaggcaagattgatgccacgtagagtacagcttgttaacaagaaggccaagtcatcatgcacaacataccaggttacgaggagtccaaatacttaatcgggacaaagagacaatgaactgaccaacttaaggggtttggacggacccccctggccgaccctattgctagcatgggctggccatcctctagcaaaggaagggcagtccaacctttttcctgacagggactttttatgcctttgtagccttcagcctggacaacacttccagttacgtattgggcctcaacaaccaacaaaaataggagatacgcttcagttatttacctattcttggggattaattaacatgttatctatttatttttaatgtgtaacaaataggtgatatctcctcattttaagggatatcaacctatcatctcttgtaagttctcttatataaagagcactaaactaaaccgaatctcactaagttctaagctctgtacaatttgaagctctaagttcaaaagccctagctctctctctatctctctcttctacacgcctctagcagtgtagaagagactaagtcttcctcatctcacctacttgagatttgcttcttgattcttactattgtaatcttaaaagagccattccgtctatctaaggaacagtgtnnnnnnnnnnnnnnnnagatagaggacatggcaaaagttccttatgcttct

SEQ ID NO: 143366 - DNA, 965 bp, Cannabis sativa
ttactgctaaaggtgaatcgtggtgcagcagccatatgtcttcaactagcttcctacacattggctctcggagccaggcattttcaaacttgaagctacgggtaattgcttgttgagtttgtacgacaggggtaagaagaattagacaatgatctgaggttgaaacctcaagattggtgagctttgcattgggaaatttgtctagccaacttggagtgacaagggctcggtcaagcttgatctcaacccaattttcagtaccttttcctctttcccatgtgaacttgtaaccttccatctccatatcaatgagattacatctactcaatacatcttgaaactcatcaatgagccaattcggatacggtcatccccctttcttgtcactttggcaagttacattgttcatatctccaataagacaccaaggaagattgataatattggcaagatcagtgataagcttccaagtgagcttccttttagacctgtttggttctccatagatgcctgtgagacgaaattgaggccactcaggagtagtaataatcatatcaatatagttagtactgtaagacttgatctccacctcctccttgtttctccaaagaacaacaatccctccactatgtccctgacttcccacagtaaaagaaccctcaaaaccaatagcaaatttcagcctttccaccttttcttcttgagaaaatgtttcacaaagaaaaataaagttgggtttcttttggataataatatccttaaggaattgaatggtccacggggtcccaagcccacggcaattccagcttaaaacactcataatccttagcgggtccgtgattcggagcccgccccattcgagtttttttgcccattgttaaccattgggtctgagttacccacatcttcatcatctcatacaaggcccacttcattttcaatacacatggcaacactctggccca

SEQ ID NO: 143367 - DNA, 644 bp, Cannabis sativa
  modified_base (608)..(608): a, c, t, g, unknown or other
ttaaaaatagctagtaatatgaattactatagtatgactcttgtgtagaggcaggcgggtccggaaatacgcgttagagtggtcattgaatgagtcagatcttgcttgattgtttacagattgttgcccctgagatccattattctgttgacggtttgggcaccaacgataatcatggtctgatgagcgacaaatgcgacaatgtcttgagtttcttgggatctactcctcgtttggtccttcccttagattttaccctttgttctcacaacttcggggtctttaataatgttagggttgttacgatatctttcaggttgtccttccagattggaactcaactcaaattcttccttaaacattagtgttagccactcaatctcttcctttgtacggttatatgaatcctttgattttgatgcatagaaagtcaagttataagttagtgaactgagggatccaaacctagccatctcataaatgtgttgttgttgttgttgtgctggctggttaaaatgtaggtggagatttgtttttgcaaattttctccatcacttcatgagaagagtattaggtattcttctcatgtttaatcttttcattgtagnccataaatgtctacaagggtacccttgactttcata

SEQ ID NO: 143368 - DNA, 732 bp, Cannabis sativa
agtaagggaaatttggtcatttggctaaatgatgttttgggtggctgcctattagagtgacacctagcaagattaagtttcagccaaggttaatatattaaaccttatttcatttgaggaattaataggaaagtaagagaaaaggccaaaaattagagaattcatcttctctccctctctttgttcggccaaaccaaaaaccaagggggttttgctgctaatctttggagtttcagcaaggagttcaagaggaattaagctaaggtaattttagaatcatggctgtttatttttgaagctttaaagtttggtttagtatgtgatttttgaagttggtggttgttagtgtttgaagattgtgtagtctgatttctaagtttgttttgaattgattttaagccctggatattagttttgagctatggtgtgggaattgagcaagcttgagttttgaaactcaagtttaggtctttaatggcataatttgatttagtgactttttctaggaattactggttggaaaatgttggttatgcattgtacatgtatactggaaagttttgctaagtttggtttgattttgaggtcatgggggcattttttgggttcccagcacaaaatataagggacgttacacaacagttcttagttctttaatgaacatgaagtataagggtcaaggaaatgtaagggtgtacattatagaaatacatcatattgtctcaagattaa

SEQ ID NO: 143369 - DNA, 861 bp, Cannabis sativa
  modified_base (287)..(309): a, c, t, g, unknown or other
  modified_base (414)..(414): a, c, t, g, unknown or other
  modified_base (465)..(472): a, c, t, g, unknown or other
aatacgataaggcttaccatatatctttaatacacattcattttggcccaataaaagcgggatattcacagttgtgtgaaattcaaataaaaaccgtgtttacttaacgtgatatgtaatcagatcccatgatttgaggggataatcattgtacagattacagtcaactttataattaactgcctacgatgtgattataaatagtggcaggtaaaaccaaaaaggaggacgaaaaaataatatgaaaaaaggccctgagaaaactatcagaaatctaataagattgnnnnnnnnnnnnnnnnnnnnnnnaactgcaaaaccacataaaaaatcatgtgtgttcatacttttatttttacaacttttattttttctgtgtgagattgtcactattaggctcaaatttggttaacnaaaatctacgttaacagtttggtactttcattaagagccttcgtgaaaaannnnnnnnaaaaaagcctcctaacataaaagtaatgaatgacaacaaagcagataatcctcacgaaggaatcaatcattgtcctcgaaaagagccactaagtcctcaaggatctattgattcatcacctgaacaggctgctagcttcgggaaaacccagtattggggtctcaggctcgaaggacttaggataaacaacggtccttcttttcctaatcaggttgatgagaatggcacctacgacccaaccaggtacatacctattgttgcaattagaaaacctccatcttaggcgccgattggaggaagcaaattggcgtaacgccgaactagagcgtgaaatagctgcagtcaaggcggcacaggaggatagtttccaaaatcaacctgaccttgga

SEQ ID NO: 143370 - DNA, 722 bp, Cannabis sativa
atttttacaagtacccctgtaatcaacaaccccaacgagttaagcaccaataccacacttatgcacttattgccttaaaccctaactcaactatttactccaattaaataaacacttctcatataacattttaagcatggcatcatatatcacataaatattctagatgctcacatactgcctaaaatggaaagcagtaaataaatgatcatataagcagtaaagcatttactctcaacacttactgcaccatgagtcgagcttgtttctgacgatgattgtacatgttcggccggtctacaggaagtttaaaaaccttggtgctctaataccaaactgtaacgccctaacagttaggcacgctacgctaatcgattatgaaccctaatcccctaaaatcgggattactaaaaggataagcgcagaaaatttaaactttaattgaaatagaatgaaaattaaacttgtaacaactttaaactttacaaccaaaagatacatgctttgggatcccgtaaatattttcacaaaatattacaagtctattttatgtgtcgacctaagcaacaaaatcaagattacaaaatacaacactggtagaccccaacctgcttggtcgagtatagcccgaacatgtacaagcatcacccagccctcgccctcatggctgatcagtgatcgatttaccccttcttgcacagtagagcacccgtgagccaagc

SEQ ID NO: 143371 - DNA, 547 bp, Cannabis sativa
aatgtcaagttgaatcaggtgagacatgtccctgagatcaagagaaacttgatctctgttgctatgttggatcatgaggggtgttcagtcaagatagagaatggtgagatgaaggtgatgaaaggttctaaggtcataatgaggggctcatcaataaatggcatctatgtcctacaaggaagcaccatgaaggaccagatcaatgccactgtaaggtgcaatgctaccatgacttggcacaagagacttgggcatgtgagtcacaaaggtctgaaaattctacatcagaaaggggtctttggaaaagacaatattcaagacttagaattttgaacattgtgtgcttggaaaatccactagggtaaaatttggagttggggaacacaacaccaaaggaattgtggattacatgcactcagatctttgggggccagccagaacaatgtcaagaggaggagccaggtacttcatatcttttatagatgatttctctagaagagtatgggtacatatcttgaaaactaaagatgaagcttttcccaagttc

SEQ ID NO: 143372 - DNA, 775 bp, Cannabis sativa
  modified_base (740)..(750): a, c, t, g, unknown or other
acattttaatctacatattattatattaaaaataatataacaataaaaacttgaagtagacgtaactctattactattgcaatacagggagtgaactactataaattgtagagtctttctttatttatacttaacaaatatttcattctcatcaatctagcaaacatgtatggtttaggaatctgtaggaacctcaatctagatttctgaaatcaacaaatacgatgtagagtgaggctgatattgaatctcttacttaatcttgtcattagcttaaatacaaacttcaactttaccgtagtcatcaaattagtaattctaaaaagttcttcgttgtaccaactccaaattgctccttatgtcctattcacactagtttaccttgctatgctgaattacttcgttccaataaatacaactgtaggatgatgttaactaagagcatctccaatgaagatgcaaataagtgatgtaaatacagaatatagctcactttgttaaaaatttactccaatagtatgtcaaattataaagcaaatatctcacgtaacaaaaagtgattcaaatttggatcacaatataacattattcaaattttatgtcacaataaatgctctgattttatatttactataataccatttttaatattttattattaaagtgtagttagcatgctcatttacattggatgactttcataattattgttattttattatgggtaaataccattttgnnnnnnnnnnnttgcaaaagttacagattggaccct

SEQ ID NO: 143373 - DNA, 511 bp, Cannabis sativa
taaaatagtatccgtttcaaataacaaaggtactaaaatagtatccgtttcaaataaaaaaaggtactaaaatagtagtttttgaaaatataaggtataaattgattattattcataacttagggtaccaaatgtctattttaacaaaacataggatactaaattgtcatttactgttatttaaatacttatattattattttattgactccgcgtcgttgacagttataattgttcaaaggaagacaaaaaagataagaaattaatattatttcattacagtaaaattaaaataagcttataataaccttaaaaaaaaaccttacttataataagataagtctctaagaaattaataggaaatattctttttattcacacttctgtattattaaatagtgatatatcaagtatcactttaattatttttttaagaaattcaaaataattgacactcttccaattaggattcaaacttcaaagatgcttctctactctaggctttcgcttc

SEQ ID NO: 143374 - DNA, 993 bp, Cannabis sativa
  modified_base (461)..(464): a, c, t, g, unknown or other
tttttattttattttcttttaaaattaacggttaaactaacatcgttaaatcaattaactaattatctttttttttaaaaaaaaaaatagtgttaaatatttaaatttaatataaaagtattaataaaattaaataattatttttatatataaatatttgaattagacgttaatttatcaactaattaattatactttatagtaaatttagtagttatattatttaaaatatttaaacttattatttacttactttattgtttaataaaattagttagatatatttctttataaataaatttgaaactaaattaaattttatatatttaaaaaatataattgaattgtattggatttaattttattattattatttaaattaatgattaaaaaaaataactctaatacaactctaagcaaatatgtattacatgttactaatacctaatatatatatatannnntatatatttatatatatatatggcagcaatatatgtggatgaagatgacatagcaaagtatacgatcaaaaccatagatgaccctcgaactatgaataagactgtgtatcttaggccacccaagaatattttgtcccaaagagaaattgttcaagtttgggagaacctcattggcaaagagttgcacaagtcatcaatctcaaagcaagagtttctagctaatttgaaaagtgagaccttaatataaaatatatatttattatgatttttcttcctaattactagttcttatatcaaaaccatggcctaacttaatcccttgttggattttaatttgtatggaaatgaagatctagattatgcttggcaagttggaatggggcattactacaacgcgttttttgaaggttgtctaacaaattttgaaataggcgatgaaggtgtcgaggcgactcaactttatccagaaatcaaatatgtttccgtagacgactacatgaggcgctatctctaataaatgacacatata

SEQ ID NO: 143375 - DNA, 529 bp, Cannabis sativa
gttacaatcataatgagtacaaaattaatcaaactttatataacagaagaaaataatagcattgactaattgtgttactttacacacagatgctaagctcattaactattcatcactatgggctaacacaacaaacaactatccaattaatccaaattttaataaaactaataaaatttaatgtaaatccaaataaaaattctaacataatgttgttataaaatatgataagaaactaaaaagtgaagataagtaagcagttgacaaaactacttgaggctagctcacgtggccataggagagtgcgtgtgtgttggaagtcctgggttcgagtcttaagttatgcatgattgtaatatataaacgcttaaataaaaaataaaaaaaaaaaagtaagcagttgacaaaacatataaaatgtaagttggtatatatataagaggaataagaaagaactgaataatatatatatatatactaggtgaatgtacgtgtcgagccacgtattgctagtttcatttaagatttt

SEQ ID NO: 143376 - DNA, 734 bp, Cannabis sativa
aaatgtcatatttttgtaacttttttacaaaatctcatatttcatgtaatttttacaaattaaaatgaaacataacactttccaaaaactgtcactcaacccaatcaaaagccttgaccatatcaagtttaagagcaataagaatattatcaaaaataattattttaattctattttaacatataattttgatttttttgtcttaacatttaaaatatattgtgtttttattttatagatatatttttttaaaaatataagatggaagaaaaaaaaattaaaaaactaatataaattaaaaataaatattttttatatgaaataaaaattattaaatagggtactttataaggttcgttttggggtgtaaatggaactatactttaattgttgggattttacttatgtgatggttagtttggtagtatgtaattgtaattgtaatggtaatggtaatacatatggtataataatggaataagaattagaaatttttacatcaaaaatacaaaatgcaatctttattacaccaataccactacacggctatatcaacttttttactcttcttctttcttttattactattttaccacatacacactcattcaaagtattggttcatgtgctgacctatgacccctatcaatcaaccatccatcatttctctcttttttttctttttttttttccatttcttttcaattttcttttaaatagtaacctccatagct

SEQ ID NO: 143377 - DNA, 691 bp, Cannabis sativa
ttttatttattatgttatagaatcagttatatttcaattataaccggtttagttattttgtgttatttatttttattcattatgttatagattaggttctacttttgtttatatctaagacatctacttctaatgacttttctagtgactttttccggcgacactaactttttcagtggctttttcaagatcggtgactttttcggcaaccttttattgttttataaatatgaaatttccatctttttttacaaaaatatgacatgtaaaaactcatataaatgtaaaaaaattaagaaaaaacccgcaaccccatgatattatttatttatgacataaaatagtaaattcttataattttttcatatattttgtaatttctactatctgattctattagatcggttgagatttgatcaatcaattgtaattagatcagatgactttctgcacactcttaccctacgacaacgttttcttttctaaataaaatttatttcctattacacttattattttatataaagaaccgaacaaaatttatttagggataatttaaaaaaaacaacacaaaaattataaaaatgcagtttatataaaatttttaatatttttacgattttaaattttatttatataatatacggtttttttatgttgtattctcattattttgttgttgattttttat

SEQ ID NO: 143378 - DNA, 728 bp, Cannabis sativa
catatacatacaatcctccatcgacaaaataaatactatttcactaaaactatcacatttcacattttcaatataatttattcaacctatctcactaggtactcaaaccatataaaaagcacaagtataaagtataattattttttcttacctcaactctgttgtaattaactcttacgataccttctaggctctcaagatttcgaagacacggaacgatgatcagataagagtggttaatcgctgactccgaagctcttatggttagaactattgatttggtgaaataaagagggtaatacttttgagagatgatgagaatatgatagatttatgacttctagggttcttaaattatttatatataatgagtatatacgtatatatgagatatcgtataataggtttaaattttaaaataaaaatctaaataatcagataaaaatcatgttaatataatttaaaataactaatttgattcctcactatctattttcaccatatatcactatataatatatatatatcatattttttaaatgtcataatggcacacacacgtgcacaaataccataatgtataatctatatataatatagtcaaataataataataattataattacaatataattgtattacacacttaatatatcaaataccaatatatgtgtataaactggatattacaggttcgcatcctagcccttatttcgatgcattgcag

SEQ ID NO: 143379 - DNA, 707 bp, Cannabis sativa
atatttttgtaaactttttttaattgagattaattgttaattgttatttagttaaaaactgtttattagtacatttacttattctaaaaatatcattatataaatcaaaaaattaattttaaatgagcattgggcaattggtgactgtgaattttctcaatttgaaattttaactttgaatacagaatcaacagcgaatactaagttttttcatccctttttgaacttctaaattaataattattattatcttgattgttctttgaaatattatattagttgttgttattgattttttttttactatgtctcctaaaattaaaaaatatgagtctgggtatgaaaagcgtaagaagaaaaaaattgaggagttaactcaatctcaaagaggagctcttgataaatttattataaaagaaccacaagttttatttgaaaattataatcataatgttgttaatattgaaaattctgaaaatatgttgcttactattgagaatcatggtgaaaaagatgatgtggaaaatggaagtgacatgcctattgaaaataataaagtggaaaataaaggtgatttgcctattgaaaatgatgatatggaaaatcaaaattttgattctcgaaattgtgatgatgatcatttgaataattcgctcaaaaataaaattttagagataataataatgataatgcagagcaaacaaact

SEQ ID NO: 143380 - DNA, 1160 bp, Cannabis sativa
aagagctctatgtgataatttaatagtgcatgattcagagagttttaaggataataactcaaataacgaaagttataagagttgtttgaatatagtagaagcaccagtagatgaatatataaaagagattaagcctataattgaagagaaagaatattttgaagtgactgaaaatttaatacaatggatgcttgctaaacaaatcaatttggtgaatgaagaaacattcatcctcaattatgaagttattaaagattaaatcatagtcaaagatgtggatggtcataatgaaacggaacaaccaattgagaggttatttgaggaaagtgaaaaagaagtgtcattggtggctgaagaatcacatgtaattattgatttaaggtcttcaacgacactatattatgaacaaccaatggacccttattttctactaataccgcattctccatattggattctctacaacctatcaacagtttctccctaagctcatcatcgaaagtcttgtgttgttggtgctgattttggttcaaactcattggatgccaagcttgagggcatttttaaaaataactttcaagttgtcctgcatgacgcttattatgggcgtcaaccacttgttgatatggcatggacctaaggtaagttttcttctctttaaatttttgtttcacattggggacaatgtaaaattttaagtttggggaagggcttaattttattttttgccatttagctttatttgtttgttttagttattaattaagctaatgtcgattttgctgttgttcttatttgtagaatggattgaaattttaacttgtgtgcttgatttttttttactctttgaaataatttggatgcttgtaaaaattttgtattgatgtaaattgccaatagttgtattgtatcataattattttactttggtttgtggtaagattaattgaatatgatagaacttgcatgaattattttttaaggcaaaatccttgacagtgcttgtttggaaaatgatgaggcaattttattttggattgtttgggcctttcaagcttacctttatctttattatccctagtttgcctatttgagcttagcctattcaattgtttttagctactgtatgagactaactttgaatccacttgcaattctct

SEQ ID NO: 143381 - DNA, 890 bp, Cannabis sativa
  modified_base (665)..(667): a, c, t, g, unknown or other
aatccagtgcactgatgaatcaagggacattatcttttgaagcatataatcacaattaccttccactgtgttgacaacactgtgattgttaataattatatattcttgatttaacagattttgtacacatcaaactataaacatgaaaaattcatgtaaacataaatgacttctaatctttaattgataacaaatcagattatactgaaatgggttttatttaggacataaaatcccaacaccatcctcatccactagcatcaaactgagttcctagaatgggagaaaatagggggtgagctaataaagcccagtaggaaatcaactaatatcgaaggacccttggtttaataaaatttctgcatggttagctttgtaaaaataaaatatctcatcaccagtatcaaaatgtataaataaagtagagagaccacaaataatcacaaatcaaacgtcaaatgcatatcacactgtccacttgacccctagctatcaataccaatcatagaaaatgacatccaaaaccgagtagtcgcacctgatatccaccataataacagggctcagatttaattcacttcatgtatagattctaggtctttcacctacaggtgagtgcacacctgatatacctatgatgacacagagactaggtcgtgaaacannnatatgcaccaaacatgatcaacatggctctcatcagtataaccagagcaggcaaataataagcataacaaaagaacatattcccttttatttttttagaaaattcggtaacataacagctgtagtttgaataaacccaaaaatcataacatgcataaatatttttacacaaaaatatatttggcactcagtgccccaggacaatccagaaaaatatgcaaatt

SEQ ID NO: 143382 - DNA, 666 bp, Cannabis sativa
ataaagcatgtgatatttatgcttcggggtttggtacccttttaccttcaggagaccttatagtatccactaggtggattcggtccttgtcctttgggattgacggttgtgaattaacccccaatctaatagaattgcaactgtctgattttgatataatcctggaaatggattttttgtctaagtatggggcaacgattgactacaagcggaagatggtggtgtttaagcctgatagtgccaacccagcagtgtttgtgggtaaagtttagggggcacgcataccaagaataacacttttgaaagctaagggccttgtgagcagaggttgtctgggattcataattactacagtggataccagccaacctgtgacatctggacctgagagtacaagattggtaagcagtttcttgacgtctttccaaaagatctactgggattgccacatacctgggagattgaatttgtaatttagttagttccaggagcaaaaccagtatcaaaggcactgtatcgaatggctccaacagaattaaaagaattgaagatagaactacaagaattactgaatctgggattcattaggccgagttactctccttggggtgctccggtattatttgtgaagaagaaagacgagtctctgcgaatgtgtattgatta

SEQ ID NO: 143383 - DNA, 971 bp, Cannabis sativa
ttggtttaataaaaactcatgcatggttagtttttaaaaataaaatatctcatcaccattatcaaaatgtataaacaaaatagagagactcacaaataatcacaaaattaagagtcaaatgcatatcacacagtccactagatccctagctctcaatatcaatcatagagaatgatatccaaaaaatgggtagccaaacctaataaccaccataatatcgtggctcagattcaattctcttcctgtaagtcttttacgtacaggtgagtgcatacataatctacttatgatgacacaaatactagatcatgaaataacaatatgcacaaatcatgatcaatatggctctcatcaatataactaaaagtgggcaaataataagaataataaagaacatattcccttttattttagagaatccagcaacataacggctgtattttgaataaactaaaaaattataatctgcataaatatttggacaaaaatatatttggcactcagtgtcctaattcagaaaaatatgcagattaaattttaactttttaaacaatttgtaaatcctaaaaattagaataggactaattctatattcagcacatttaaaatcccaataatcaagagattattaattttttcataaaaaaaaacttacttgtgtatagaagtaaatacatacaaatcattatttaatttatttatgtacaatgagatacggtgatgattattggaaaagatattaatgatgactacaagtgagatggcggtgatacattaatttgattacaagtgagctatgacgatgaaaattattttgaagatatttctttgcatgctttcttttttatctaagatattaaatagatttattattttttgttaataaatatatatatatatatttttaaaattatacataaaaatatgtttgaaattatttgatataattttactctaaagatgaacagtac

SEQ ID NO: 143384 - DNA, 538 bp, Cannabis sativa
  modified_base (256)..(258): a, c, t, g, unknown or other
taaaaatcacgtaatacgcctattttagctagggtgttacatactttttcactcagaaggatttgaacatgagacaaagaaggtggttggagttggtgaaagactatgactgtgaaatcttgtatcatcctggaaaggcaaatgttgtagcagatgccttaagccgaaaagaccttatcagatacttaatatgatcatgatttctcctcagttagcctcaaaaatgtctagggcaaacattgagttggtgactgannnattatataatctgacacttcagtcagacttgttggaaagaatcaaaatggtacaattagaagatcctgaattggttagcattcgagaagatgtgttagcaggcaaagctaaggactttttaatctccggcaacggaatactattatttaaagcgcaagtgtgtgtccctgatatcagtcatgagcttaagaaagaaattttggatgaagctcacaccaccccctattcattgcatcctggaaccaccaagatgtatcaagatttgaaaccctatttctgg

SEQ ID NO: 143385 - DNA, 1211 bp, Cannabis sativa
cataaaactcttcgttctttgcaaatatctcgaaactttcttggctgcaacccaatgattatggacaggatcagataaatatcttccaagaacatggactatgaaaactatgtcaggtcgagtgcaaacctgggcatacatcaaactccctactacacttgcatatgtgatgttcttcattgcttctctttccaagtcgttcttaggacattgttgctcagtgaacttgttccctttcagaataggaacaaaagcaactttacataaatccacgttgaaccttttgagcacacgattaatgtaagcttctcgagataagccaataactttttcgattcctgtcacgatggatctcaatccccaaaacataagatgcctctccaaaatctttcatatcaaagttggtagacaaaaaattttttggtctcatttagtaatgacaaatcactgttggcaagtaaaatatcgtcttcatgaagaacaagaaaaatataacgactcctactgatcttcatataaatacactagtcaagcttcatccttgctttagagtaagaacatccataccttccttgagtaatcatcaattatactcaggaagtagcttgctttaccaagtgtcttaactgttgatggcccccataggtcagagtgaatgtaatccaaaatttgtttggatgtgtgcgtacctattgagaatttcagcttgcaacttttcccaaagacatcttgttcatagaaatctagtttctcatgcaatttacctttcaaaatcccatgcccaaacctttgatgcaaaagtctaatttgatcagtcaatttgttcctgttaactccattcttagaataggtggctggtgtggcaacaccagcaataatttctccaacaagatagtacaaaccatctttgtattctccatttatgacagttaaagatccttttaaaaccttgagacaattctcatcaattttgactatgcaacctttaggagcaagagaaccaaaaaaaattaaatttttttgtaggtcaagaacatacctgacattagttaatgttctttgaatattgccatgcatcttgatcatctataaaatttaatactaaaattattttttttttaaatcaaatatatattaaatgagaagagatgttttatattagtttaaacaaataaaaattttcaaaaaaaaaaaatcaaaactaataagac

SEQ ID NO: 143386 - DNA, 917 bp, Cannabis sativa
agtgtttggttgattaaaaatggataagtataaatgtcttttagtaaaatatacatattattacataatagaatatggtagagttttgctctagtgtacttggttactagacctatgttattagatataaaaaaaataatattaattaaattaataatttaaagtcaaattgattattgatgaatcttaaccacgacaaatattaaaatattgactatatagactttaagtattttgaaaatatttacattcttgagatgtttgatattgttggagaattcttttttacataattattttttgcttatttttaaaatggtcgcatataatacaataggatcattatagaactttaaagttttctttaataaaaatatagtgtttaattgatttaataaatgttatattttattaaattattttaagattttaaatttttactaatagttttgaattgatataattcttactaattatttaataaattaattattttggattattaatgtaaatagtataaaatgcgagatcttttaagtaaaatatatttacattgtagaatattttatggcatttagtaacacttttatttttaaattttttaataacaaaaataaaaataaaaaaaataaaattttatttttgaaaacaaaaatgtgttgtataactaattttgcatttcaatgtgaaaaacaaaaaacaaaagtgtattttgtaaattttattttcatttcatttgttgattttattaagttaggtctgaggttgtatttgaggtcgtgatcgggagcgggtccaagtccgagaccgagtctaggtttggtttttaaggtttaagttggggttagagcccaaaatattgattaaaaaaattgaaagtaattttttttagattcttaattgaaaaattaaaaagt

SEQ ID NO: 143387 - DNA, 672 bp, Cannabis sativa
  modified_base (28)..(28): a, c, t, g, unknown or other
  modified_base (631)..(635): a, c, t, g, unknown or other
gagaggtgcaggttgttcattccttagngcatgatctaaatccatacatcccagaactataagtaaattctttttcccatccttgaaattgatcccattaagcataggaatagaattaatattagcagatattgaggtagcagaagatgaactagctaaatataaaacaagctcacatcaatatgcacaattaaataatagatttaaaaattggttaatcccatctcaagataccaaatacacattaatatcaagtctttggaaagtaatattaactgtaagcggtatttttggtgtaacaatcaaacattgacaataaaattgtgtcaaacaatagattaatctttggactaatgtattattcacacaaaataccttatgattgtcatacatttattgccagaggtatgttcgaaatttagcaaaatattcacttaccgttgggcaagtcaatatatgcatcaattacaaacactcaaccatgtttcaattaatttacttaaaatattagacataaaccaacaccgaaaatttgaattaaattatttacaccaaaatatatatttaccaaactatactgtaaaatatatatattaggggaattaccctatatactattttttttaacttnnnnntttcaaatttacggtttagatttctaaagtggttgca

SEQ ID NO: 143388 - DNA, 697 bp, Cannabis sativa
  modified_base (622)..(644): a, c, t, g, unknown or other
agcctgtctaatccaatccagtcatgcgtaccaaacgggccctaagagaccacaagactgaacgtgacatttgaaagaatcccacaaggtcaactatcgaaaaatttatgagtgtacacgtcgagaaatttgtgaattttgaaataggttaaagaccccaacacaaggtcccaaatggaggttaaaggagagatagcggaagtttggctcgtctttttagaccggcgacactttgggctcacaatggatcacaaatggctctttttatggttcacttttttagaccggtggcagtttgaactcaacgaatcaaaagtgtctttgataccattttagaatttgggataagatgaatgaaattctatctcaaaactaattgacaatgggaggagtagctcattcatcttatatatgataatttatttccacacataaacaatgtgagactaactctaatatgagtgtcgtattgggtagttgggctctccctttgaattttgttgtttaattttttatcccttttggctttctttttattagagttattatttttttaaaaaaaaaatgttagcaaaaaaacaagtttattaaaagaacacctttaaataataataataataannnnnnnnnnnnnnnnnnnnnnnataataataataataagggtaaattccattttagactctctgttttacaaaag

SEQ ID NO: 143389 - DNA, 749 bp, Cannabis sativa
ttcaccacgctgaaaagatcttctatctttcagatgagtgatctatcgtacatccaaatgcttggctcaggaggcaacacattcgatggcgattaggaagatagctttatcctgacttcgatctcaaaagaggaggtccctactaccggagacacagagctaggtctgttgtcctctgcagacatcgagaggatggtgcatgagctcgctgaacaaggaactatcaagattcgagacagcgagtctacggtgtcagcccgtgatcaccttattcactccaggcacgctcctgacgtcgaagtcgaggagatgggtgaagattgggaggttcctgatcgtggatctgacgaggatggagatgccgaagggagcgaggctaattcagttgacaacacgcaattaaatgagtcattctcctgcgaagacttagtctcgcgggtcaccaaatcagacctgaccacattttcgaggttaaatttattgcgtctcggcaccatgcgtcctcatcctactcaaagaccacaccttccttttaccaaccctgcgatcataccctcagaagacgtcgtagtctctatccccattcttcgatgcggagtgtcagtccccttccatccactcatctcccctattctcaagtagtatgatgtgtcccctttccaattaaccccaaatagctatcgcatatccttaggcttttacgcgatgtatatggagtatgtgcacagggcaccctcgacggaagagtt

SEQ ID NO: 143390 - DNA, 597 bp, Cannabis sativa
agggcataaaacccaacataagttacttcaccatgtatttgatttctgctataaaataccaaccttgtgttcagggttcctttaatgtatctcattgtccacttgagtgcagaccaatgttttacaccaggatttgctaaatatctgcttgtaacactcattgcatgtgcaatatctggtcttgtacaaaccattgagtacattaggcttcctacacatctagcatagggtatattactcatatgttttctttcagaatcagttgttggaggttgagtagcacatagcttgaaatgttgtgctaatggtttttatacagctttggagttgaacattcaaaacttatcaagaaccttcttgaggtagttgctttgagatagtatgatcttgtgaggtctttctctgctaatgtctatgcccagtatcctctttgctgttcccagatccttcatttcgaattctttacacaatagttgctataagttgtcaatttcagacctttccttcccaacaaccaatatatcatcaacatacaatagcagatagatttttttagcaaaatatacacaaggatcatattttctcttacagtaacca

SEQ ID NO: 143391 - DNA, 582 bp, Cannabis sativa
  modified_base (32)..(34): a, c, t, g, unknown or other
tgattaacataaataactgctaatttccaaannnactaagcgggctttacaataatataccacatttttttttgaaatcctaatatgccacattttaatcttcattatatatttattaaataacaaatatataacgacaaagagggtgatgccctatttataggcaaatgttatattagcaagagctcataaaccactactacaaaaatatgttttttatcccagtttttaggagcattttatcccagttttcgctaaaatgaaaaccgagatgtatgccaatgggataaaagctcttataaaaatcgggataaaaaaatcactttaatcctggttattatagagaaaccgggataaaagattatttttaaccctggctttcttttaaaaatcgggataaaaagtaattttttatcccggttttcctataataaccgggattaaaggtaaaaaaaaatattttaaaactaacaagcaatgaatcactacggagatttttttttccttaataatatttttgacaaaatatacaataagtatagatttaaatcccaaaaaatcagtacaacaaaagccacgaac

SEQ ID NO: 143392 - DNA, 1082 bp, Cannabis sativa
  modified_base (34)..(35): a, c, t, g, unknown or other
  modified_base (62)..(63): a, c, t, g, unknown or other
gtctattgttttatcgacaccagaaaggaggttnntagagaatgaagaggatgaggagaatnntaatttatgttatgatgacttcattgtttggcaaccaattcatgaacaagtaatggaaattgatcgtaaccttgaggaagatgatgttcaatacattggaaacgatatcaatgagggaatatgggccaatcgtaattcatgcaaacataaacaaaacaagaaaagaattgtgtgtaattggtaacttacttgtgataatatttgtttatgtatttaatatttttttatagattacttgttatgcttttttttatgtacgtagttactctattatatagctaactttaaattttatttgttaatggtgtagatatggctaactcaggttcaggctcagattcagtcccagaagcagagtgtcctagggcgatacctacatgaggagctacttagatgaatggaatatccaagctaatggaccaaggaaaaagagtggcactcgaagtgaatgacaaaggacaatactgtggcaaaaaatactccaagctagtatcgactttagaagttagagaagtcaaccctatactaaaaaataaagtttggaaagatataaaggtaagcagttatttgtgagaattttgatatgtttttgattaattcagatgttaactctaatcgtgtttgttttccttcaaactagacggattttatagtgcgagatgatttcaaacatgattatctgacccttgatgggaagttaatgaaagacttcaagaacagtatgacaaaagatattataatgtctgcattagaagaaaaagatgtgcaccgattggcacaagtccctgaaaagcatccgaaagttgaccttactgattggttgaaatttgttgaaagttgactaactcctaaatttcaggtgctaattatatttgtactaagataaactcttaaatacaagtactagtatctgatgtattttttttggcattgtaggaattgagtatggtgctaagggaacattcagcaaaaatccaatccagacatcgaagtggtcggagtggaatggtgaacgtaag

SEQ ID NO: 143393 - DNA, 512 bp, Cannabis sativa
aaaaattgaaataaggacatttacgtcttatgatttagggccatttgctttatttttttgaaaagaggacataaactaacacactcctatgatttggggccatttactataatttccctttaaataatttgttgctcttgtacttctttttatttgagtgaaaaaagttgtttcaaaatttaaataaaacaatataaacaattcaaaaaaatttgaaaactttcatgaaattcagtgtaataaactctgtcataaaaagtaattgggattatgctttaattgtgttaattcaaacttctctgaaccatatttttcggcattctaatggtgcggctcagggccagtttggcacagctgtgctgtggggaaaagcagctgtagctgtgctgtgggaagaagcagctatagcagaactgtggaaaaaagctgagctgagtgtttggtaaattataatttttaaagtgctgtgagttgttaagattctattacaataatgataatattttaatcta

SEQ ID NO: 143394 - DNA, 611 bp, Cannabis sativa
aaagaataccacaaaccaacttttttagacttttgaaagaaaatagacaatcttttacatttattctatgggccataacaaatgaaaattaaataacacaaactaacatattagataaatggatagaaatttgctcttgcattttattttatttatttattttttgagtaagaggcaatatatattgatgaaaatgtagctattgtatatttttttttcccaaaattataataattatacaaatactccctaataagatttgtccatagaaaacttatcccttaagcaacagtcaatcaaaccctagtattatgtccaaaataattatgactatttttaagaatcaatgaaaattcaaaagttattttctcaaaccacgccactcacaaaatgaacacttaaacttggtaaattttctaagtaaatatgtgctaacaaccatcttaccccaatatttggcatgtgcattttaaaactctaaaaaaaaattaagtaacaaagatagaaaaaaattggcttaaatataatattctacaacaataaatgagtaatttttgaaaatttgaccataaaagtattaatatgacaataaaattataaaaaaaaaaaaa

SEQ ID NO: 143395 - DNA, 581 bp, Cannabis sativa
  modified_base (553)..(554): a, c, t, g, unknown or other
atatcattggatcttattttttaagatgatcattttaatatgtgagaaatatatattttttatcatcaatagaaaaaatgatcgaaattaaaaagcaacatattaatttttttttatattctattatcaaaaagtaattgaactataaattaaacaaaatttaattacaaacaaactttatggttattatgaattattttatgattttatatttaaaagttattcaataatatactaaaagtttaaatgcacatttttagttataattttaaagtaacttaaatgtttctttttgtttttgtcaatcaaaatactaataacaattcatatataaatactattaagtgactgaaaatatgtattgattgaaaaaaaaaatgttcctttatagtatacaaaatagaatatgtaaattatcttattatatggcagctaataaatttttaaaataaattttaagcttatctaaatgtatttttttatttttctaataaaactataaaaatattaaataaataaggaaaaaaaaagaaagatatatatatatatatannaggtgattgttacgtgccaagccacgt

SEQ ID NO: 143396 - DNA, 556 bp, Cannabis sativa
tgaacttggtggtgcgggttagagattgatgcgtctggttgtgagtggcgtcaggttgcaaatggtgaacagaggcaaagattggttcgaacggtgagtgcttggttgacttcgggggtgctactgctgagtgctcgaaacgaagatggaattgagagtagcaactggagctgggcatgggtcgtggttctgatatgagtgaatggaggttgagtctcggtttctgggtgcgatttggtggttcgaaggtgggttgggttcacgggagtggatgggttgtgaacaatggtggttcgaatggtgagatgttgggttcgggttcaggtggattggtgtcgactggagcttggatgcgatttggtggtgagccttgagtgaggttcgagttactaggggttcaggcgaaatcgaagggtggcttgagtgttgttggttcggctgttcaaggaaaatgaagaagatgaacttgaatgaggtagggttgagggtgggctgaccaaagtaatgggctggtcaaactagctggggcccagttgaccaaagaatttggcccaaa

SEQ ID NO: 143397 - DNA, 2089 bp, Cannabis sativa
ctcctctttcgtctaagacttagtcgatttccataagtgttggttcttacagattcacgtgttagccttatccaggtccacgtattttgggaaaaatcaagggcaacactctgaaaacctatttttttaggattagaagaggcgggccgcgacatgggatttccatgcctaggcatgacccccctttatttgggcagtgagtattctactgtgctgactgatagtattttgaccataattctctcgatattacttggaattggactattcaagatgttctgaaaagataaaataaagatctagaacttttatgttttgactttttctaacatctgatcagatcatagtcgaatttaggcttgaagtttcagatttttttttgcacaattttctctattttatagatcatctttttccgaaatttgaccaatttatacaatccaagtgtcagaacctgaaattgaagaaaacaagcgtaattctattctaaaaagtcacaatgaagaaaaaaaattaactctaaaaataaaataaataataggctaaaaatatcctaacaaattcccccaaactaaatccttactcgccctcgagtaagactaacaactaaacacaacctaaatgaaacaagtcaatcaaccgaaacatgagaaatttttaagtaagataaataacatggttatgaacaaaaattccacctataataatcaagaatttcagttcaatcacacccttgattcacctcaatcttttattcaattcatgaaactataattagcacttaaccaacagttgaaacaatttatgcatgccaattataaccatcaatccactatcccaaaaatattccatatgcttgctatacttactattatccactaatataaatcaatgcacaaccaagaatcaaaaggtctttctaggcttgtaatgttaggcttaggtacgggtagttgaaatggtcatttaggcttgcttataccataagattctccaatcaattcacctcataactttcacaaataatctcgatacctatttttttctaattccatgatagaatttttttttcaacaatatttcaacactttatatttattatgttttctctttcttttttttttttttgaatttgaatttgacacttattgtcagattgttttcttcttttttttttttttttcaaatttttgccaatcaactttttttcatcttctctcaattttcatactttttcccacacatataacaaatttcccatccaaattcccccaaactaaagattcacttatgatataagtaattttttttttggatattcatgggtttatcttgtttaggctcaaaatgtgtagaaacaaagaataggttaaggctcaaaaagggtaactataataaaattacagggataacttgaaaggcacaattgatccaaaaaaatgcctaaattacttttgtagtcattcataatttattatttcgcctcaaatagcaagcaagaaaattctagaattttcaaacaactttccatatttcacaattagcatacataaactaattcaattgctagggatttacttattataattccatgttcttttaaagcacaaaattaaaattattcaagagtgtaatatcaccaagcatacagatttttcgaaataattgaaattttcaaatcatgctatctgcctactttcaaattgactcacattaagcaaattgactcaaaataaagaaactaaaaactaaaaactaaaaacttatagacttaaaattttaaaaacaaaggactaaaaataaaaatttaagttcacccccaaacttaattgacacattctccccaatgtgacattaaagagagagaaaagggaacttatctaagcgccacatcattatggcggtggtggtggtggtggctgcaaaattcaactgggatacagtccacctcttgcctccataagggcccttgtaccaaatgaagagaactgtcctccaacgttgctaattttgaacctatccataagatgagattcaccttcacaatttccacacatcagtcttttcatacgtcgtcgaaaagttcgaa

SEQ ID NO: 143398 - DNA, 683 bp, Cannabis sativa
ggggattgggaaacttgggatggtggtcttccaagcttgattactgggtattttgaacaattgtttacgcctggtgttgtggtggagggctttgaaagtattgttgctacgggttcaggcatggtgtcacatgatcaaaattcaatgctactcgagcctctttctgatgaagaaataaagaaagctttgtttcaaatgcaccctgacaagtctccaggacctgatgggatgactccggctttttttcagaagctttggccggttgtgggtgatgatgttcggatgttggtgaggtctttttttgcttcaggttcttttcccccttccttaaatgagactaacattgttcttattcctaagaagaaaaatgctgagattatgaatgatcttcgtcctatttctctttgtaatgttctgtataaaatcatttcgaaagtgttggctaataggttgaaacttgtcctacctgatgtcatctctgaaactcaaagtgcgctcttacctggacggttgatatcagataatattatggtatcctttgagattatgcattatttgaagaggaaaagactgggaaaggatggctatatggcactcaaacttgacatgagcaaggcttatgacagagttgaatggccttttattgaatcggtgttattgcgtatgggctttgatagaagagt

SEQ ID NO: 143399 - DNA, 638 bp, Cannabis sativa
tgcaaccggatgatgacacgtagactaaaagggtttaacgtttaaaaaattcatctaagtttctttagccacagggatcagtcttagacatgcctcccggagaaggcacgtgagtctcacatactcctggagagcaaagctacaacaaagcatctccgggaggtgtcagatcttatctgaacagtcacctcgcatttgtcacctcgcatttaagaagagtcgcaggaagagtcgcagaagtttcaaaccctagggtttcctaaagtgttctttctacaacatagttacattcaaatcgtaaacatgcaaaggaaaagcataaagggaatcagaaacttactcaaagattcgaatgtccgggttcaagcaagccagcaatcgtctgtaggcacttcaacaactttgaagccagaaaattctctcttttctctctgaagtttacttaacaacgaagggtgataaaatgaagtaatgtgccagtattccatgtatttataggcaaaagggtaactgtacataaaggaaccttaggtgcctctacttcccgcctcaaaagcaaatatgggaaatcaaaattaatcaagtgcaaccgtcaaccgtggagagagaaattatgattttcaaaatattaattgtta

SEQ ID NO: 143400 - DNA, 845 bp, Cannabis sativa
  modified_base (626)..(632): a, c, t, g, unknown or other
tgttctagtcccccttcctctagcgaaggaaattcttcaaaccctgtacccagccatagaatgatggcttgtacaaagaaactatgtgtctggccgacgcgtctgaccgacgcatctgacccttaagtggctcggcatgccgctttgcctagcgccgaacaggatccagccgtacagatggaggaggatcatgaaggggacgctgaggtccaagagatcgaggggcaggacaatgtacgtcctggcagttccttcgaggagaaaaaagaggcagaggttgcacccccaaactacggggagtacaacgaggctggggagccagtcgatgctaacggagatgtcctggttgaggtcgtggactacgttagtgaggaacttgctgtggtggtttctcatagaacgcagggtgccttgggcgccacgtgggtaagccctccatccaagataacggaggcgcgcctacgaactcttgaccagggcggatacttgggcgagctgcactgctacattcctgcccacaataatcatgccacaacagatcttgataatgctgtgctacagcgaggaatcaagggctagagatctgaacaaaaggagtcaatacattctgctgcaatcaatgtaannnnnnnttaaacccttatgtgtttaattcattgttttagaaattcatattaggatgttagtgaaacatacttgttagtaaatctagatcgtggtaagataattccaacaactggcctcagagccagtaattttttactttcatgaaatatgaattaaaacgatgttttgtgttgacttggatggtttcatgatggtttatgtgcttatttgatgatagt

SEQ ID NO: 143401 - DNA, 608 bp, Cannabis sativa
agagaactttcaatgtcatgttttacttaaagagaattagaatattgtttactaaattttgaaaagaaagaaactagtgggccccacacaaattacgaagaatataaaaggaaatgttctccctttatttttatgcgggatacatttctttttcttaacttactttatttcaattttaattttattaattaaaaattaaaaagataaatatgtccttcaaaaattgtaattacatgtttaacaaggacaatttagtcaaattaaaacactccaattaactttcatagttatgtaaacaaaattaaatgattatagtttcctttttggacatttagtaaacaatataataaaatattatatccaattattttatattttaaatcgattcatttattccattgattattctaatttcaaatatagtttagtaagcgtgtcacctccaactgctgtgatattttgcacacgtaagtgcatgtatcgtttacaagtaatagactcaccgagagtgaggttgatctcacgaggattgtagttaagtatgttaaaattaaatttttacttctatttggttaaataaaaaataagaaagaaaattaaagtaagaa

SEQ ID NO: 143402 - DNA, 1409 bp, Cannabis sativa
  modified_base (1343)..(1367): a, c, t, g, unknown or other
gtagcaaactgatgagtcaacagactcagtaagataagcaaaacatatatatgagtaatgcgagatcgactttatgcttaagccgccctgggctcagtaattgagctccccaaatagttaagaacgttcttaagggaagtacaacctctgtaccaaatgcaccaaagtaccagccctgtactcgtgttggtagagtcatcaatgtactcccggaaattactaagtgttgtaccacatgcacgacgttccccctggtactcgtgttggtaacaccgtaatcacaccgatatcttacactatactaacactcttaaaatcacataaacaattagtgttagtagtgtagataatttaaaaacaatcatatatccatatatatatatatacattcttatgctatcttaccttgctccgtgctcaggtgtgccggtcagcctgagtggaagtacagctcgacgccttacagggccctaaaccataatattcaaaattcaatgagagacacgctaaaatatctatcagggatttaaaattgaaatcaaggataaccctatcgataaataggatgcaaacaacctaaattacgcaaaaaggggaaaaactagggttcggaaaaaagccccaactggcagaccagtccccaaccggaatcctagttcctgggtaccaaccggtcgaccgtgctgggaaccctaaaaccgatcctcctaactccaatccatcccaaatcttctcaaaacttccagaacacctgtacataccataatggaccaaaaccaagcaacagaactcaacaattcacaccaattacaaaaatagcataaagcaactcaagtaacctcaattaaacttcagaacttcaattcaaacaataaactccaacacagccccccaattacaaaattcaagaatttgtctaacttaagcttcaacaaaatcaaaaggggaagagctagggacactaccttggatcaaagcttcaccaacactgctagaaaccccaaaaatcagcaagcaaatccaaccctaggctgggttcgtgatgcttcgaaaatgaaagagaaggagaataggtgaggtgatgaatttctaagttattcttctaaaagaataaaccttccttcttttaatattaatgttattttcagctaataacattctcacaaaaggacaaattccaataacaaaagacctatatacccctaaggtaataaaagtaaccatatgcattatgggcaaaatggtcaaaccaaattcctgacaaaattccaacaccaccaacacccaaccatgataccccgataataaaattctaaaacatataaaatacgactctctaaagnnnnnnnnnnnnnnnnnnnnnnnnncgaacacaaacacagaaattgagtaatttacataaaatagca

SEQ ID NO: 143403 - DNA, 809 bp, Cannabis sativa
acctgggactgtaacaggacccaaactcaaaccaaaatccatactaggacttggacttggaccgggacctgtgacctgggacataaaccaagactgcgacctagaccaagactgggacccgcacccaaacccaaacccaaaaatcgagatcagacccaggaccgaagaatcaaactcggacctgggacccaaaacccagactcagactagtactgggacccaaactcaaacttgaacccaaaccgagacttggactcgaatcgggacccgagacctgaacctgaactggaacataaacttagacctggatcgggacctaggacccgaacatagatgggggacccagacccaagaattgggcccccaaaactaggatcagaacttggatcgagatttgggacccgacccagacgcaaacctaaacctaagacccacctcaagacttgggatccgcgactagatgcttggactcgacccgtaccccatgagttgaaactagaactgaaactagaagcagatcaggacccaagaacaggaccaatagaaggacttggacccagacccaaaactatatagggactcggacccgaactgaaaaactgacccacactcggattctgtgtcttggttcgggatctattttgggtctgggtcggggtatgagttttggtccgagtctaggtctgggtttggacctaggcctggatcccagtctggatctaggtctgggtttgtaagtgttttatatggtatagatcaccctaatggtgacgaccatatttgacttgcaaattgcgaaacaatggtag

SEQ ID NO: 143404 - DNA, 505 bp, Cannabis sativa
aaatccaacaatatcttagttagaacgttctaattcatttgttaagccttataaataggtgtatgggcgcctagatacaaatcgatattatatgatttgttatatgtttttctcactaagtctgtcgactcacagttctactttcatgtgtaggtatagaaaaagcgaaggctgaacatgagtgagcctgtgagcctcgagctagggtgatgttgtacatgttatgacggcgcgacctggagtgttcggtcttgggacatctgggatttttattttgtagtcgacgtgcgacctgactattgtattttggaatattttgtgaaaagtttaacaacgggatcccaacttttgtaaatatatatatgcagagtttataaattttcatgcttaattttaaagttttaattcgacacgattttcaagaaaatttctttgattagcaaagataacactgtaattgaaaaaatcattgtagtgtgccttagtattagggcgttacacatta

SEQ ID NO: 143405 - DNA, 500 bp, Cannabis sativa
aaaatacttagcttcctataaatgatatttcaataagctaatataattactgaaagaattccatttatctttattaagccaagcttgaaggaaatcatcattttacttttatctccagatagaagctatagattctgtatctatgattatcactcccactcaattgtactatcatgttctcaagatgtatgtgttacccgaactaattggtaggatttaacaaacaactctaagaacataaataacagtcttaagatcaaaccaaaccatatcaagattaagatcttcttatctaagagcaacctgagatattgacttagacagatacaacggtaagattataatatctttaccaagttcaatatctgtcccagtctaatgtaaacttgcatacttttccaatgtcctagaaagaacataacacttatccaaggtataagtaaattttatcgctgactatcacatcagtgtaaatctagtgcattgacaaattatgggac

SEQ ID NO: 143406 - DNA, 576 bp, Cannabis sativa
taatcccgctaaatcgggattactggaaataagagttgaatttaaactttaaattatttacggaatgaaaatataacttgtaactatttatattttacaaaccattccaaaaatattatgcacgttttgggatcccgtaaaaattttctcaaaacattataagttattttgatatgccgacctaaacggcaaaattcgagaatatacaacatacatcaattggtagactcaacctgcgtggtctagtatagcccgaacatgtacaatccaccgccaagtccttgaactcatggctgattacaaactgatttatcctttccctgcataatagagcatctgtgagccaagcccaacaaaacagtataaataacaataaaataataataataataattacactttatacactaggccactgtgtatatactttgccactgcactttgtatcacattattctatatataatgatgccattataatgaatgtctatatagcataaattcacgtgttacgttcacacacgtctattaatgtctatatagtatagactcacttgttacgctcacacgtctatt

SEQ ID NO: 143407 - DNA, 506 bp, Cannabis sativa
  modified_base (125)..(126): a, c, t, g, unknown or other
cactgacacggcttacctgaacgtgtctactaagaagtcatttcttgtttggattgttggagccaaagatgtatttggtcagtgggagtcactgttttcatgtatgatagacatgttaagaattnnttttggttgttgaatacatgcatattctggataactctttgatattgtgtgtgcacacttgttgatgcgagctagtggcttagtctccgtgctatagtcgagtggatccagatcaatagttatcgtcatgttatatgaatctcagatgtttcgttatgcattatatttgtatcctgtcgatataatatgatgcataattagtcttatagacatttgtgtttcttgagatttctatctattgacactattgcatagtgagagcacatacatattaattatgcagtccaagtgggagaatgttagaatattttatgtggactaacataattaagtgtttctcactcagtgtcgatattagcgtataatgataactatataat

SEQ ID NO: 143408 - DNA, 699 bp, Cannabis sativa
taaatataatattttttgtgtccagtttaatcgtcatttttctttaaaatgaattagttatcttttcataaaaaaaaaaaagaagaaagaaagagagaaataagttgaaagaggcattttttttagtattttcaattattataatctatttgtatttgtatttaattttccaagcttaaattttggtggtaaaataaaactcccaaatgacagaactgttagtaaatttaaggtgtcatctattttttagagttaactgccaacatagactacttatgtgtacactcttgtacacgtagcacatttatattagtacacctaatattaaaattataaaaaattatttcaaaatttataatattttttaaatattttattttttattttaataattttatttaattttaaaataaattttgaaataaaatattaggtgtaccggtataaacataccacacgtacaagagtggacacataaacaatccatggtggcagttaactgtgaattatttttctctgaatttttccgtctctcttttctcctatagaattctaactatttaagcttctatttataggatgataaaatgactaatgtgcaaatacgtacacttacgacaaattgcataagggaaatttgcacccagaatattctaattagattaacaattattacactaatcggtaatgctcttattg

SEQ ID NO: 143409 - DNA, 551 bp, Cannabis sativa
catttgaaagacttaaccaatgttctcgcattaaaatatacagagtacaaaatcctaaggtttaaaatgacactagaagtaataaagtctctgtgaaacctaggataagcagacaagcgagtattcgaagtggtcatccaaatacccgcgtgtattcaaaagataaagatgcgattattcaaacattcttcctaaagttcacggttatgcaaatttcaggtcaatttttctgggattaccctcttctacgctgaaaaagcatggccctatgtgtatttcctataaacatgcattcttaaacccctcaaaataccacaacccaggaaaagcagtttcatattttaaacagaaactgaaaatgcaatggtattcaaaactaacctttagttttgttgatttgttcctgcgattgctctcgatcacttctgagattgaagagattttagaaggagagtgaggaatctgggcagagtatggaggattctttgaaatctcagtaaaggagggaaaaggaagttaaagacgagagggaaaaatgaaggatttagttc

SEQ ID NO: 143410 - DNA, 678 bp, Cannabis sativa
gaaggttatattaaacttatatcttcttgtgaatctgctaaggatgcttggcagatccttcaaactcagtttgaaggaacatttgatgttaagcattctaggaatattatgcttcaaaccaaatttgatgatcttaggatgtttgaaaaagaaaccctaactgaattttatgaaagactatctgatataactaatgaatattttgctcttggtgaaaagcttgatgaatctgttcttgtcagaaaaattgttagagttcttccaaataggtttgacactaaactcttggctatggagaaagcaaaagactttagcaagatgaaggtggaggagttaatgggttctttgcgtacttttgaattgaatcaacaaatcaagcagaaggacaaactcaagtccattgctgatagaggtaaatgtattgcttttaatgttgctgaaaaaaaaaatttagatgataaagaagatgatgagatagatgtttcaactacaaactttcaaaaatacatgaaaaagataagtgacaaaaagaattttccaaaagtctccaaaggtaatattatttcaaaatcttcaatgactaaaaatcaaaagagaattcaatgcagagaatgtgaagactttggacatattcaatctgaatgtgcaaatacactgaaaaagaataagaaaagtttc

SEQ ID NO: 143411 - DNA, 520 bp, Cannabis sativa
aagaggtcttctatattttaaaatcaagatattatcttgatagtgaaatgtgaaaaaatgtgggggtgatatatccaatatttatcaagcaatttggtaaaaggatggatgatatctgaaatttaggcatgcttggtgcctaagacttgagtataacttagacatgtttggtgtctaaagttagtgtataaattttgaaatgcttggtatcaaaatgtgtgagaaattaagtatgtgtgaaaattaatcttctgtgattaaattttcaaagcttaagtacttaaggagaaaagtggccatgtaataatggacagttggacactaattttggctagcaagattcacttggaatcaaaaagtgtgaggttataacaaatcgcttaatctccgtacaagattaaagcatgcaactttgagggatgggacctaaactcccttagagttttactcattgatggtaacctatcttaacactagtgaaaatctagtcttaagttcaataggtaataacaagtcaata

SEQ ID NO: 143412 - DNA, 562 bp, Cannabis sativa
atccacataattattaatatttataacaatgttaaaaattttctgtcattttgttcttctgttcttaaatttgatttatacaatatatattaaattcacgcaataaagattctatttaattaattatttaaatttgaatatttttattaaatcatatttaattatttgaataaagaatttaaccaaattccgttatatatatttatttcttataactgattgaaggaatctctcaaccacttgagagaatctctcaactaccttgagagaatatctcaattaatagaaatatctataactacttttcaaattcaaatttaaataaatatttatcttttgaatatctcaactaccgtgtcaggatagaatgatgctgacaccatctgtgtcttagcaagacattggtggtgtcttttgttcggaaaacttttgtcttttctcaatttatttaattaagaaatatgaaaaaataaattatttattataaaataaataattactagtttgacaaatcaaaatagattttttcgaatgttaacccgaaaactttccctggtgacgt

SEQ ID NO: 143413 - DNA, 687 bp, Cannabis sativa
  modified_base (36)..(59): a, c, t, g, unknown or other
tatgaccatagaacttgtggaagctcttctggccannnnnnnnnnnnnnnnnnnnnnnntcccttaatggtatgcttaattattttattcactgcctccgtttttccatttcttgtggatagcactgctgaaaatgcttttttaattcccaattcatccaacaactggcgcatttccatacaatcaaactgttttccattatctgagatcaacttgtaaggtatgccaaatctgcagatgatggaattgtacataaattctcgtaatttaatagctgtaatggtaaaggcttttacctcagcccacttggtgaagtaatcgactgcgactacggcgtacttgactctgcccttccctttgggtaattctccaattaaatccgtgccccgtactgagaaaggccagggacttgttatggagttcaattgacttggtggttggttggcatacgtggctatccgtttacatttgtcgcactttttagcaaagtttgaggcgtctactcacagtgtcggccaataatacccttgtcacattatttttaaagcaagggaattacccccggcgtggttgccgcagatgccaccattcacttcgcagagtatgtagtcgcactcagccccatcgatacatttgagcaacggttggctgaaacttctgcgataaagcctgccatcataaatgaca

SEQ ID NO: 143414 - DNA, 567 bp, Cannabis sativa
tttgtgacgaatacctttagtcacagaccttttaacatatgaataataatttataattattaacaattttttcacttttagtcacaagttttgttgtaactaaagtaagattttttgaagtaaacatcaaatatataaccacgatagttacttttatttttaatcgttggatcatagttaaataattatgataaacttaaaaattaaacaaaataattaataaattaaatgtaacctgatatagcactgattttgtttattttcttataaataaaaaaatatttataaacgttggttgtaaaaaaatatcttattaaatgttttaattaaaaattaatttattttaaatatataattaatttaagtctgaaaataatattattatcggttaataatctattatagcaggtcataaaaaaatatacttattttaaatttttaatataactattaaatgtatatatatttgtatgggcatgctcttaatgggtattacccatgaatggatattctattattagtcattggatcaaatctaatggttgatatttatagctattaattaaa

SEQ ID NO: 143415 - DNA, 764 bp, Cannabis sativa
aaacccaacaccgagactttgtaaggaagttctctggattgatgctcgaaatgaaagacatgaatgaagtcgacagacttttgtacttccttgaaggactcaagctgtgggctaaagctgcagccggtgtaagatctcgacactgctcaagctgcagccgagcggttgactgattacacctctgagaattcgcaaccgaagaagacgaatccccagaccaacactaataatgttgcgtgtaagaagtcaggaaagcaatggccgagtaaaagtgggggaggggacaagaggactcctgaatctagctcctcctctaaaagtgaagctacaacggggaagaatccccttaagtgttggctttgtcaaggcccacatagggcggctgcttgcccccactagttcaagttgagtgccattaaggcatctattgctcaagaggagcaaggatgtggggaagatgatgaagatgaagactacacgcacatgagcgccgttcaattgatggctactcttaaaaagcatggcgcgggaggaaagaaagaccttaggaagggattgatgtttgtggaggccactttaaatggtaagcaggccaagggcgtgttgattgacactggtgcaatgcataacttcatttctgaaatcgaagccaagagggtgggcctaaaactagagaaagatgcggggcgcataaaagaagtcaattcgaaggccatggccacgattggagtggccaggaaagtgaatgtcaagatcgacggatg

SEQ ID NO: 143416 - DNA, 671 bp, Cannabis sativa
tccagataacgtgatctgagtacgcggtgttatgaatctcttaggtacaggaattgtgattatatcacatttatctttgaggttcagaaattcaacaaccatctattttagcgatttaatgatcaagtccatgaccttttgcgagaataattcatcctcttcatcatgatcgccttgtggagaaagtatgggagctttccccttcgacgcatcatgtcttaaaggcggttgagcgagtggaccctacacaaaacacatcaggtactttcatatttgcaaatgatttacaaactatttgtttttcctttttggacaaagtgaaacaagctggaggcaaatataatcattcacctttcttctcaggtgccagagattgtcatatattcatttcaacgagatctaaacgactatttacactgtccttagttttgcttggaatatcaagtaaggtaccgaaatactctcgcacacatttttctcaatatgcacgacatccaaacaatgtcgaacaaataaacttttccaatatgaaagatgaaaaaagattgacttctttgaaaacaaccatttatttttttttatttttttgcatctttccatacttaaaatctacaagttctacttgttggagaatttgttcccctgagagtggcaaaggagccatatctccc

SEQ ID NO: 143417 - DNA, 623 bp, Cannabis sativa
gggacaattttcttatcaggttcgatggggccctattaggtccgatgggtgtccgatcggggggtaaaaatgggtttggggcaattttttttatcaggtctgatggggcccgatagagtccgatggttggcccattttcggtccacatggttttgggactttattttttgacggggtccgatatggggccgagggtggcctgatttgggccgatggtgtacaaatttattgcatttttaagaatttggataacttttgtgtgagatttttgttctaaattgtaattgtattttttttaatgtatgtgaccggttcatctgttaatgtatttgttatgtataatggtgtttaggagcatacgggtagagattgggtttttaaccggaccaaaaatttgacatttgacattgatccgaatgtaagctacttaagtttagttgatcttttgtatgaagaactggatattgacaaagtggagtatgacttgacattggaagtaaattacaagtacatgaaaggcttaatggatcgcccagaagttattggaaatgataaacgtgcaaggtactttttgtctacacttgcgaagaagctagataaatttacttccttgtttgtgactt

SEQ ID NO: 143418 - DNA, 1828 bp, Cannabis sativa
atcaaggtatccttaaaacttctcatatgctgtatcattttggttgattagaattcacatcgtagtcttccaaatcaatccatcacacacaagaaataatgtgggctattaggataaagtatataatttgttcttgttgaattctcaacacatgagcaagaactatttgagagagaaaataattttttttctccttgggtattttgaaaatagctattgaaaattattatttttatttctcaaattaggcttctatttatagtagttaaatgcctattattttaatcatttaaataatatctataactgaattcgattactgatatttatgaagaaatctctcaaccacttgagagaatatattaactactttaaaatatcttaaaccacttttaaaattaaaatatttatctgattatattaattaaactaaaaagacaaagctcatggggagataggcacctaccttgtcttatttaggacaaggatagtatcttttgtccaaacaacttttgtctcaacaaatattgtcttcacaaattttggcatttccttatttaattaatttgaaaaattatttatttatttcaaaaataaataattactatttttccaattcaaaataaacttttcgaacaacattatacgactttttatctcttccctttatagtatttaaaggtggcggttcggggaccatgaacctataattctaagcttcaataaactagattatttattgagtctcatcaaccaaataatctttgtttattaattccatgattactccactatgaatatgaaattgaactcttagtaattatagaattatatttactgagttttagtgaattgtccattgatataatcaattcaagttattagctctccatgtgttggttcgtaattagttttggtcaaataactattttatcattctaattacttctttatcttttagtaccattaattcactagtgggagtataatttagatctcatctaaatttttgcacaactttctagtcctagaattaacacttaaagggaaccaacattcgatcctttaggaaagtcaggattccataattatagatcaagtttccagccatccacattattagatttccaaaacataagttgtaagaatcatcttttctgagaaactttaatgagtaaattaaagaaactaatagcataaacaggaattcatgattactcaagatgatttaggctgataggctgatatactgatatactaatatactattaactattaatcaattaatcatcattatgatatgaattaggtctttaaggatacgttagataaagaaaattttattcatattggtccttgtcatatataatctctattatatacaacaccttcacttaaatgtcatcctatatcctatatcagtaatctgaactaagattacttacaccaaagaacgagcatcagtgaatcgtactagcaaccattaattaaagattctataactttaatatgttactaactgttttattcataactaagtgatcttagttctttatatagctaaaagtcacaacctcatatatgaataaggatttttatgatatttatatgtaaattattcaataacaaatattaataatttaacattcaatcatatatcaaaatgttcaactctttattaataatcaaaaatatatttataggctttccaggtaaaaaccctaaaaatctcccacttgccctgaaagcaaactatgcatctcccttaatcccatattagttatatgacccataaaagacttttctagtagcgtctttatgaatggat

SEQ ID NO: 143419 - DNA, 1436 bp, Cannabis sativa
ctttaaatttgtccccctttttggggacggaaacgagttcataaaagtataaaatctcagccggactaggcgaaccccatctccatgcagcgtacaagataaataagcatgaaagtaggcggtatgcttgggaaattaattgatacggcgcgagaccaacagaaactaagaaattaacaaagtaatcctgaagggggagcatagccccgaacataagatgggtctggctccaatctccgaacccctgtagttatgattgggtgtctcctcatcctgaggcaggcagtggaaggtcccagaagctgatggcttgatgcctaccaccgttacgatcttctcgagctggtgggcacaagttaaggtggagtggagctcgtccgcctcccagccgttggcacgagaagtaaatttttcctgggccacgggacccttcatgacctcttctagggtggccagtggaactgcccccttcttggaagactttgaaccggatgcagaagcagacatattggttctgaaaaaattaagaaaatccagtagttgggccccaaaccaaaccctaatgtttaagaaaggaatgggggtcccctaaccgctggaaagaggccccctcaggttgcttgccaaataaggaaaccctaagagactttccttggtaagcatcgggtgcagaaatcccaaaggcagtgacattgcaaaaagaaagagaaaaagggaaagaagacaaagccgagaaagcacgaaccactctaagccctaaaggcgttattacgatagagaaaggtgattcccaaaagaaaatgtagtaaaaagaaacaaccaaggcgggaaaaagggagattttatgcattgtacaacaaacttaggcaaaatcattccacagaagttcaacattcaacctagaaattataaacatgcaatacaaacaagcagtaagtgagtataaaatatcctgagaacttacatgaagtttgaagactgggggttggtgttgatcaccggtaaagggaagactggcaacggcgaagaaaaagaagcaagtgatctatggtgtctgaaatttttcctctctgtggaagctttgagaaaatttggtgaaatggtgaaagtaaccaaatgaaatgagaaggctggtttttataggccagaacgggtgtgagacagctgtgatcgaccatcatcgtactgtcagaatcgcaatcgattcgaattctacagatccaacagttgggacaagcgttcatcaaggcggtaggatatgtttgagtacttgactgacacccatttaatgcgttgcatcattaaatggataggaaacgaatcgttgtctgtaaaaagctaataattgcagtaatgatggtcataaatgcatccccacgcgctcagggcacgtgctaggaagttaataagacaactggaggcacctaagcaagcct

SEQ ID NO: 143420 - DNA, 585 bp, Cannabis sativa
ttttcatcctttcattatttaaatgcgaatttcttgaattcatagctaataacaattaatcagagatcatcccttgatctcaaagcttcgtatctatgttaggtagaaatcctaaaattctccttttaacacacccagaaatatacatacctcaattatattctttggtttatcgacaatcccttagcattaactactatgcctacttatagtgagtccctcgttgatgatgctaattcatcaacatctaagaacctcgtatacttttcccgtctctaccactaaggttttactccttagttcatatgctaccattgcccccttgcaatcatcactatcttcatacttggttaaccactctaaaactcattttacccttaataatgtattccattgtttaataaacaacctactttgtgatccaacattcaccaatcactcgaatacatgtctattaaattgcatctcaatttattagcgtttccccatcctgggtgaatatgcccttccatcattacttaataaggaatctttttccagaatttcaatggtctccttatataccatatgttgggttttatgccc

SEQ ID NO: 143421 - DNA, 820 bp, Cannabis sativa
tggtaataaataaaagatttggacatccacataattattaatatttataacaaattcattattttcttaaaattaaaatttccgatggtaaaataaaaaaataaaaaaatatattccatattgggtaagcaaaattttgtatgttttaatttttaaacacttaactctcttatatttttttttttttttttttttggatataagaggattttgcccaaaaaaaaaaattaagagttaatataaaaaataaaacataaaatcagtaactttttaacttttctttttctctgctacaattaaataaatgcttggacaccggagatcggagccgaggcatttcactctcaggtaccgtttttgagttttgaaatcgattctctctctcttttgttgttggatatgatttagccattatctatcaaattttatttattgaatattattcttagattaggaattattaagaaaatatttgtttgtgaataaattaagaattattttaattttaaatataacttctcaagtcatgttcggctgcaagtgcctctattggaacagactcaccgatttctcacccccacaccttgaatatttctctctccctcaacccttacccacctggcctcatgtacgatattaatcagcatttacgtacgtaccttggggatttgatttgtggtcggcgtgggcgagccagaaatgagcagccattgcagtgagatcagaataggtcgctgatgaagatggcggtgatattcagatgtgggtcaagaagaaggatatatcaaatcctctattggtttggaccgaatccttgatt

SEQ ID NO: 143422 - DNA, 503 bp, Cannabis sativa
ttgcgattagtaatatttttaacatatagccgctggtcttcacgcggttaatttaattttttaatattataataactagttacttaaaaatataattctaatatatagtaaaattataaatatattatcttattttatattattattaataattttatttattaaaaactaaatataatttgattaattattatttggaattatttattaagaaatttaaaatttattatatgtagtattttaaattactttgttaaaaaattatttttataaaaataaataaatagtggtgtagaaaaaaattatggtatttccaataatgcattattttcatatctcgatcatttaaaattattgttctcattctatctcacttgttgtctcattgtatctttcatcaccgtatctcacccgttgttatcactatatctcttcccttgttattaccgtagttcacttgtagtcgtcactattgtgtttctcaaatctatatcttaatctta

SEQ ID NO: 143423 - DNA, 597 bp, Cannabis sativa
tcataagtaaaaatattaagacttgggaggattgtttaccacatgttgaatttgtttgtaatcgttctatggattctgctactaaattttcaccatttgaaattttttatggttgtaatcctttgactcctttctgtttctgagcatttgaatttagatggcaaaaagaaagcagaatttgtgaagcaaatccatgagagggcacgactcaacatataaagaagaaccgagcaatacataaagaaagctaacaagggtcgtcacaagcaggtttttgaaccaggtgattgggtatggttacacatgaagaaagaatgattcccagtccaaagacgttccaaattgctacctcgaggagatggtccgtttcaagtgcttgaaaggatcaatgacaatgtcgactgactcgatttacctagagaatataatgttagtgatacttttaatgtttctgatttgagcccttttgatgcaagtgaagatttgagggaaaatccttttcaaaaggaggggaatgatgagaacactaaggctaaagatacaagtaaagttcagagcgcgagccaagagattcaaagaagaacttaacaactttgt

SEQ ID NO: 143424 - DNA, 547 bp, Cannabis sativa
cccacctgcactaacataaaacaagtggtgcatttcaatcaatcaattgtcttgatatccagatcgtgtagtgtatttgactaaacccaaattattggaattgtaagtctgttggtaagcaactactttctccacaattacttcctttgtggtcataaaacattatgcaacctcattttttatatgcattactcttctagggatactgaattctttactgcttataaagtgcatctgaatatacagaagacatatctctaattgtatccaaaatggaatagagataacacagtaagaactttcttcagttgaataacttttccagtgatttttgaaaacaacaaagttatgtatcttcactgatggagcttaaattattataatccctccacccccagagtaaccaccatctcagattggttatgatttggtgtagatgtaaggattctaatatatactcctatcatcttacatataggtcactttcagagatttttcttgattgtctcctaatattccttgtttgattacatcttagatggctccc

SEQ ID NO: 143425 - DNA, 801 bp, Cannabis sativa
  modified_base (39)..(40): a, c, t, g, unknown or other
  modified_base (221)..(225): a, c, t, g, unknown or other
gtgacgcgcgttgaagtgtcactatacacttttagagtnnctcaatgtgtgtcactaaaacctgattttctagtagtgaatgagaaattagtaagttagtggattaacttggtaaattttagatctgcttattcgaagctccgttatataggctcatagtccccatactagttgagacaatactgtttgtaagactcagttaatttattttaattaatcannnnnaattctaaaattatactatgtctagtttatgaatttttcactaagctagggcttaattgtgaagaaaagagattctagtgtttatttattatttaagagactttatgaagtctaattaataaacatattaaatgacaattttatttgataattaattttaatgattaaataaatagtttctggtatttaagtggttgaattgtaaaaatggcaattttgaggaaataagataaatagttggaaaaatggcaaaattgcaaagtgggggcccacatcctatggccggccacttaaagggattttaccatttatttttccaatattttaatgccaaataattctaacctaaacctagttgtattcccataaatagatagtgatggccacatcttaaatgatgacaaaaacacttgcctttagataaaaatttgagccttcttccctatgctattcgacctcttttctctcttcctctcttcataatgtcaaaccctatagtgatagagtaagtgcgcacacacataaagtggtactcaatcatagtgtgtaatgttgtgaagaatccaaattgaagag

SEQ ID NO: 143426 - DNA, 1136 bp, Cannabis sativa
aataaaaattattttgaacacttacaaagaaaaaaaaatattgaattattagtattttataaaaaaaaaataatcattactgtaaaaaaaaattgtcacattccattcctatgtcaaccaaacaaaataattttcatattcccaggcatcatcataatattactgtgcacaatcaaacacggtaatgttgctttcctaggtttataattccattcgtcactcttcaagcaatgttaaacatactcccatgaaataaaacttgcatatataccaaatggccccttaaagctttgactgttccatctattctgcctctaaagacatgggacttttagtgctccttaatttttagcaagtttaggcgatgcctaaacttttctcatgttatactctttgtgaacatgtcaactgggttctcattggtgtcaatttcgttgactgaaatctctttattaccaatgatatctcttataaaatgcaccttgatatctatgtgatttgaccgctcatgaaacaagagaatcttcataaggtgaatagcactttaatgaaccatcaactcatttatcttgataccaagctcatttgtgaaccctttaagccaaatggcttcctttcgttcaagatctctagcccttgattcctttctttacactacaagaaatgtcacttttaccaacacagttcgctactgcgctggtaaaagtaatgttaccagcacatttcacaaactgcgttggcaaagagctcaaaattttaccagcgtacatttgtagtggctaaaatctaacttttaccagtgcattatcaagatctgaacctggatctctttcactccttcgggtttggttaccaccatcttactcactatgatttaaatcgtagtgcagaacattctaaaaatttgatttagcatgagaccaagagagtgaaagatggaaaacttagacatcctgcagatttccaagcttggaaaaaagtaaactacataaatcctgaattcaaatctgaaccaaaacaaattcgtctcggtctgtctacagatggagtagatccacatagatctctaagtagtcttcatagttcatgacctttcttccttgttatgtacaattttcctccctggttagtgatga

SEQ ID NO: 143427 - DNA, 544 bp, Cannabis sativa
aggggataataattctctaaaatacatgagtttataacaaagatagaaataaccttgtttctttgccgaaaacttaggacactagggtttcaagtggccctttttgttgcaatagaagcactttcctttttgctttgcctatgaatcagcaacctttttattcttattagttgtgttaacaactttaagaggcttcttgctattcttccactttttctttttgctaggttttgaagtagaggcaatttttgcctcagctttgaccgtataccattagcagtgccagaactaggagctttagttcctcctttctgtggacctccaatcaaattttcaaatgtttgaaggttgttgaacttgtggaagtaaaaagtcaacttgttcatgacatagtttgaggtgaagggcaaaaaagctggagtcaaactattttgatggttatgattatcaattttatctaataattaaataaaataaaatatcctaagtttgaaaattttatggttagaaaccctaaaatatctattcaaaacaaaattaacga

SEQ ID NO: 143428 - DNA, 567 bp, Cannabis sativa
ttttagggatttggggtttattttgagagggaatgagtgattgatgagaggaataatggtttagaaggatttgggatgaagatttatggttagatttgaaggaaaacggttttgaacgggatttgaagaagaaaaatggtgtgggagagtgatattcggtgggaggtgagggttgagaatgagagaattgtattttgaaattatgtgcgaatcgccccttttaaaatcgtctgaccgtcctcgccgcggccaagaatgcccaaaataaaaagctttctgtaactcttaaatggccgcggcggcattacatctggccgcggccactgggtgaaaccccaaaaaaaactttttttttctatacagtacataaataacaagtaaactaaaaattgtttttccagttttctaaacaaactagaaagaacagaagaagaaaataacaactaaaacataaaagagttcaactaaaattgtaaagaaaacttgggttgcctcccaattagcgctgcctttatcgtcgcacagctagacgttgatcgagttcttcatagtggcgccagaatcatg

SEQ ID NO: 143429 - DNA, 729 bp, Cannabis sativa
  modified_base (526)..(533): a, c, t, g, unknown or other
tctctctctctctctctcttctgtgcagatgggtggcgttcgagtttgatgatgttctgagtttgacgagctaggtgttcgaattgttttgggttcgtggttgacaaagggtggggcgtggagttcatggttcgacgggcttggtgttcaaacacaaaggatggttgacagtggcttgatgttcgtggtgtatggttaatacaagaatctgattttctttttggtttaggatttttttggttcaaaatgtgttctatttattttgggttttgtataatttttgatgtgttctaaattgttttgaatattacatgtgtaatatatttcaattttttagtttatttttttttaattgggtttatagaatcatttgaacatgtattgtgattaacttgtaaattactttaggtttttattttagtaaaatacatttttgtctgtggtgtaatttataaattttagatttagttaattaaaattataattgttatatttaattgtatttatatataattaatataaattnnnnnnnntaatatataaaatttgaattaaattaaattaaatagtattttttttagaaaaatatttaatatagtgacactttttgtgtgtcactatatctttaaatacatttataaaaaaaagaaaaaaaaaacaaaaaaaaggatatagtgacactttatgtgtgtggctgttaacctgactctatacgcctatagtgacacg

SEQ ID NO: 143430 - DNA, 733 bp, Cannabis sativa
gtgggagttgtgcgtggcgactagatgctggctcgcaatttctatcgcatagagttgtggcatagaaaggtcgatcatcagttgatgaaggtttgggcaggagataacgagaagaaagaggaagatcttcatccccgagttcaagattaaagaaacctacttaaaccaattgaagaattggaagaggttattctcgacctcagaaatcccactaaatgcgtgtacatcgggaagaacctggacgagcagcttaaatagcaattaataagctttttgaaagcgaaccaggatcaattcgcctagaatcatggggatatggtagggatcgaccctaagattatcttccatcacttaaatgttgatccaaactacccagggaatagacaaaaaaggacgcccttagattccgagaggcaaggggcactaaaacaggaagttgacaagttgttagtcaatgattttatacgcgaagtattttatccgtcgtggatagccaatcctgttctcgccccgaaacctaatggaacttggagaacttgtattgacttctccaatccgaaaaaggcatgcccaaaagactgttttctacttcccatgatcaaccagttaatggatgcaactgctgggcacgagcttatgttgtttatggatacatattctggatataaccagattaaaatgtacatcccagatcaagaacatacaagcttcataaccaacatgggactctatt

SEQ ID NO: 143431 - DNA, 608 bp, Cannabis sativa
catcatcaatatcatcattgtcttggccattattatctcccacctctgcctgactagatccaacatcatcaaactgtagtggtgggaggtctaactgaaattttggaatactcgcactcaaatctctgcaccaatgcctgcataattaggtttaactataattacatatttttcttttgcaacatcactcaaccactggctcttgtcattctttttcttgtagagttgttcaaacgtgtcaataacacttggataggctccagttgttgggttaatctacaaaaaaaaaaaaaaaaaattgattaaaagaaatacatattaaaagtaagatgatttatgaaacttttcttactttatcatggataaatcccatgattgtcttcaaactgtgcgcccctaatataagcattttggaccgtgtcactttgttttccttagaaattgtcttcaaaagtaaaaaagaattcatatatgttaaataaaaaaaaatcaacaaaaattaagtaaaaagacactacaacaaattaatttattaggggcgacaaaagtcgcccctaaaacaactataaatcgcccctaatgtattttagaggcgacatgtcgcccct

SEQ ID NO: 143432 - DNA, 1026 bp, Cannabis sativa
actagataaaaatgtatgtcccagatcaggaacatacaagcttcgtaaccaacatggatctctattgttataaagtcatgtcgttcagactaaagaacgctgggggcaatctattagcgattggtaaatgaaatttttgcaaaccaaatagggcaaaacattgaggtttacgtcgataatatgttggtgaaatcaataaaaagtaaggatcatacctcagacctcgcagaatgctttaagatattaaagaagtataatatgaagctaaacctgaaaaaatgttcctttgaagtttttcgcgggaaagtttttgggactcatagttagcacgaggggtattgaggcaaatcgtaaaacaattaaggcattaatagacatgccatcaccgacaaagcctaaggaagtacaagtcctgacaggaagaatgactgcacttaaaagattcattttgaagtcaacagtgtcgttcatcaacatattgcgaggcaacaaaaagttcgagtggacaaaagactgcgaagaagcctttcagaacataaaaaggcgtctagcaacgcctctagttttggcaaaaccaataactagaggaacgctatttctcaattagtgcagccatagtgcgagaggagggcaagcaccagcaacctatttcctatgtaagtaaaacgttacagggggcagaatccacatatccccacttgaaaaactcacgttgtgcctagtccatgcgtctcgtaaactacgaccatacttctaggctcaccccataaaagtgttaaccgatcagcccttgagacaagttttatcaaaaccaaatgcttctggaagattgataaaatggtcgattgaactggggcagtttaacataatatatcatcctcgaacctccatcaagggccaagctttggctgacttcttgataaaaggtataactccaaaagaaattccacgtgttcagcgagacacggaaacctggaagttatatgttgatggtgtatccaacgaacagggttcgggtgtaggggt

SEQ ID NO: 143433 - DNA, 702 bp, Cannabis sativa
atcaatttttctgaattgttgggtttgatttggaaaaattaaggtgtattcttcccatccagtcatcccagccacataatcaccagccttgaaatctgggtgatcagagttcacaacttgggacacaccaaaaccttcaattggctacctttgccaaaaatacataataatggtaacaaattgggtaataataacaatcaacacatacatctttatatattaaaagtacctgaccaggaacgaaagatggaatataagaacgacgataatattgcattcgagctttcatgtaaggatcacaagagatataaagattcttaacaagaatggatgaagacccttttggtgggttgtgattagttatcattatttcactcactttcacttccatgtctgtttcttttggcattgtttctatgtaccctttaagtaacacttgtttgttctctacagccatttttgtgatatgatcactacaaaatttgcactgttttgctttgttttaacccaatggatatatatatataaataaataataggagttcattatagtagtagggggtcacttttataatttttatttctactggtaagggtgcttcttttttgaaatgaaatataaacttcattgaaatttagcattcagaatacaaaagttcctgaaaatcaggtggtaggttctgagtatgaatgctacaacca

SEQ ID NO: 143434 - DNA, 582 bp, Cannabis sativa
actaagggcgcatataccatttacaacaaaaatttcgtctaatctttagttctatttccatcaatcttctttatgtttttgtttttttgtcttttagctctataaaagtaatacatatcctaaatatattttacttataataaaaacaaattattaaattattactataaacaattatatgtattcatttgcattgtccatttacattattacaaatagacgtatataatattaatatcatagtgacaaattaatgttaatgagtaagtgtatagtacacattcttttaatgaggtattttagtagattttttatttgtttcagtacttataagagagttttttaattttttttttctttatcattgtgtatattctgtatgtgtacaatatcaaaattaaggtttaaatattttattacataactattttttttatatgtgtatagtaagtaattgtttaaactttattttcggcactatatattatactaaatttaattctaaattactacaatatacgtaattatggaaaaaaaattaaactattttttttttagttttaaaatatataggagtgtgtc

SEQ ID NO: 143435 - DNA, 758 bp, Cannabis sativa
ataagtgatgaaaatacttctgtctctttattgatattaaaatgatagagattatattgaaatagagttttatttagggcataaagcccaatagacagtagaaggaaaattgtatataaggggctattcaatacctctcctacggtgtgttcttcccgcagaagcaaacgagatcatcaaagaaatccacgagggcttttgtggtgatcatgtaggttggaaaagtctatcaaaaaagattattcaacaaggatattactggccaactataaacaaggacacccacgaatttgtcaagaagtgtgataaatgtcagagattctcgcatatacctcacgtaccaccaagagaactgagaatgatgacctcaccttacccatttacaatatgggggattgattgattggggaacttcccacagagcgagggggagcaaagtacacatggtggctgtcaacttctttacaaaatggacggaggctgaacctttggtatccataacctgcaaaaaagttctggactttgtagtcaaaatcatagtttgtaggtttggaatacccattaagatagtatcagataacaggacttagtttgatggtgaattattcactgagttctgcgagaggaacaagactatcaaaacttctcgtcagtattcaggccttaggcgaacgaacaagtagaagttgttaataagaccttgaaggatagtatcaaaaagaaattagacgctgccaaaggtagatgggtcgatgaac

SEQ ID NO: 143436 - DNA, 536 bp, Cannabis sativa
tctcaccacggttgacggctgcacttgattattttttatttcccacattcgcttttagggggaaaccgaggcatctgaggttttttttttaaaatgattacccctttttcgtcacttgcctataaataccaaagagcattggcacataaactcattttcaccacccttctttgttaagtaagctcagagcgaaaagagaggtttttggcttcaagtctactgaagtgccttcatcggagctactcgttggattgacgttgctcaaacccagatatctgactcttgagtaagttttcgattccctttatgcttatttttgcatgtttacattttgaatgcacccttggctttgctgtagaacattcgtaggaaacccgaggtttaaaaactctgtgattcttctttgccatgatttcatgcgatttacagttcataatgcttgctttctgaactacattacgccagtcttccatcttgcttattctaagcttcatgaaattttttgccctaactcgagaaaatttcaaacttcttga

SEQ ID NO: 143437 - DNA, 575 bp, Cannabis sativa
gggtaggcttacctgaggagatcacctttgtgactctggcctacccagaatgatcaggttgtttctatttatgtttatgtttatattttattcgctatttattttctttgttatcattatttttttgtatttcagtttttatgtttttagaggatcaatattgctactatccatggttgtttactctccagatgttctctttccctattcttttaatttttatatctttagacattgaggacactgtttgattttagttggggatgttggacatattcaagcatgtttcttaatttttgtcatattaatattttcatggtcaaattttacaaaaattactcatatattcttgtaaaatgttatttttaagccaattttcgctatcttcgttacttataatttttcaagagatacaaaatgcacatgccaaactttgtggtaagatggttgttagcacatatttgcttagaaaagatacaaagtttaagtgttcatgtttttgtgagtggcgagattcgagaaaacaacttttgaatttttattgattcttgaaaatggttataattattttggac

SEQ ID NO: 143438 - DNA, 693 bp, Cannabis sativa
  modified_base (209)..(217): a, c, t, g, unknown or other
  modified_base (623)..(625): a, c, t, g, unknown or other
aaattaaaaaaatatatattaattatgttatagttttcaagaattaatttgagtcattggattaaatcaaagactataaattactatccatattgataagtaaaatactcaatccctactataatagccctatgatagaattttaaaattattaaattaattaaaatcttaaataaatataagtaaaaaaaatattacttctaaagtannnnnnnnntgacattttaattattttaagagtaattattattaaattattataaattgagtatgttataattttttataagtgtatttatcattttaaaaattaatttaattaaaatattttttcatgtaaattcaaaattaaaaaaatatatatttataattataactaaatttttaatggacataaaataaaaagtgaaaaaaaaataggtttggagtctgttagttgaacctataattaataatattcaagattaattataaatttaaaaatatttattaattatggtgtaattttcaaagataaatttgagccattagattaaattaaaagttataaattgctatccttattaataagtaaaatacttcatccctattgtaatagccccataaatatatatatatatatnnntatatatgtatgtatatatttatataaaatatggctatgtaacagaattcttagtttaacgattcttt

SEQ ID NO: 143439 - DNA, 597 bp, Cannabis sativa
ctctaggtaagccttgtagctccctctttagtttcttgattttgaagaaaatggattatgcatgtttttgagtttttgttgttgattgttgctgctggtgtttagttttgttttctgaagttaaattatgtttaaataggttggtttgagcatattttgataggtagtttgttgtttgagcaagctttgagattttgaactcaagcttggctcattaatggtaattttgaattctgagcttaggttattgttttattgcttggaaatagtttattggggtataatatgcaggtctggaaagtttgattgagtttggaaatgatttggttaggctttgaatgttttttatttttctgggtaatactggctaaccagttttacaatgcttctaaaatcggttacccggattttgcagcagggaaacccgaaaatttagcttgtcgtttcgcgtttgtttcaggtttctagttggttgattccctgctagtttagggtattgccatattaagttgttgtagatgggttttcggtttaaaacctaggtccttgttgtgatttagtgagtcacttatgcgtgttattatcaatgtgatttag

SEQ ID NO: 143440 - DNA, 792 bp, Cannabis sativa
gctcatgaacttaacccatttttgttttatgatttattttattttcagattaatatgtttattaatgggtaatgtgagattaaatattgtagaatgggttttttcttaatatttgaggctgttgctgtatgattttatagtaaaatatcaagtttttataaagttcattaatggaggaaaacccacttctggttcaaaatattttatctattattttgtattttttgaattaaatgagtattagaaaataatagagggcgcgtcgaatttggtggtcggatgtgggagatatggccaggtcacgaaccgggtcatgccgatccgggtttcagacccacagacccgcctgagcaattctgggtgacagggacgatgaaaaaatgacttgtcgtttttgcctctatcgggcaaaacgacatgttgttcgtcataatgcttcatcccctgaaaaacgacgtgtcgtttttttttttttgcagtttcagcccagccttctaacgatgtgtcgttcggatctatgcctccttagtgtaaatgacttgtcgtttgaagcccctgtctgtgcatcgttttggccaaacagcacgtcgtttttgtcaaacaacatgtcgtacggccatggctatttaaaaaaaaaaatcaaaggcagcaggcacgtggggcgcgtgcacgacccattttgggccatttttcaccatttttcatattttttaattctctattatttcttggtatgtacaatactaattgcatgaattttattcatacttggttgataattttagtattgtg

SEQ ID NO: 143441 - DNA, 1049 bp, Cannabis sativa
gggagattgatctctggtgagaaaagagtttcgcgtgctcggtccaactcaatatcattattcctttgtccacccatgccgtgaaacatatttttcagtttgtctaactgagcctgtacggctgggctgacctgctcggcattctggtcagcatctttctgagcgggaatttaagtacgggctccaggctgcacgatcgttgcaatattctgctcgtctactctccttcttttgttcagatcattccttaggtcatgggtttctcccaacctttcgaacacagaagtgcctggctgccttagtgattgattcgcttggttgaccagacaaggtctgctcacctaccggtgggcccacgggtataactcgtgaccggggattgggcggctgaccatttgtagtctgggaggtattcatcgtcgaatcttcgtctattccacccaggggaatgacatttggcagctgttggcctacagtttggtaggcttttcgtatcagcacggtagcctgccgactacggttttcgatttcttcatggtaagcccttaatgcctccatctctctatccctccatttgtcgaacatgcacctttgttcgtcgaatgccagatttactgcagcacacagttcgtccttgtcatgatgtaaggtgttgctatgattctgcatgagcccaagagcgttgcggagattttgtaactcagtagcatctccgatggtcgtctgagcgttggttccaggtagaactgttgtgttatgaatgccctggttgggtgtggaactgttattcccagtctcttgcacaccaggcgcggtttcatccacaggaagtgttacaccactgcccacgttcgccgtctgtctaggattaacagctggcggaacccttgtgtttcttggattttgcaaagcaggatccaccgtctgtgaatttgctggatcagtcaaacctctacgagtttgcaccatcgtatctgtgatcagattttgagtagagagcaatccttgattcttctctcgatgaaagcaccaaaatgttgacttcgctt

SEQ ID NO: 143442 - DNA, 733 bp, Cannabis sativa
  modified_base (668)..(673): a, c, t, g, unknown or other
gtgattcatgttgatctatgtgtatttgatgattgtttgatgtttacaattttttttacgaaaaataattggaattttattttggaattatttttgctggatagtatacaaaaaattaagcaattcattttttttttacagaacttaattttgattttatttgagttacttatgaatttttgaaaatcggaaaaaatcaggaggtgtgtcacctccatgcgcgcgccgatgcccatatttctcgggtgcacgcgcttcagacaaggctcctgtctgagttttctcggtcagaaagggctgatttgtctgaatttgggccatgcgcgcgcgggacaccctgctggaagcctccttggctgaggtttctcggccagcccctctttgatgtgcgcacagatggtatgcaatgtataccatcaacacaaaattcaattttttttttccaatttttctccaattatttcattttttcatgctttttcatagaattaatttaaatttttttgtgtaattttgttttttgattttatttttcatatttcaaatctaattatcataattaaattaattaatatttttttaattaatttaagatattaatggtttttgaaccttgaatataagtaaaaatctatctttttacttagttggttatcttatttttaaannnnnnttattttatcttatttttaaatttcaggtcagatattttatattttaaattatttaatta

SEQ ID NO: 143443 - DNA, 948 bp, Cannabis sativa
  modified_base (485)..(487): a, c, t, g, unknown or other
ttttgtcttttttttttttttgatttgttatttctctttgttttttatggctttttctctaaatgaaataacatttagatatctctctttgttttattttatttttatgaaaaaattatataaatagtttttagttttacaagctaaaaaattattaggtataatctcttatttaaaatgagcattttgatatataaataaaaaaataactgttacttttaaatattttaagagattactaaaaaaatattttattattcatattttaaaaaaatatatagtaattaaattagtatcaaaccatttcaataaatttttatatgaaaatgttacttttaaatttcttttcatcaactcaaataaaatttaatatactactcaaattggcatcattgattagtctaattttttattattttatattaaagttactaaatgatatacttacaataaatttatataatatgtatctataaataatcaannngtatcttaaacattatattacatctactaattttattgaaaaactatatagtaagtacttatatttatcttatctcaacaaacttattaattcaaattacaaaattcgataaatgttagttttaacattttatcttattagatatttttttaattaaaattattttggcataaatttgataattattggttagtttaggtttgaatataaattttagtgtttccaaccataaaattttcaaacttaggatattttattttattttttaaaaataaaattgataatatcctaaccataaaatatcttatttttcaaattgtttattttgtaatatttaatttattaaattataagattaagaatatgacattaggtatatctattttttttttttaaattcaagatatatattatattatcttattagaaatttaaataatttaaaatttgaataaacttga

SEQ ID NO: 143444 - DNA, 563 bp, Cannabis sativa
tgcgtatacttgcgtagtgtttataaattatagcaacaccttgtctggttggtccacatatattaggcaaaatcaggagcaacaaatgatatattgaaataagagttttgttattttaatataatttattattatttatttttatttttttgttttttttttcagtagaagaagtgtatcatttactcattattatataataaagtaatatttataaatatcattccaaaagtaattcatataattatttaattatttgttaaaaaaattattaaacaaatgtgttgaaataaaaataaagatagtataataatatttttacatatagaatttttatatattctcatatggattaattatgtttaacttttcaaataagttggatattttttttttataatctaatatatagtttctccttttaatattatttttcttttgtagtagtcaaaatgaaaggcaaccaaccggaatttaagaaaaaaaaatataattacttttacaattaatagttattagtattctattaaaaaatataaatatatatttgttagtatttacat

SEQ ID NO: 143445 - DNA, 617 bp, Cannabis sativa
ttttagaaattcatattaggatttttttttaacaaaaggataattttattcaaaagaacagagcaatacaaaacaaaagccgaaagggaaccaaccgttagcaaagagaaagagaggctaccaactattgattaacctcaatacatattggtctttcttctttttactagtacaataaagcccaagaactctatccttaacaacactctttatctctttgctaagtgaagcaatagaattacaaaccacattaaacagacaatcgtttctattcgtccacagtatgtacaaggatgcagcagtaatggcattcaggattttagaagctaattctactttagctggaaggatacggtcctagagctcagtgatgtttttcggccaattaatttgcccagcccacttttccgcaaacacaatgagtttccttgtgaatatgcattcaaaaaatagatgattatgggattgcggagcatcttcggagaccaaacacagccttgaatgaatgggaaaaaatctgctcaagtgatcacgggtgagcaggttttcatttatgatttgccaaaacatgaacctgtgtttaggaacaatatatttatgccaaacagtagcagtat

SEQ ID NO: 143446 - DNA, 620 bp, Cannabis sativa
agatatgatagggatcgaccctaataatctgccatcatttaaaggttgatccaagctacccaccgaagagataaaaaaggagacccttggattccgagaggtaaggggcgctaaaacaggaagtggacaagttgttagtcaacgactttatacgcgagctgttctatccctcgtggatagctagtcctgttctcgtcctaaagcctaacgggacttggagaacttgtatcgacttttctaatctgaataaggcgtgtcctaaaaattattttccacttcccaggattgaccagttggtggatgaaactgctgggcacgagcttatgtcatttatggacgcatattcttgatataactagataaaaatatatgtctcagatcaagaacatacaagctttgtaacaaacatgggactctattgttataaagtcatgttgtttgggctgaagaacgctaggcaacgtatcagcgattggtaaacaaaatgttcgcaacccaaatagggaaaaacatggtggtttacactgatgatatgttggcaaaatcaataaaaagtaaggatcatacctcagacctcgcgaaatgctttaagatattaaagaagtataacatgaagctaa

SEQ ID NO: 143447 - DNA, 1264 bp, Cannabis sativa
attcctcatataaaggtttccaaaaccaatcaggggaggtgcaaccaatctcaaccgagtgtcggatctgttactttctaatggtcactggaacgtacataagctgaaagagagctttgatcgtgaaactgttgaagccatcttaaaagggggtcacccctctggtcatggcaccgacagatggatatggactcaaacaagtaatggagtgttctcttgtaagtctgcttatcttgttcaagctttggatagagcctcccagtgcgaggtggctccgaatctctggaacaagctctggaatagcaaaattctagaaagacacaaggtcctgtggtggtgtattctgtcaaatgcgcttcctacaagatcagtgatcaataaaagattccgcattgaggatactagttgtcctctgtgtggaactagggaagaaactatggaacaccttttcctttcttgtgacgtggcctttcatctctggcgatcttctccttggggtttttatcccatttgtgatactgtaatcagagtttgggactaggtcaagttcatctggggtctaaaccgtagaggagttctagtggaggatgctttcttgtatgcctccattattgtggatacaatctggagggtgcggaatgacaaagttcataataattgccttgttgatgtgaaaaaatgtgttgatgatatatattttgtctatgctgatctacatgattctttgttacctagtcctacttctcatctaaaggaagtttggtcccctcccccacgggattggattaaactgaattgtgagtgggttttgacaatatgtgcgttgtagttgtcgccaggaaccatctcggagaagtggttaaaattcagacggcgcaggtggatttctctgatgctctttgcggagaagctgaggcgtgctgtttagcggtttcgacagccttagagatgggttacaagtttattatagttgagaatgactcgagggtggtgatcaatgctttcaatgggttggaatctcgttgggcgcttgaaaattacgtctcattttgtactaagtcttctcgctcgtttattagctgtaatttctctttcattaatcgaacatgtaactttgccgctcacaatgtggctagatgggcctttgctcttcatatgtttggatctatcccggactctatgttaccggagaacctgttatgtaatgaccgtgaggtctagtttctattttatttaatgtcatcacgctaatttcaaaaaaaaa

SEQ ID NO: 143448 - DNA, 610 bp, Cannabis sativa
aaaatcatggtgaaatcctagaaaatttaaaacaagtgaagatcaacctgcctctcttgcatgtgatcaaacaagtaccagcatatgccaaggtcatcaaggatttatgcagcatgaaaataaaacaccatgtcaagaaaaatgtattcttgacagaacaagtaagtgcggtgattgaacaaaagataccgatcaaatacaaagatcctggttgtcctacaatcagttgccaaattgggacccaaggatttggtcaagctttcctagacttaggcgcaagtgttaatctaatgctttattcaatttacttgcaactaggcttaggagaaatcaagcccacatttgtggtgctacaattggctgactgctcaattaaaaagccacgacgaatagttgaagatgtcttgattaaagttggaaaattatattaccacactgactttttgatttttgacactcagtctgaggttaatactgagtcaaaaattcccatcattctaggtaggcctgtccttgcaacagccaatgctctcattaactataggaatggtctcatgaaattatctttcgggaatatgactatggaggtcaacatttttcatgttgcgaa

SEQ ID NO: 143449 - DNA, 709 bp, Cannabis sativa
ggtaaaatattcccaacacacacaacacatcaagagaataaacagcatgtacatcacttggatacctcatagcctcaaaattttgaatctaattgtctccctatccatttccatggtcaaagtcccctcatgcagattaatctttgttcttgcaattttcataaatggccttcccaaaaaaatcacagtggagcatggattggattcatcttccatatcaagatcatagaagtctactagaaacaccaattcattgacttgaactaacacatcttcaagaacacctctaggataagcattcgatctataagcaagttgaataattattccagtttttcaagtggaccaagattcaaataattgtatatggagaaaggcatgacatttatagaagctcccaaatacaacatacacggtttaatccttttattgccaatagtgcaaggaatagtgaaagcactaggatccttacattttggaggaaacttcttttgtagtattgtagaaacattctcccacacactaactttttcattacccctcaatttacgcttattagtacatagttctttcaaaaacttggcataacatgacgcttgttgtaatgtccttgcttcaagcctccattggaccttcccccacgaactaattactcttatacacgggtacgtcactctggctactttttggactgatgactgtccctaga

SEQ ID NO: 143450 - DNA, 1114 bp, Cannabis sativa
  modified_base (244)..(244): a, c, t, g, unknown or other
accatgttattttttgttctgtacggacatgtctcggcagatgcttgacactctgaagaagagaatgggcggaagctctagcacctctcctctggccaagaagtctaaaggcggtgacgggtcctcttctaaagaaaagaagtctgctgaggaggtcattgatctttctgaggagctaacagctgctaacccctctaccccaaaagctgctaagtcgaaggagtctcggggaggaagcttgganaggtttggaccaccgaaggttgggtctgagctagtcaggagtgaacctgaacgggtgcgggcacatactccacctttgccgatgcttccagaggctaagaagggcaaggagatgcaggcccattacttgaatcggctggttcctgaggtcagtgggcaactggctggtgctgacaatgactcttctttgaaattgctagtgggcaaagtcttgaaggagttaagcagggtaagtctttcttgatacttccctttaatcttctgtacttagctcgaatgctgaagttttttctttgtgcaggccggtctaaagttggcctacacttactcccgggctaagcctgccacttccaggaacacggctctgtccgacatcatgagggcagaggtggacttggccaggaatgatgctgaagacgccagggcagaactcggagctattcggttggagttgggtgaagccaacaagaagctgttaaccgcacagaagaagataactgagctgactaaggatctcgaggtttctgaccgtcttgaggagaccatcgagacgttatctgctgaactgaacaatcttcaggatgagaggacttctcttcgagcagttcttcatcaggtgaaggacgaagagctttcggccgaggtggcaaggttgaaagagaaggtcaatgccttggagatagccggtcttgagctcttctttgacttttggaaggctaatcctcaggccaactttgactacctggatgatgctaagggtatgtaccttgagttctgcgcgtcccaagtggcctatggagaaactgaggcggctgcttcaacctccggtcaggctgctgatgtaccacatgttcaaacaacagatcctcca

SEQ ID NO: 143451 - DNA, 1742 bp, Cannabis sativa
tcagatctctaacccttattcctttttatcgcagagtattaaaaagatctgagcctggatctccttcaggtgtttaattcttcataatcttccacactataattgagtacttgacttgatatgagtgggcatatactctgtagaggccaaaattgggctcaggctcaatgtcatatgcgatgttttcaaagaatgctcaaacaagattggattggactatttgactggttatgacgatacgatcacaatactaagcccaataagcccaaaaaaatactggcaagtcagacattacccatgacccaacattgtgctcacaatgatccgacccatatatgagactgagtcttatcgctcatctaacgatttctaaagtgattagtcaaattgaccacgtaaataacgatctccctaattatatgggagaggagcacttcacaaggggggtgcgcggtcatgagtaacgtctttctatggatgcctataagagctactatcagtcacgaagagaggaacatcaatttcagtgatctcaatacttcttacttatcgttcactctctcattctctctaaaactacatacttatttctgcagtcaagataggtggtaacttagttcgatcatttattctcatctttttattacattgttaacaatattgctgacttaactgtcggagtcccttcggccagcaccatcccggtatcctaaggtttcccggttactctcttctttgttctacaggttgtcggtgcccgcatacaatcatcttcgattgattgtggatcttagcatctacaatttggcgcccaccgtggggccctaacaagctgcaatcgagcaaagcatttcgacctttatcattcagtccacccacaccagagcaatggtggaacacatggaagaaagagagattaatgaggaacaaaccagctaccgtgaacaacttgccactctcacgtctcaaatgaaagaaaacttggagtgcactcaagcagtggaaagagaaaatacgtcgttcaagaaggagaatgccgcactaaaggtccagctcaagtcattgactgattcgatggcaacaccggacaatagtcgaagaagattctaagttccaattgatccaatgcaatcacttgacgataccccaataggaggatcaagccaaatgaccatcaacaacaggggtaactaatgtcacggttggacaacaaacaaccacagtcaatcataatattaggaatgtcagtcgggtcgggcccggcccggcccgacatcactttggcctaccgtggcccggctcgactccttcttttggcctagcaggtcaagcccgacctgagataatcgggccgggttaggcccgacccgttttttttttagttagaatacttactacttagttgtgttttttgttttgtttcatttggtaaagtgaatggtatttaattttggtggttgagacaattcattataggcaccttttttatttatttatgttattttagagagagagaaaatttgatgagaaaattgataatgcatcaaaacccaccattgattattattattattatttgccctctttttttttttattttctttctaaaaattattattattattaggagatggttaattataactattatactattacaatatgacatgccttattaaaagggatttcttttttctttggttttgtcttgttttgagtcatgggtaatgggagaactatta

SEQ ID NO: 143452 - DNA, 1262 bp, Cannabis sativa
  modified_base (66)..(71): a, c, t, g, unknown or other
  modified_base (989)..(990): a, c, t, g, unknown or other
aaaatgatattcacccaaaaaaaattataaaatacaatatttttatattatatattttataaatannnnnnttattaagctatgtattataaataattatattattttaatgattatacaaaaaattattattttactaattttttgtaattattaataatatttatacataaattataatatatgtatattatttctgtaattaatacaaatataattatttataatgatttattatatattattagctaatataataattattattattataattataatattctattagtggtaatgtttatgattaattaattataatatatatatatgattagttaataaagttactgaatttattttttaaaaaaaaaattataatatatgtatattgtattatatgattatttatatattaatttgttaaattttgactaatatataattatcaataggaattaatttaaaacaaaaaacatatcaaaatataatttgatttatattgaactacaaaaatttctaatgaaaaaataaaacaaaaggttaaaatagtaatttaatatgtaaagcctaaaaattagtgacacttttatatagttatagaaaatattttatggaaataagtttcttaattgtaagtataaggatctcgattctttgttctagaaaaatattgtgaaggctaacatactctctagataagagcgtgtaaagtggtttttgataggaaggataacaacatttgtgaagtttctttattgactcatggttaggatttacccaaaacctaaaggattaccttcacggctagcaaagtggctcatctcttgactgataatggcgattgggatatttcaaagctaaatgacttgtttgcctagagaatggttactgttattttgaaagggggtaggccttcggcgtaacaccctactagtttaggcatgttaacatgatttttaactaattgtgcagctcgttgctaatcnncgaggttatcgaaaattgtgattaattaaaattttacttaattaattatgaacaccaaaataatgtacttatattaaattggaatcccgtttacaaaagttttattgaacatatacaaaagtttgtcgcctagcgactatacgaaataggccctgatttcccaaagaccgtacgctccatctgctcgctctcacggctgctcaacgttaaccttgcacttacctacacatgcaaacaataactgtgagtcgacagactcagtaagaaaagca

SEQ ID NO: 143453 - DNA, 617 bp, Cannabis sativa
aaaaatcagttcaggatcctatttgtactattttaaaaaatacaggatctattttgttatttaacaaaataaagtgtccaaataacaacttttgcaaaatacaaaatctaaaatgttatttattctattaaaaatattctaaatcgatttttttcaactttttttttttgagtaattatgaaaaaatcttttaaataattaactccccgatgttttatttggtagaaaataatcaccacgtgagaatgctaaatctcactctttttttgttcggaagggttttaaatttaagtatttatattgtaaattattaattatattttattttttaaaataattatatgataaaatcttttaaataatgactaattaggatttttgcatgtaccaaattatgcccctaatcttttaaggtcattaaaaataccccttgaactattgagattgttggatttaaagattttttttcaattttattaaaaaagtctaacatggatgaaagttcaggggtcataatttagtacatgtcaatattcgagggacatgttttggtagatatcaaagtctggggagtttggttttgtatataaacaatcactgaaatagtaaaattgaat

SEQ ID NO: 143454 - DNA, 691 bp, Cannabis sativa
  modified_base (661)..(666): a, c, t, g, unknown or other
aagggacacccagtcagcctcacatcgagtctcggacagtcgcgcccgacacgtgtccccatccaaaggcaaaaacgactcggatgaagtctgcacgcaacttcggaagtcccgtaaagacttggggggcaaattttatcccaatttttgcactttgatgtggcatcgcataatggtgacacgtggaatcaacttggagtatctgctcggagggtacagtccaaacaggatgcctcgctgacatacccgaagcaaaggaatcagcaatctgcgcagaataaccaacacttagcgaatttagcttttgcatcgtgagtcatcaacaaaatccctgtaacttgggtatcagattacagggatatgacatacacacgatcccacaatcagtgtattctgtatttatcccatgatcagcgtattccgcatttatcccacgatcagtgtattctgcacttatcccatgatcagtgtattccgcatttatcccatgatctttctactatatccattgtaacgagaagggaaacacttcctttccaagttttacagccctataaataatgatgcatgttcactggacgcaaggttgcaaacagttttgttgagactttaccctagagatattatataagaattcatatttagagatactgttgtaagnnnnnnaagaaaaggaacctttctccttgtt

SEQ ID NO: 143455 - DNA, 727 bp, Cannabis sativa
ctctttcacgtacaaatctgcatactgatccactgtaaaggttatttttatcggtagaaaatgtgtaaactttgtgaatcgatctaccacaacccaaatcgaattgtacatcccacccaaccataaagtctatggtgatatcctcccacttccactcaggaagtgtaagtggttgaagtaaatttgccggtctctgatgttcagccttgatctgttgacaagttaagcactaggatacaaattctaccacatttttcttcatcttgcaccaccagcattagggtttaatatcttgatatatcttggtagtgccaggatgcaataaatatggagtgatatgagcttcctcgaggatctcatttctaagttctgtactacttggaacacaaaccttggtcttataccataccgctatctgatattgtaaaattcttagcttgaccagctaaaacctcttctcgaatcttcactaattccagatcaattaactgaacaaccgtaattcgctctaacagatcagattgtaacatcaaattatgaagtttgcctacaacaaagtcgatgcctgatctggccatgtcatttgctagctgaggtcaaatcttaatcatactgattacttgccccggacccaacttgcttagggcatcagccactacgttggccttcataagatggtaaaggatttcacaatcataatccttaaccaactccaaccaacgcctct

SEQ ID NO: 143456 - DNA, 618 bp, Cannabis sativa
acaatgtgtgcctataaaataacaaactaactagtttatttttttttccaggttgagacattaaatctggttgtatacaaagtacatgattgtaacatgtgttatagacttacatagtaaacctcgataacaatatatgaacttgacaaagatttaaatatagtgagatgtcttgctcacataaaatgtcttgctcataaagttattttgcatatatggctatactatgcctgtactcgtacattagtttattttggcatattgaaataaattttcattcattgtttacatggtagtctttttgtatagccaatactatcgtatatgttaataaatctattggtttattttggcatattgaaacaaatttctatttttcttttcgtatattagaacaataatttattttatttcatatagtctaccattatatatgtcaataaacctactattgtttgttggaacattattttatatttttcaatacagagcaaactataatcaaacataatgatatacacaaataaacatattaatatatttttcgtatattagaataacaattcattttttcaaacacatatcatcatgtatgcctataaaataacaaactaatta

SEQ ID NO: 143457 - DNA, 587 bp, Cannabis sativa
  modified_base (378)..(378): a, c, t, g, unknown or other
tactaaaaataacctaacaacaaataatgtgatttaggagcctgtaaattgtcgagcagctgttccacttaggttggtcgatacacctgaattcgaaaatgaggtaagattagtataatgatatacatatgtgtttgcatgtttagtgtacatgttagttaagcctgctagattacattataatattggtatcagtatatttagtattatattagatatcaataaatgtaagttggcttaagtactactcgacagtatcacatcggtatgactagagtacgaccagcgtactgagtataggttgatattatagtcaataatactgtactacttgacagtatcacatcggtacaactagagtatgactagcgtaccgantataggctgatattatggttaatagtactgtcgtacaaacgttcttgactcagcaccgtgttgggcacaggaatagggttatggttgggtgtatgggtgcctaattataattgggattatagttatatttttgtttatgcttttctttctgagtttgtcgacccacaaatattgtttgcatgtataagtaagggcaaggctaaggttga

SEQ ID NO: 143458 - DNA, 740 bp, Cannabis sativa
tatatatatatatataaagtataagttttaattttaaaaaatgtataaatagatcaattagtatgcatatgttataattgttttattaattagattcacattatataacatattttttgttttatttttttaattttatcgaaatattaatcataacgtaccttcatattatataactaaagtaataaaaaaaatattacacctttttaaataaaattattaacttattaattatattattttcataaatacataaattattttttatttttgagaaaataaatacataaactgttaataaattaactatgtgagttatttttaaagaaaatattaggagttattaatatattaattaaaaatacaatattttttaaatttagtttgttgtgtggtgtaaaaaatgttatttgtataactacttaagggaattaggatacacttgagcaataataagaatgatgtaattaatttgtgactttaattatattattagtaagttattggagataataataatgaattttattgtatatagtatatattataattacatagttatacattaatttattatagttttatatttatcttatagtatatgtatacgataaattgatacttttaaagtaattgattatataaattatatatatatattaatgtgatatgttgattattagagattaattaattttggtaaaaaatctatctatatatttatataatgctgttgtttg

SEQ ID NO: 143459 - DNA, 911 bp, Cannabis sativa
  modified_base (368)..(379): a, c, t, g, unknown or other
gttcatatagtgggacagcatctccttgccctttttagcctcttgcagcacgggcaaaggtggagttggtgcctgcagcaatcattggtggtccagactccttggacttggcagattcgggggtagaagggtttgcagcagtcagctcctcggaaagatcaataacctctccaaaaggtgtcttctccagaggagaggcgccagagcttccgcccatcctcttcctgagagcatcaagcatctaccgagacatgtctgcacagaccaaaaatagtgtggttagaaaacagccatcagaaaatacaaggcatgaaagtcaagaagctcaaaaaagaagtaaaatgcagagtgactgcccgcccacaaannnnnnnnnnnntcatcacctgacatcgactttatctcagacatgacagccttcccttttccagcaaagggataggacgaccaaacatgtgaagtgggctcccttatgcgagttgcatgttcaacaggcctaagcgtggccgggagtttcttcttcctcttcaatggggtcacctactcagcctcagcctcaaccttggcttcatcttcaagattcaagggctcctgagcatactgcttagccctgacacctcccttcaacttggcttcacgcttaagttgaatgagctcatcctccttatgagctcgttcaagccggtcagcatcagacctccccttattccccgccacgaacttaggagaaaagtcttctgcgtaaagcccatacttcaccaaattatcattgaaggtcaactggatgatattcctgtcttcctgcagcaaccaggcaagtttttgagctctatccctaagagcaagggtgaggggaggatggtgatatgtcgggatctgctgaaactgagtctgggtgatgctcggatcct

SEQ ID NO: 143460 - DNA, 541 bp, Cannabis sativa
tcaatttttattgtacaacaaacagagttatttttttatgaaaaaaatacaagaaacttaattgatcaacaatattatataattatatacatatggatgtaatacatcactaaaaaaataataaaattataatgagcatataatacgcaggacaatcaaagtttatacattaagaatatgttatagatcatattaagttatctaaaattaggaaataagatttattacccttttactgataactaaaaattaactttcaactttgtaagatttaatatacagctaaattaagtcttttcatggatcagtagttgttgtagttttctagtacacagtaaattttcgtacatgcacatttttcatatttttattattattatgatgagagattaaaatacaaacaaaacaaaatctaaaaaatagtagagtttcatttcagttttcattgtagctttctatttgaaaatttttcatatgaacaaaatcgtttttgatccaaaaaaaaaaaaaaaaattgaaatggaggaaaaaatgtgtttgt

SEQ ID NO: 143461 - DNA, 504 bp, Cannabis sativa
gttatcatacccataggtaaggacaaggggaatgtcgcacgtggctgaagattgtatcaattagaaggacatagtcattcatgaggatgctttgtttggatttttgtttttaataaagttgtgtctaccattatcgttgttggtcctctttccattgttaaagccatttttattattactctcctgaccatgggagccttggccactaatgcttgctccgttcttgtttcccttagcttgattgaggcctttggcgttccactcagcctcttctagtttaataaactcatcagctctatcaaggaagtctcatagtatgtgttggtttccgcctcgtatccttccacatccgacttcccacaagggtgcaacccatgatgacggcccgcttgccatctgttgtcgagtgaatttcgcaacaccaaaatgtattatttaattaatataaaaagagaattttcagggaagtgacaagtgcgagtattcgacctagaatggcgagta

SEQ ID NO: 143462 - DNA, 526 bp, Cannabis sativa
gcatgtcgatccgaccaggtgctctaagttgatgccacgtcaaagtgccagttttgggataacaataccaataacaatttgatatattatgtgatgtaacactagaattattgtattaaactacacctaaactatattttttaaaaaaaatttcttcttgaaaaagaaaaagaagatttagcaaatgtgacaacaaataaataattaaaaaaaagtgacaaagatatattaaaagtaaatttaataagccgcccaaaaaataggtatataattaaaaaattaataaaaagtgacaatattaaaaatgtaaaaatttaaaaagattgagttatgtaatatggatacacaacttataaataaatattgtgatataataatttatatacattataaatttataggaaaaaaagtaatttattttaagaaaaatttgagatcttatacttaattataccaatagtaatatgatatattatgtgatgcaacaccagaactattgtattaaactacacctaaactatatttt

SEQ ID NO: 143463 - DNA, 1054 bp, Cannabis sativa
gatagttgtagggaagttcaaagctttggtgggatatacttgtataaattaggtgactttggggaggtattagtgttatcaagtgagaaaagtttgaaggggcagtatataaagttacagtaaaaacattgttctattttttatttttttaataattattttattattaattattagttagtgttttattaattattgttttattttttattgttttagtaataattattaattgttgttttaataattaatgcagaaccggaggaagagaaagcggcctaggtggtttgatgagtacactgaaatgaaaaagatgtctagggtttcgaagacacttgtgaatgcggacccacttagagtggttgatcggaagctgctcagaacttttcacagttgggtactcgaccggattggaaacaagtacctgagagagtgtttctccggtagacacgattcggcttagttcctcgaactacatattctgaagacatggcttggagacgatgtaagttcttacgacttttttactttggtttttaaagacttcatctaactctttttatttaatctctgacatatttaattttcatgttttagcatttggatgcggcattccatttgatgagaaggcgataacacttttatccggaggtgcacctaaatagatgcgtcatcatgccgtgtattttcccagcaggagttattgctcggtgggaagctgcgggtgatgaccaggctaactatcagtgggatgagggcatattagatttgatttgaggggatgaaagtcaattccttgccaattggaagaataaggagagaatatatatgaccctctacttcgatagtgcaaggcattgggtgacgctagaggtagatttagatcattgttgttgaacatatttgactcgagcctcagatcgatttccccgaatgaatccgagagtcacttggcaatgtggaaaaaattactaccaactttgatgctgcaggctggcctattcgagactcatgacatgatcctcgtgcctcaattgaccgccttagagagcca

SEQ ID NO: 143464 - DNA, 1202 bp, Cannabis sativa
cgcaatgaatgcttcgaaatccaattttctctcaccacgtttgacggtcacacttgattgtttttgatttccaatatttgcttttgggggaactgaggcgtctgaggtttttgaaatgattactcattttcgctgttttgcctataaatacggctgatcatcgttcacaaactcattttttccaaccttctttgttaagcaagttcagagcaaaaaaagaggtttttagctttgagtttgctggaaaattttcacaagaactgttcgttcagctttgcgtaaactgtatccagacgtcgatcattgagtaagttctcgatttctcttactttgcatatttactttctgaatgcaatcttaactttgttgtagaagatatgtagaaaaccctaggttcagaaactctgtgattttcctttgtgatgattcatgcgacttcaccattcatgatgcttgctttttgactgcacaatgtctgtcttttatcttgcttattaaaagcttcgtgaaatttttgccctaactctcaaaaatttcaaacttctgagttttgacttttcatcgaatattttcattctttaatctgttgagtactcactgtcggcatatttgcctgtttaatgttcgatatcccgaccaaacactcatctcgcatgttgtcttttatagatgaacccagttgagttttggggaagcgaacaccgaatcaaccaggatttgcttctactcttgcacgaggaatagcctcgtctttgttctagtccccctcttcaagcaacggactttttagttcaatcttcccatccagccacaggatgatggctcgcactaaatagacaacgcgtaaagtcaacgagtaaagtcaacatgtttgaccctcatgtggcccatcatgccaccttgcccaacgtcgaacaggatccacccgtgcacgaggagggggatcatgaaggggacgctgaagtccaagagatagaggagcagggcgatgtccgtcttggtagtcctttcgaggcagagatagaggaggaggctgcacccccaaactttgggggatagaacgaggctggggagcttgtagacgcgaatggcgatgtcctggtcgagggcgtggacttcgtcactgaggaacttactactgtagttcctcataggaggcagggtgccttgggtgccatgtgggtgagccctccgtccaaggt

SEQ ID NO: 143465 - DNA, 570 bp, Cannabis sativa
cctgttattaacatgcaaaccaacaaagacttgggggccttctctacttttgttacatcaacattaaaacatttaaaataatattgtagggattcatggacctcttgtttaatattagccagagtggtatagggtagtttatacatcatcgtggcttggaaatgcatgaggaaaaggtcgagaaaggcttcccacatcgatatagatgctttaggcaattggctgaaccaatcgtgagcattatcctccagggttgccgtaagaatgcgacatttcgcaagctggggtacctgtccacttccataatagtattaaatttctctaggtaatctattgggttagtggtacctttttatttcaatgactcagacagtcggaatcccttctgcaaccgagcttgtcgcacctccgtggtaaaaggagaggtcccatgcaatttgtatatgggctttctctgctgctcgatcatcttcaatgcctgtaaaagaatgccctgatcgattccccctggaagggtggcgtggccctgagtcgtcgcaggtgcagttgctacaatggctatattggctg

SEQ ID NO: 143466 - DNA, 682 bp, Cannabis sativa
tcaatttggtaaagttgacacttttattaaagatttggaaaggaagcttgatcgaatccagcggctcccagtgggtatgagggtttgggacaccgaatgtgctattcgtcgatctctcaatgaggcttaggagcgaaaggagttatgctggaaacaatttcttggctcaaggaaggggataaatgctcaaagtttttcttccctttcgcggctatcaaagggagacggaatgctattgaaagtatcttgaataaagatgacatttggatttctagttgggatctaatcggtaatgaatttattgacttcttaaagggaattttctcgggtacaagcatcggtaatgatttcaacagcagctaccttattaaagataggatctctattgttgaccaagctgacctggttcattgtccttctcatgaggaaattcgtagtactctgtttgccatgagtaacaataaggttccgggaccagatgggatgtccgttcttttcttcaagcactattgggaaactgtgggtatggacttttgtgatgcagtgtctgacttttttcggacaggaagaatgcataagggtgtcaatgcgacgaatattgtgcttatcccaaacgttcaaaatttgaaaagaactgttaggttataattaacctatatttcgggtctttaaagttagcatt

SEQ ID NO: 143467 - DNA, 1027 bp, Cannabis sativa
ctctctctctctctctcttccctaaatcttaatttttttcttttaattattgcatttctaggtctaaagaagacaagaacaaaacaaagagtgaattggtgaagcttcgatcaggatcctcttaacaacccagcttccattcctaccgatgaagctccgccctacaccatctatccatctttgtttacttgcgccattggagctttgcttagaactagcgtcatcatctctgagggtcgactttgacaaggatcactacatcttccatcgttgaactggggaagcttcaatcgggaccctctgaaccattaggcttgggtttgttcatgggaaggcaaggcaacaattattcgatgaaacattaaagattcatgatgggtctcaatgaatcgacccctgtgagcttcgatttacatcttccatcgttgaactatggaagcttcaatagggaccctttgaaccattggacttgggttcattcatggggagacaaggcaacaataattcgatgaaatatgaaagatccatgatggatctcaatgaatcgatcctcgtgagcttcgatagaaacgtagacgaaggaatcaaatctaattgtaaaaataggagcttaggtttaaatttagaatgattttaagatttttgttttggtgaagacaactaatgttttgggttggtggatgaagatagagagaaaagagaattgtggtgggatggtggtggtggcagtgataataattgtgtggtggttgtgagttagattgttggtggaagaagaagataaagaagaaagtaaaaaaaaaataaataaagaaaaggaaaaaaagaaaaagaagattttatttgggaaatttacagtatataaatggtaagtatttgattgtatgatttattcttactcattattatagttattaaatgatgttatattaataattattttatatttttaaataattttaaaaatcaaccgcattattacaaatattaaaagtttgtatttagattaaatcattatttaattctt

SEQ ID NO: 143468 - DNA, 512 bp, Cannabis sativa
  modified_base (475)..(487): a, c, t, g, unknown or other
taataatcatatttttgcacatatcttataaaaactaaaaagtgatgaaatttgtaatttcctcaaagagaattttacgtaatattgcatctgtttatgtatatataaaaaataatcatacatatatatatacattgggataaattgaggaatacttttttttatctattaatccaaaatactctcaaattataattcattaaatgtacctacttttgtgattttttttttttttgataattcttatttttgtgagtgaattgctcaatatactctcaccctcgacttaagtctgacacataatttgcattaacctaaatggtataatgtagacatcatttataaaagcaggtatattttacaaaatatatgaataaaagtaaaaatcactatatagggataattacaccacgtactaaaatttttaattttttttactattctactgtgggacggattttttttcaaaaatacnnnnnnnnnnnnntactgtgtactgtgttaagttttca

SEQ ID NO: 143469 - DNA, 568 bp, Cannabis sativa
  modified_base (520)..(521): a, c, t, g, unknown or other
gttcttttgctgatattattaccagtattcgatactcgcttttgactataaagtcaatgaattttgaatattatacctttaaataataacgagttatttcatatatgcatttaatgatataatattattatattattcagaattgattcgtattctttttgttggacacgcgtcaacttctgaaatgtagccgaattttgagtataacaagtaggaaaaaattttccaacgcacttcagctcgtcgacaaaagtttttaccataaataaaactttgggtttcatttaatttcgttttaaaaacctttgtcggctagctgaaagccacacgaagccccctttttctctcattctctttcttattctttcctatttttcttctctcttctcttatccgcctttctccgcccccaaacccccatttcccccatttttcttcttccaaaaatatccgctcaccaacaccaccaccacctcaaatcccaccataactcttaaacacttaggtggcgtttggttgnnggtaatgaaatggaatagaatggaaagaaaacaatttttattccatt

SEQ ID NO: 143470 - DNA, 584 bp, Cannabis sativa
taagttttttatttttttttccagattttaagttttttttataaatgtccatatttttcaaaatggttttaagaaattccatatttataaaaaattccctaatgcaaatccaaatatccaattgaaactgttcttaattggaagttaactaaaaagttttttataacattattaaaattagagaaatgctaaaaggcaccagtggtgccgagcactttcttacgtgtcaatatcgctattgatataatttaatgtcaggtcacatatagtttaatataatagtttttagggagtatcgctagtcaatcacaagaagacacgtcttaaaggtgctaggcactactggtgcccaatagcaatgctcttaaaattaaacatgtcttaacttttagttctttttattatattaaacgcaactaggtcaagtttagtgaacaatttgatcagtgaaactcgtaagcatgactgagttttttatagtaaaagaggagaattgtctctgtaaattacaattctcttttttttttttttttgaaagaatattaattagaaaattagaccaaatagtcattacaaaataaatt

SEQ ID NO: 143471 - DNA, 550 bp, Cannabis sativa
tatcgagcattgtggtagttttgtatcattcccaaatggtggacttattgctccgaagctgattgagtttgtcattaattattgccttaaattgaagtggttgcctaaaaagatgacttccctctcagctttgaatgattttgaagtcatagattgtccgttgatggagccttttcctgaagatgaaggtggtctgcctgttagtttgtcaagactttgaatatcctatgatgtattattgaggatgaaatggaattggcaaacactatcccatcttaccattcttcatattcttggtaataaagaagatatggaaccatttccagaggaagggctgctgccaaccactattacctctcttagtattatgtcatttgcgaaacttagaagcctggacaaaaatggacttagacaactcacctccttgaaaaaacttgagatcttggattgccctgagttggagacattgtcagaagaagggttcccaacctccctcacctctttggagatagatgattgtcctctggtgaagaaaaaatatgacccggag

SEQ ID NO: 143472 - DNA, 509 bp, Cannabis sativa
agtccttaaatttaacaatctcagtagtttagggaaatttttaacagcgaaaaaagttcaaataacatgctttagtatatgtcaaaatttaggggaaaaatgactaattagcctaaattatataatacctaatagagaaaatatgtagagtctactatatagtttcatgggatcgtagtatagggaggtagaggttggtgtaagtgtggatgatatatataatgtataataattaaggtttgagaagagatagataggttgtcggccaataaggtgatgcgcatgggaagtacaaaagcaagcaaagcaaccttcatcaccaccacatgactctcttcttaacttgtatcgttgcctcatcactctgtctcccataatcctatctcgattgacgtttccttttcttttaaatcatacaataacttcaacgtgagacatcgagatcgctattatatattcaccattcatctctctacgtaatttactcaatttattatatatatatatat

SEQ ID NO: 143473 - DNA, 1060 bp, Cannabis sativa
  modified_base (40)..(41): a, c, t, g, unknown or other
  modified_base (157)..(157): a, c, t, g, unknown or other
ttttgtaaaagcatcatttttattcttaagtagatatatnnatacttttctagaataatcatccacaatagataataaaaaataagaacaaccaccatgtggactagttttctcaacaccctataggtcagaatgtacatactcaagtattcttttngagttgtgagtacctgttgtgaactttaatctgtgatattttctaagtatgtaatattcacaaaaatctagtttactcactttattcttacccaacagttgttgctcactcatgagttgtaagcctcgctcacttatatgccctaatcttctgtgccataaagtagctattttgtcttctttgtcgttgtgagttgtgatgttacaactagaaataggagagccttgtaggtagtatagtccaccatttttatgcctttcatgattgttagtgcttctctactaagcttcatatgatttgcctctaccttactcacaacacccaaatcatcaagcacacaaatagaaattaggtttctaaagagattaggcacaaaccttactaatgttagggttcttattatcccatcatacattttgaatctaattgatcctgaccctttaatctcacaggtttgatttttccctaggaccacttttcctcctttagattccttgtaatcaaacatataacttttgtcattagtcatatgaaaagtgcaactcgaatttaaaatcaaaccatctttaaaagatgatgcagcaacatatacttcaccactatcaacactttcataaccatcaccatagttggcttggttattcttaggctagagttagaattttctccatgtcctttatatttatttggtttgcctttgtttagaaaatagcaatctcacttaaaatgtcctggcttgccacaattgtagtatcctgtaggatcaggtggttcttttgattttgatcttccattgttatgactttttcctttgtggtaatctctgatgtgacttctactcttgaagtgtccatgttttctttgatttggtcttcctctactgaagtttacttctccattaga

SEQ ID NO: 143474 - DNA, 700 bp, Cannabis sativa
gtgaatgggatccagatcttgtcctgggatctgggaaccggggcttggacaatacccatagtcagtgtcttgatcggggactcaaagaaggaccccaagatcgagcaggacctggacccggacccaaacctaggacccaaaaccgaaacctgaaccaaaacgttatcaagaccttggaacatgatcgggatagtgaccaggatcttgacaaagacagggacccaaaactagatcataacccagccccgaaactcgtgctcgaactcagtctcggacccagactaagattgagacttgaacctgaactcgaactcaaactcaggactcgatcctggacctagaccaagcccctaacctcaactaggattaaaacaaggacattgacatgaacccatacccggaccggaatactgactcagaccaagacaaggatcaaaacacaagaactggaccaccagacacagatcctgacccgagagacgaacctcgaccgaaaccggaatctgaaaaacccgtcacccagactcaaacaaagactcagaccgcgaccacaacctggacctagacccggacccagaaccaaacccagacccggaatcaaaattggaattatgactagaacccatagctgagagcagaaccgaacccaaaccataacccaaattcagataagaacttggacagagaccttgactaggac

SEQ ID NO: 143475 - DNA, 564 bp, Cannabis sativa
  modified_base (512)..(528): a, c, t, g, unknown or other
aataaaaatatttttatgttcggcgaccctggagaccagattggaggccaaaaatgtcacaacagttttagttaaaaatattgatgggattattaggataagttgactttaaaaatattggagtattttagggtactcgaagttggccaaatactctagaaatagagatttcttagtggctaagaaataataagataactagtaataataaaatttttattaatattattattgatgttatattattactattaatattatattattattattattatatataaaaacgaaacagttttcccaaaccaggatatcctgcctatcccgaaacatctgtttgtttttaaaactatatatattaagttttaagtgataacagtagaggaacgaaggaacgaacgagccctcgttctccttccttcgacaaaactttctccttctatatccatttttcttgattttttaatccaaaacttagcgatctaagctccggtagtagcaggatagcaaannnnnnnnnnnnnnnnncttaaggtatgatttaatttcgttctaagtttaaaa

SEQ ID NO: 143476 - DNA, 623 bp, Cannabis sativa
attgatgttgaataaaatagattacattgaattggagttttatttagggcataaaatccaacagttatgtactcattgctggcagaataacagtcttcatgcacgaacattaagtctcgatttgaggcaaaactgtcaatcaacattaatgagccaaaattgaaaagacccttagtcagggtcacattggttcgtcaatcgacgcctaggacacgcgtcacctgtctcgataagactccagatcgagtgaagtccacgtccgaccagtaagatcccgcgcagatttggggagcaaatgttatccagttttttgcatattgacggggcaagaggactgagtgacacgtgttgacttggacgaaagtaaatgtccctaatagcctgcacataatgatcatcagcatttataaatatcgattacccgagtagagttgtaaagaagacgttcgaccaggtagaagtctgttatgccaaagcaacttacaaaagataactacttcaaaatgatcttatttttcccagagcccagacacgaagagaatccctataattgtgagattcagtcagagaaatatgacaacctgttctagtttcctttcgtatatcataattatgtaattatt

SEQ ID NO: 143477 - DNA, 961 bp, Cannabis sativa
taatattaaaaaaatttgagtttttatgcctaatttttttatttaattagaaaaatctctcatttttttttcattatatgggctgtggttgttccattgactgaaaagaaaataataaaaaaaaaatcgacaaaaaaatgataaaaaaatattgagttttacttaaatattttttatataaacttatttttgatatagtgtaaaaagatgtattttttgatattctctttaattaagtagttaatttaagcgtaaaaattcaagtttctcttttattattcacaatcagatcaagatgttaggaatttattatataaaagtaatataatttattattgttcaagtttctctttctttggactattcactatatattattggtcgtattgttcaagatgttaggaatttgtttttggctttatcttttgttgagttatgttttgttaaacgatctgcaaacaaattggctcattgcttggcaagacttttgtttctctataggttgtgtgcttcagttggagaattattcttctgaagtgtattctattattttgaacgagtttattaattaataaatctcctgatttattcaaaaaataatgatgccttttaattttttaataatttatactatataattaatgtattgaagataatattttagcatttttttttattaattttaatcatttaactttataaaaaaaaaacatcacaataaatttacattaattttatgatatattttaattttttataatttacaccatataattataaggaacacttctcaatgggtaatatccattgatgggtatttaaaaaaatgatgatgtggtaatatgttgacttcctatagtaagttaccaataagtatttttttaaaaatataaatatttttttatttaataataggaaataataattctaaccaatggtattaaagaattaaaaattattt

SEQ ID NO: 143478 - DNA, 587 bp, Cannabis sativa
ctgtgattttcctgcttttactaggtcaaaatgatcgtgtgttttaacacgtttttaattgttacgtttgaaaatgtcccaacaaggacttggttctaatgactgtaatagcgagctggagcctttttctttatccttccgaggtcaacgaagtattccttgtcgcttctttatgacgatcacggttcttattaacaaagagttttttgagcctcgtttaaatgttagcttttgaatcgttagaattgtaagcctcaatgagaagatgtctgaagttaactgggggagtttacaagaatgaaccttcccatagcgagatagacacctcgcttatcgggtctcgatcgaacccgactgttacacttagtttgtacgttatgtactaagtgttttcgcagtcgatatgtgtcgctttcgtctttccagatgtaacgtacgtgttgcgttgctatatgccttcaatgacatatggtttctcgttaatatactaagcaacaatttgtatatcttttccttgcataaaactttacaatcagcgggttgtgaatatactctgctacttacgtaattaatgagttattccacaa

SEQ ID NO: 143479 - DNA, 542 bp, Cannabis sativa
tcacgtaatacgcctatgttagtttgggtgttacatttttattatttttttatgactatatcaacgttaacttatgacctataggaattcgatgatgaacttatgctaaactctttgacattatttagtatgtgtgaaaatttttagattgtgtgcttaacctgttatgcttgcttttgatattgtgctatgagttatgtgttgttcttgttctatatattgtgattttatgtgcttatgtagacttggtttgatttggttgatattgagataactagaacttgtgtgattaatttatcgaggcgaaatcctaaatcttttttgtgtagagatgattaaggcaattttctttgaaccgtttgagccaaatagctaaccttaatacattatcctttgttgtcctattttgagcctaattttttccgattttcattatttgtcaaaaacaaaatgcatatttatccttgattacgagccatgaacttcaataaattattcttaccctattttgcaccataaacataggttgttgtgtattgaat

SEQ ID NO: 143480 - DNA, 611 bp, Cannabis sativa
ccaagaaacagaaaactgtctccaggtctagtacagaagccgaatacaggagcttagcaaatgccacagttgaaatcgtatggctacaatccttattagctgaagttggtctctctaagctcccaactcctacaatatggtgtgataaccaaagtacggtcttaatgtctgccaatcccgtactttattcacgaacaaaacacatagagctggaattgtattttgtgcgtgaacggattatcaatcgacaactctttgtcaaacatagggctgagtatcggtcggtttggtcggttttttttcatataaaaatccagatttttgttttcggtccggattagtgcaatccgaaaaccgaccgaccaatccaaaaacctatttaaaatcgacccattcaaaccgcggtttggtcagtttaaaccgcccaaaaccaaacttttttttttgtaaaataaaatctaatttattatataagtatattatgagtacaacaaaaatagtagcaatcagataatacataactcaaagattgaaatttgataatatttcaaattagcttcatttatattgaaaattacacaaacagtagatcacaatctggttgggtgttt

SEQ ID NO: 143481 - DNA, 1498 bp, Cannabis sativa
  modified_base (1193)..(1198): a, c, t, g, unknown or other
acccacttttgtcagtgggttgcctaatacactcttattctctacttaaatctaacacataatttacattaacctaagggtataatgggtacatcatcaataaaagtgggtatattttaaagaatataaaaatgaaagtaaaaattaaaacatataaaataaaatggtatacaatataatttccccaatttttagatccctactaattaatcactcgcagcaaaatttttgtttttccttaaacttagacttatatccattctcactttttttttttttacaagtttgttaaatttttaattatttttcaaaattacatttaactaatatgatttttgcctcacaatattattatcaatatatgatcgtgccctttaaatttttcgtgttctccccaaactatgtacattactgagttataaatgaatttatgttagttttcatccgaggtgataaaatacatatgtggttatttagatgatgaagaagaaacttaataccttggcacatatattattaagaaaatatattttgtgaaaaaaaaatggtttatttttaggagaatttgatctaaacatttaaaaaaaaaaataaaaagaaagaaacaaaagaagaaaaaaataagggaggaaatctaatttaaacattgcatacacaaagtaatttatagagaaatttagtaaatgatcccaaatcaaatgattatgttagtaaatattctcatttcaaaacttgtaccaaaatgaccctttcaaattatttattatttatattatcttttgtcacataaaaaaaattaataatttttttcatatttttttagaattagaaacaaattacttaacgattatggtatatctatattagatttataagaatcttttttttttatataaatataaaaaaaaaattatttgaaagttatgtcgattttttaattttttatgagttgttgtgggttgttgatatataaattttttgtacagtgtatttttgttttgttgtatcgtatattattattcttaaatgatatttattttttattttgctatgtataacagtgacatataattttgttagtataatataaatattttaatgtatatataattttattgatatgctacatatatttaattattatttatatatattttaattgtatgatctatatttattttaaataatatttnnnnnntttctattttattatatacaatggtggtatataattttaatatcatgatatataaatttaatttgtggtatataatttggttagtatagtatacatatatattagtaatatatatttttattattattgttagtatatatatgttggtgaatgatatctgtattttttcttatacaatatattattttttaaaaataatatatattaaagctctattttccattgtacttttattgacatgatatataattttattagcattctatatatttttatttttatttattaagatcggaagag

SEQ ID NO: 143482 - DNA, 548 bp, Cannabis sativa
aatttcatattaattttgttattattttatgttgaattttttgtttttcaatcttaaaaatttaggggttttattcctaattaaattctctttcttttgacatattacttgcataaaattattgagtaaattaggagaactttaaaattaaacttttagggtttaaatattttttttatgaaattaattttgtgtttttcaattcaattgattatgatatgaaattgatggtgcaaatctcattatcaattaatttacaatgtttctacataatttaatttttaattcggctgagataaaatcaaaatcgggctactttgtttttttagttttcggattgaacacaattcgatcgacacccttttcgtcatttatactcgaaattaataccatagattgataagaaatttcgtcccgaacaaaacccatcaaaaactgcgtcttttcatcgtgattttggccagtttttcatctcgacccgattggaaagaaccgggttcgcgagactcgtttttagacccgcccaaggtagaagatgaactccagcc

SEQ ID NO: 143483 - DNA, 952 bp, Cannabis sativa
  modified_base (416)..(419): a, c, t, g, unknown or other
atatattaatacacaaaattaatatataactcccataaaattataactctcataaaattataactctcaaataattttatgttaattaatattgcatatatgctaccatgctatcataaataacatacacaaaatattattaattttacaattaaatatatatatgttacatatcctatatatatataacatacaaatatatgaatatgcatatacacaatatgtatatcatatacacataatatatatcatatatgcatgtatatagaaatcactattttaacatatttattctcacaaatatatatatgtaattatatcttatgctcatcatataatgtacatataactcacatatatcacatattatataatatatatctccctcacatatatacatataataatatgttatnnnntcaattataatattatatatcactatatataataatataatctacatatatatcatatatattaacatgtaaaaaatctctaccaaaatatcatatctcatcatatgaatatgttaatatattattatcaaatatatccaccatgcttacccatggctggcttgaatctcttaccacatattttccttctcatgatcttgattgatgctctcccccatggataatttcctttgattgtatgatctctatggcaagtcttttagaaagaagaatatgccatcgaaatgacttttagattgatggaaaagttctcattacaagagagaatataagaattacaatcaaaataaaaatagacgtatttcattaagattacaagaaagctaaagaagaagaagaagaagaagaatacacacaaagcttgaccaagggtcaaggacctttgtcctaaaagtcatttcctctctcatatggacacttagggaaactctagaaatgctcttaaggatttatcaagcctcatatgctcagcc

SEQ ID NO: 143484 - DNA, 630 bp, Cannabis sativa
agcaaagtgccacggttgcccctccaaaattctccccttatcaccctcacacccaaacgaaacaaggaataagccatcgacatgttcagtaacagagacagggaacctacactatgatgaccaaataccagacaaagttttcatcaaagatggcctattataaggtctaatagtatgcagtttgagaaggagactaatggtagtgggagtagaagaagaggaactagcatcataggtgaaaatggtgttttcatcaggggaaaaaactaaaacacttgaaacactattgagaaactcatccatggtaatagacagaacaaaccagacaaacacagagaaaaataactcaacccagaaaaaaagcaaagaaagaggaagatgaaaaggaccatacctcaattttactatgtaaaggaaaaaccaaagcccccgtagatgctttctcgaataatctctggtcacatccctatcctccatttgaagaggcgcaatgatgaaatgggagtagatatcgtcagccaaagaagcctccgcccccattttccaatctccaagagtgaaatgatggaaatagatatgaacagacagtattaaatgcaaaagatcttcaaataaaacctcaggggagaa

SEQ ID NO: 143485 - DNA, 890 bp, Cannabis sativa
  modified_base (55)..(66): a, c, t, g, unknown or other
ctcagtaagaaaagcatataacacctaatatattaccgacttgtatttaggcgcnnnnnnnnnnnnccacaaggcttatcagataagtaagaatgttcttaacacttggtactattgaccatgatatcagccactaccaacactatgattgcactgcgggcctagtactatgttcgtaccgctatgatagcgtcaataataccataaagtacaattggccataatatcactcttaactaatactatgcccatactgtcgacctggtaccatgctcataccactatgatagcgccaattaacactttctagaattgaatatcagtcaaactcattattatgctcatactactgacccgaacatggttgtgccgctatgatattaactcaatacattcacaaatttgacacacaacatgcatatattatacatgcccataatcacatcacttatataacatgttttatgtcattcttacctcgtttctaaattcaagtgagttggccgacctgaatagaaaatctcgtgctagatggataccctaagtcacatttacttaaacgggtaaataacataccaaaaacctaatctgggaatccaaactcactactaagggttttgctatcagtaattcttataacaataccctaattattaaggaaataaccaactaaggctctaaaaataacacaaaccaacaaatcgaacatttcaggaaacctgcccctgatccggttaactggttttacaggaactgtaaaactggttaaccgatttacactaggtaaccaaaacaagttcaaaactttcccaattcatgtctaaactataccaaacccttcagaacacctgtatttgttgcgttttgtgccctaaataaaaccctttaca

SEQ ID NO: 143486 - DNA, 874 bp, Cannabis sativa
cttcacccaattccaaccgaacagctctgaattccaccctggcttctttagcatccttcctggccaagtctgccttcgccttcagggtgtcgaaaagagccgagttcttggaagtagcagacttagccttggagtaagtgtaagccaacttcagacatgcctgcacaaggaaaaaactttagcatctgagatatgtatggaagattaaagggaagtattaaaaaaaaaagacttaccctggtgaactccttcaagactccgccaaccagcaattccgaagaagaatcattgtcagtactagccagttgctcgctgacctcaggaaccagccggttcatataatgggctagcatatcccaacccttcttggcctctagaagcaccgacaaaggtggaataggtgcccgcacctgttcaggatcactgctgaccagttcagacccaacctttggtggtccagactccttggacttagcagctttgggggtagaggggtttgcagtagtcagctccttggaaagatcaatggcctctccagcaggcctcttttccttagtagaggacccctcaccgcccttagatttcttggccggaggggaggcgctagagcttctgtccattctcttcttcaagagcctcaaaccatcctgctgaaggacatgtctgtacagaataaaaaagaacatggttagaaaacagacatcagaaacataaggtatgaaagttaagaagctcaaaaaaagacaaagtagtatgcaaggtgatggcccaaacaagattggaaagttcatcatcacctgacatcgatcttatttcagacataacagctttccctttaccgaacacgggaggggatggccgaacaggtgaaatg

SEQ ID NO: 143487 - DNA, 682 bp, Cannabis sativa
aatagcgatactgacacataagaatgtgctaagcaccattggtgccctttagcatttctcaaacaaaaaaatataagggcttgtttgtcgagataaaaaattcaagtaccaaaatgtaataacttgaatacaccagcgaccattttggtgaccagtgccaaatacctaattcttgaatgctttacaccgtagaatatatcatattattattggtgtaatttaatagtgaataaccttatattttatattttattttatgggactccaaactaaactaccttattgtgtttattgcttcatgaatttgcaggacttatggggaaacaccttgcttatcttggaacaagaaaagtatttccagttgacaaaagaaatagttatattattattccccaaaaaatctaacttaaaaaagaccagttttattttgatctgacagattcttgtgaattttccaacatattcatagaaaaagaaaaagaaaaaaattagtgtattgaaattcaaatttcactgtactttaaaaccattaatagtgtttttatgttactttcactattcttgtgtttggtgtttgtgtctctaaactagggctgtacatcggtcggtttagtcggtttatactatatattttccaacccaacataaagatcgggttataaaattctgcatgcaaactgcc

SEQ ID NO: 143488 - DNA, 602 bp, Cannabis sativa
ccaaatttaggattttttttatgtgaaaaactgactaatccgaccgttgctcacccctattctggcccatcaacttttgttccaccatatataaagtggtctctaaaactatggctaacagacttaaaaatattctgaatgacctcatctcttataaccaaggagctttccttcataattgttgtgaataaaattaggtatacgcaagtgcacgtagtcacaaacaagtaatagaatgataagtaaaagagtatcgtctctacagggattgattagaaattaatcatgcaaaaatcaatattaaataatttaggtaaaacaaacaagaagtgatgatgatttgaactaggctaaaaactaaataagaaagtaaataaagtgaagaaggaaaatgagcaaaatgatgagcaagaacaatcaaatctacttagaatgcaaattcaatgtaaatgtcatagaggaatgcattattaattaaattttgtcaaccggatatataaatgaacatatgatttttccaaacctatatgttatgggctctcaagattaaattaacatattcctatgcaaatctagacctaaagaacacaaattaagcacca

SEQ ID NO: 143489 - DNA, 818 bp, Cannabis sativa
aactaactttcaaataacagtggaggtaaaaactggtttagttttgagtggattatttaccacagtaataataaagatttagatataataacttatgtatgttatacttgaaaaacttacatataaccataaatcaatatctatcatcacaaatcaaaatatatatatatatttgttttgagggtcacaaaccaatatatagaatactgttatactcaaaattcggttggagaacacgtgttaagataaagggaatgtgaatcgatgcaatagctttttatggaataactcattgattacgtaagtatcagagtatatttgtaacccactgactgtaaggtcttaggcgaggaatcaatgtacaaactagcacttagtatattaacgagaaattatatgtcactaaagataaatagcgaaacattaaggacagaacacattggaagatggaagcggcacttatcaatcgtgaaagtccttagcatacaatgaagaaacttagtgtaaaagtcaaatcgactcaagaacaagtaagcgaggtgaccgtctcattatgggaatattgcatataacttcaacccgttcgtgtcagacctcgcggaatgctttaagatattaaagaagtataacataaaactaaacccgaaaaaaatgttcctttagagtttcctcaggaaactttttgggattcatagctaacgcgagaggtattaaggcaaatcctgaaaagattaaggcattaatagacatgtcgtcaccgacaaagcctaaggaagtacaagccttgacaggaagaatggctgcacttaacagattca

SEQ ID NO: 143490 - DNA, 746 bp, Cannabis sativa
  modified_base (248)..(276): a, c, t, g, unknown or other
caactgtgtagtcccatacttacagaatctcagaatcatcacacttgaccttccccaagggatgtgggattgcacatcttacccggtatttccccttacagattaatagattactgactgtcacaatcaccccccttacggggtccaacgtcctcgtcgaccacactttcagatgggtcaaggcttttataccatttgtaacgtccccacttcaagcctccattaggcccttacacccacggaataannnnnnnnnnnnnnnnnnnnnnnnnnnnngctgcttcatggactgacgactgaccctacagacctacatgagtgttttcagcgagctttgtcctcactcgcatgcttcctgagaaaacttgcaaggaggtcacccatcctaaaattgaccaaggccaagcacacttaactgtggagttctttcgcgatgggctaccaaaaaaacaagatgcaccttggtgatataggtagtaccaatcaattcatttaagccctcttcaactgtgtaatcccatacctacacagcctcaaaatcatcacacttgaccttccccagacgatgtgggattgcacaacttacccggtatttgcccttacggatcacaagattaatgactgtcacacatgtggaactgacaaagaataactgtaaaaatttatctttgttagcaagtagtttagacacatttggtctaacatgtaacaaaagcttacagcttagtgtctgcttttgaaatcac

SEQ ID NO: 143491 - DNA, 1077 bp, Cannabis sativa
tattcacataataatatatattactacattttaatctacacttattatattataaaataatataacaaaaaatgagttagtgaagctctccttttatagggaataaggtcctactaaaataataataaaatatacaacaagtatggaaaaatatttttgagctgatcttgaccattgatgatgatacaatgctgaaaataaccatgaagacaaccatcaagaaggagaagaggaggaagaagaagaagaagaagatgaagattatggtttttgttttttaatttgaaattagttatttattaaattttaatttgatttttttaggaataattatatattttattaatttaaatatattgtgaaccaataaatttatggcaactttaagaataataaatggagctataaacagaaaaattaacgggcttacgaaaaatgagatcatagagactataactatcattttttaagattgaaaacttatctacatcagactaaaaattttaagaacttatgctatatttttttctaaaagtaatgataaataacttttttggtttgcagtagcatgaatagttaaaacatacaacctcatgttagaaaatagctaaccatatattcaggggctaatacaataggtattgtacattttacttattgataagtataatgatttatagccattaatttaattaaatggcttaaattaactcttggaaactacattatagttaatatttttttatttataattaattttaaatattaataattagatccaactaacaatactccaaagttaactccaaacctataatttttcttacttatttaccttataactttttataattttaattaattattttttaattttgaatttatatattaatttaattttttactcaacaataattatagctaaaagagtacaaaatattcaagttatgtaatcctaaaatattcaatacaatcaataatataatcatagtgtaagtggtaaaattctcttacatcaactataatgtcataagttcaatcatttgtaaagacatgtttttttattatttttaattt

SEQ ID NO: 143492 - DNA, 921 bp, Cannabis sativa
  modified_base (797)..(801): a, c, t, g, unknown or other
tctactgtctgaaatagaattcatagtaaattaaaacctttttatagtaatttcaatatagaacttattgaataacattgtcccacatagattaaatgtaaaaatattgagccatatataagaacatgtactactccagtcattatcaattggttttgagatagaactgatctattataattgctgggaggttagaaccaataggttggaaggcttataggtgttggttattgttttcagtttttaaaattgcgatttaaaaacatgagaacaaaaatttatagctttcaaaatacatgtttgactaatggtttcttaaaacggttttttggattttttttttactgaaaaaaaaaagaaaatttcaatattccacacctcgatacgaaccaaccctacctggatcccaacaaggactcctgaagttagcctcggtcccgttacctgaacccaaaccttgatgcaaccttgacccaaacctagagcctggacccgcacccgaacccaactatggaacttggacccgaccacagccggactcaaactccgaaaccagattcagacttggagtctgacccggactcagacccagactcaaacctggcccggaccccatgtttatatgtgagagaatatatatatataaaaaataaaaattattttaaaatggaaaataatattttgatatttttttatggctaattaagttttttacccctgaactttgacatgtaccaaattatgctacctgaacttttaaggtcgttaaaaatgtctcatgaactattgagattgtnnnnnttaaggacttttgtccaattttagaaaaaaaaagtctaaataaaagtccagggagcatgatttagtacatgtcaaagtttaagggacatgattttgtagatatcaaagtctgaggaatat

SEQ ID NO: 143493 - DNA, 681 bp, Cannabis sativa
aagcttccccaatcgaaaagacgcgtcaagagcaatcgggaacaaagtcacatcttgctggcgacggaaccgacgtgaacgctggcgggcacgatctggacatatttgagatctttttcccatatttttttttgtagatttagattttacatattattctagggtgtgtggtgaagtttcataattttcttgcaattattttatttattatgaattatttggtttatttattaaattaattaggaaaaatacttaggttactcagaaaaatctaagtttattttctatgattggttatggattatagactgttacaaaattggtagatttgcatttgagtcaattttttatttttcatgaattatttgtgttatttctaaacttaattatgaaaaatacttatgtagttcagaaaattcaaaggaaattatttgtagcttattacagattactaaccgtgttagaatggttatatttttcatgaatttatttagttaatatttaaaataattatgaaaaacagttaagtgatgctaaaatagtaaaatatatttttgtaattctatttactatgtatggtatgaaataaaaaggtttttataatttattggttgctgtaggtatttattataattatttgtgactaattaactatttaattggattttaaatagaataaat

SEQ ID NO: 143494 - DNA, 969 bp, Cannabis sativa
  modified_base (483)..(483): a, c, t, g, unknown or other
aatcttgaccaacgacctggggctcggaaccaacccgtagtcggtgtctggatcttggaatcataccaagacccgaacttggaaccatttccagaccaggacctaaaccctgactcatacctgagacccgaaatcggaacaagaaccagatcaggatcttggaataggaattggtcttggacccaaaactggatctagacgcagaaccgaacacagacccagacacagaccgagatcgatacccggacccagacttacgccaagacttgtgacttaggacccgttactcgagacctagaccagaacctagacccgtacaagaactcagacccagaccaaaacctagaccaagacacaaactgaaacccaaactaagacccaaacctagacctagacccggacccaaacctggactagtactataactcgtactcgaacccaggattgggacccggactgagatcaggactgggacccaaaccnggactaggaccgagacctgaacctcgattaggactagaactcagactaggaccgggactgagacttgggaccaggactgggacctgggaccaggactgggacctaggaccaggactgggacctaggacccgatactcagacctgggacctgagaaccgaaccgtgaactagactcaaactaggccaagacccgagacaaggaccattactgaacacagaccaggacctacacgcgaccctaaccaagatcaggaactaccactttgacttgaatcggggaccaagacccatgacttggacctaagatccgaaccaggacctaagacatgagctagaacagcaccatgatctagattttgacccgagacaggacccaagacctgaggctcggaccagacccatagtcggtgtctaaattagggaattcgacctggacctggacctagacccggaccaaaaccagaacccataccagaactcgaacta

SEQ ID NO: 143495 - DNA, 1550 bp, Cannabis sativa
tatttcgacacgtggcatttgaattgggtttaacggatctgttaacttggagaccaacggacaaataaaaaacatgaccttgaggactattgccgcaatttttggaagtcggggacttatctgtatcaaactgaactttttggagacttttgccacaaatttcccttttatttaatactatgattgtacatatatgtatatatatatagttttttttttcatatctatatatatagcaagagaaggactttagtgtaatgtgcatcatgtgaatcaaaactctcaccgccccgattcacatcccatcatcatctctaatgtgaacttatttcaccacattttgtaaagttgtatcctcacttctctaaccccattaatgtttaattagtcattgataacttaagcaattaggtttgggttgtgaaggataatattttgtgtgtatgtgtggatatattaactttgatgggtgttaagaaaaactaggcttttggctcaatttggggtgactattgacatttaaatattctcaggttggcttgaaaggctcaatcgtccacaaatggcctagatcatttccaagttataaagttatctaggatttcgcctcaaggattacactaaccaattctagatgcttaaactctctcaaggtgttagctattctaaaaactcaaagtatggtgggataacacaggcacacaactgttgaaagcattcctcataggctagcatttagacaagaacaacacttaatattggcattttcaacacacaaaaccaaggcactccacaagtagagaaaaatggacatttttcatcatcgagccctaccctaaaccaagctgaaaatacatgcactatttttctcaatcgcaagccaaaacagaacataactaacctgacaaaataacatgattaatacacatctactctacataatgtttattagtcacacaactaaagacaacaataaaagtaaactaattaaacaatcaaatacaaccagcaatttaaggaaaaagaaaactccctcaagattcagactcttccccactagagtccctgcttcaaaatgctgaagcgatactgatgcaatgttgtaacaactgggacttactgctttagcacacaaatctgcttcacaccatattgcagcagcctatttttctctcattccatgccttgcacctgcaataaaaatcatcgcaccattgcaaattcattagtaactaagaaaattgaaattatataagtgtatatatgtatctatatttttttgtttttctttttttttttcctttttttttctatttttttaacaaggggtggcacaccccaaacttaattgtaaatacatatatattttttttttatttttttttcaaggggtggcacaccccaaacttattacataacatatatataattagatatagtcttgttcctcccctcccgggttgcccaaatgtgatacaataaggccaaggcaacccgaagtccttcttcaagcttctttcaaagtgatggaggtctttgctcggttgacc

SEQ ID NO: 143496 - DNA, 758 bp, Cannabis sativa
  modified_base (259)..(259): a, c, t, g, unknown or other
  modified_base (376)..(381): a, c, t, g, unknown or other
  modified_base (516)..(523): a, c, t, g, unknown or other
gttgatccaaaattaacaaattttcaacttaaaaatattttaaagaatatctgaataactaattttcaagaagattctacttaattattaatttcaaagtattataatttaagttgatcaaaaattagttaaaaaaactaattttcaacttaaatatattttctatgaaaattaaaataattaagtttccagaagaatctaattagttatagcttcttttatttaattaaatacagaaaaatacatctagtttatcttnaatttgaatttcattaaactaagtatgtttttcttaaattaatttcaaaataatttgatgaaaacttaatttcatatatttcaaaattaataatgtttctaatcaattttattaggnnnnnntagtttaattaacctagtacagttattcaaatcaggcaaatgagccttactaattggggttgttcatgtgaaggagggttgggttcagtatgtcgtacccactactaatcgccccctaactctcacacaaggccnnnnnnnnaggaatttaaccttaatttaaacaactgttattaattaaataggcccaatactaattgggcctaaataaaatctatcaagtgtgataattttatttggcaacctcgtccattttaattacaaaaattaaatgggcttcccatttgcatctaagcccaaagcaaacatataggctcacacagacacactgatttggatggatcctatcatgttactaggtttatacacaaatgaaa

SEQ ID NO: 143497 - DNA, 840 bp, Cannabis sativa
agtttggcatgatttggataagttttggtagtgtttcagtgagtgcaaaatttggaatttttgagtttcaccatttttagaaattcataagagatcagaaatcatatttttgtcataaacttttacttgggtgtttgtcttggacgttctatataccattttgaagcttgtgacaggctatataatatggtatatgttttagagccaaaatataagttttattttagtatatttatatcgcagagtttggtagaaaaccttagattgtcttatgtgaaaattaagtagtgttttaggataaacacttattggtttaccgttgttgtgacataggaccgagatcatctgggatagttctccacttgagttggttgacatgtatgaacctggattaaaggtaagaaaagtatattgtattgtatagtacgttttattgtcatacaattattattattatgaattgattaatattaagatcaaaatatgattaatattgttatataataaaatattgattggttaagcaatgataatgtgataatactatggacataatatattggctcacctcattaggtgatgcgatatacctggcgacgtaccgggcgtaggtacgggcatcagtgacatatgatgagtaccaatcgtaggtacgggctcacctgattaggtgatgtgattttcttagcaacgtatcaagcgtaggtacgggcgtcagtgatatgaaaaaaccttgttatggcatagatcgaaactattattgggtttcttcctggcaacatatcgagtgtaagtacgggcatcagtgacatttgatatgtaccaggcgtaggtacgggc

SEQ ID NO: 143498 - DNA, 1370 bp, Cannabis sativa
agatttcattgtgagagcttcaagagaggaaacactgtattctttgttcttgacttaatacaaatcaaggggagtaggctattaccgaactaacggggacgaacctctttaaaatcatgtgtatagttcatacttcattttaattatattttctatcgcttactatttgacacactgttgttggctagaagcgaggtcaatattttggtgctttcattgagagtaataatccaagtttgctctttgctttaagttggatcagaaacattatggtggtacaaactcgcaaaggtgtggtcgatcaggtggatccattcgcggcagatcctgcactgcagaccccagggaatgcaagggtcccaccagccacccatcttgaacaaccaaacacgcaaccacctaccgcgggtcaaggtgtgacatctcctttggctagaatcacacttggtgtgcaagagactggaaacaccagttcaacagctgaactatgtactcccagcactgggatcccttcagcaacaaatgttcaaacaaccattggagatgacactgagatccagaacctccgtaatgctcttgggctcatgcaaggtcatactaatacctagcatcatgatcaagaagagctccgtgctgcaataaaccttgcgtttgaagagcaaaggtgccagttcactgaatggagggatgcagccatcgacaactgaacaagacaggccaccgtactgatacgaagagcctacttccagcgtctcgctgggcagctcggaagagattctaactgggcatactgcccaaactctaaacggtcagctgtccaatccccggtcacaggttccacctgtgggccaagtggtaggcggccagaccttatctggaaattcatcaggtggggttatacccaatagctccaccttgactagcgattctagccaagtgcttggccaaaccaagcagtcattgagacaacctggtgtttcagtatttaacagactgggaacagctcatgatctcagggctgatctgaatagaaggagaggtttagacgaaaaatatgttcaaccagccactcagcccggagtccgcattcatgatccagctcaaagagatcctgacgtggcactgatcggccaagaggtcaaacaggtgcatccatccgtgcaagcgcagttggatgaactaaaaaatatgttctaaggcctggtcggtcaaaagctcaatgatctcgagttggaccgagcatgcagatccccgtttactcctaaaatcaatattctagaactacccctcaagttcaagatgccgacctggaagatgtgtacagggaaagaggatcccttatcacatctcaagtattttgaaatgcaaat

SEQ ID NO: 143499 - DNA, 850 bp, Cannabis sativa
  modified_base (217)..(220): a, c, t, g, unknown or other
ttcacaaagttattaccaacatcaatatttgagaagacggcagacaagatccaaattcatcgatcagaagatttctccacgaatgcctaaatgagggagagttagtttacactatactctttttcttttgatcaagttttctagcaagatttttaatgaggcagttattatggacatccaatggagggtgttataaatattaataattatgtggatnnnnaaatcttttatttattactattaattgtaatcaacattcatttttttcttagtttcttaatatttgactcttgtatttatataaataggggttcaccccattggaataagcaactgagaaattctcattcactttctctttctatctttatcttcttcttctttcttctcatctattctatattattttataacaaatttgattaattattttggaatgattatttttaatactgaattatttaatatttattaacagatttttttttaccaaactaacaataaaataaaacaaatgaaataaaaaaataataaattcaaaataagaaaaaaaaaattatacaaataaagaaatatttaattttgtttaaattatattttccttgcaaacaagtatgtgaaatatatttgtatcttatgtattaaatttttaacttactatttttgtattaaaatattaaatatgttttgaatttaattagatcgtttacttttacatatcaattaacattgattcaatccgcacaagtgcagattttagatttttctatccaattcaatcctcacaagtaggggtgtgcataaatcgatccaatccaataagaatcgaccaatccaattacaaccgacc

SEQ ID NO: 143500 - DNA, 670 bp, Cannabis sativa
aggtcccactgaaccggttcagtgcagaaacccctaataaaaacacaaaaattcgacccccaatgattcccaaccttcaagaccacctacttacaccacaataggtagaatctatgcaataaaatcaaacaaaaccctcataagcaaaatttaccattggagaaccattcatacgtacatattttatttagatgaactgatattttagaaatttagctaattacttaagttatcttcactagttatattcattcacgtaaatcaacatttgattacttctttaagattactagtgagttgtattgtgaagaaccatgttatttcaattttaaaactcagattcatttattgttttaaggatacatctcttatggtgtattataggatttcatatgtactaggcctagagatgagaattatattgaattagtgatggcaatattcttaattaaaggtatgccgcataagtgaagataggattcagtgtttccttatacaattttttgtttcatcatatttatatatgtatggagttatctcatattcatgtcctcttaatatttggtcacacccatggagtatggacccgtaataactaataataatgaggacagagaatagataagatatgataagatgatttttctatcattaatattaatatcttgtt

SEQ ID NO: 143501 - DNA, 628 bp, Cannabis sativa
atgaaacctatagctgttactattggtatcgtaaaatcttcaagctccattgtcttcttcttcttcttcttatgtgtgttcaaagattatagtggaaatatatatttgaacaagagtttaataagatatgaagtaaagatatggttcagcaaaacaactgtaattaagacttactaaaattgttgaaaacagatttattacacttcaaacaaatttttcttttacatttctatccaaatatagcaacctaaatctatataataactatagcaatacatataaaagctaccataacaactcaaattataaaaataaaaaaatacatacaaaaataatagggtttttttcaatattatacctaaaaataattttatttataaaaatacctttaaaaaaattatttgcacaaataccgttgtgccacgtcagcttacataccaaaatttaaaacaattaccgaaaatagaaaaaactggaaaaatctcgtttccaaaattttttcgctttttgggagttttgaaaaaagaaatcatttagttgcttttgatttgaataagatattaattggttacttttctattaaaaaatttatttcagaattgtaacatatataaataataaaataatc

SEQ ID NO: 143502 - DNA, 524 bp, Cannabis sativa
acacctgagtagtggcatggagaatcctcttctatacataactccctctacaattatgtatcgtgcagcctttctcctcattttccaagcattgtttctgttatctgggagctccctagtattgaggtaggctgctattagcgtcatccaatttggggatgtatcaatcatttcaacctcttctgtaccggtaatactaggtttttcaagaaactggataggaatcagatttgctttatcctttatgttgctactcgcaagtcgagctaatgcatcagtagttttgttttcttcccttggaattttcttgagtgcatagcttttgaattgtgcgagcagatcatgtatttttcttagatatgctatcttcttctcccccgagcctcgtactctctggatacatgacttaccaccaactgtgagtaactgcagatctcaatgtgttcggctttcatttcccgagcaagtcttaggccggcgataagagcttcatattcagtttcattattggatgccttaaattt

SEQ ID NO: 143503 - DNA, 687 bp, Cannabis sativa
tttaattaagctttagctgggattttggaggtgtttttgaggttgttgttgctgaaattatttgaattgagtgagataaagctcaagctcttgagcttgaagattgcttagttaaaacttggtttttgtgatatttatgcaatctgaaattctgagttactactggaaattggtgtttgaaacattagttttaaatccttgttgattgctagcgtcaatatttggtaatttgagtgtttggttgagttttgggatgaaaagattggatttttgtttggtggaacctgggttttgtcccaggtgtcgcggcatggtttggcgcatgccgcggccctccctcgtgtttttgggcagtttcgatttgaaatttcaaaaatgcataacttttgattccgaactccgatttgggagttctttatatcattggaaagctcgttccgtgctctagatgattatctaaatttttaaatgccatgattgaattttatgagtatgaaatcaggggttaaccctaagtgtgaaatatcccaaatttgtgtgactaggattactggcacctgatcaggagcacttggggattcggaatatctatctattgctggacaataagtaagacagtgattagcacgtagagtatgcgtagtggcgcttatattgagaatgatatgcatgaatgtttagtaaccg

SEQ ID NO: 143504 - DNA, 617 bp, Cannabis sativa
  modified_base (544)..(544): a, c, t, g, unknown or other
taatatttacgtggctcgcaacgtaactctcatctagtatatatatatatatatatctttgaagtggataactctaaaacctattcaatatatacgtgaccgcgcctcgtgcagtcattataatataatttaaataatattttgaaatatttctttgtaaataatactttttatgaaggttctatcttccatctcatcatcatcgtttagtatgatcaatctttctcttgtagtgtctcgagagacatcaacatataattgactacgggtaaatacttgcttagggatatataatccaacatgtttaagaaattgtccttgacttttatttattgtcatagcaaaacatggtgctaaaggaagttgtcgtctattaagcttgaatggccatttcgattcgttgggagacatgataattcttgggattgtgacgttttcactgatatttgtccaaaagtaatgttagctctaatggaccatttcccaagatgtgtaacaatcaatttagtgcaattgcataagccttctgtttgatttagatttntaaggagcattactggaacaccttccttaagtcgaatgtcgtgatttggtatgccattaaatttcaaactatg

SEQ ID NO: 143505 - DNA, 500 bp, Cannabis sativa
tcaatttaaaatataaaataaataataataaagttaaaaatatggttaaaaatatttataattttttaaatttaaatttctttatatataattgttataactgaaatttggttaccatctcagtaggggacacgtgtcaagataaaaggaatatggatcgatgcaaccgctttttatggaataactcattaattacgtaagtatcagagtatatttacaacctattgactgtaaagtctaatccgaggaaaaaaagtacaaactgttgcttggtatattaacgagaaaccatatgtcgttaaatgtgaatatcgaggcatcaagtacgttacatctaggaagacgaaagcgacacatatcgactgcggaagtacttagattataatatacaaactaagtataacagtcgggttggctcgagacctaataagcgaggtgccagtctcgctatgggaagacttcctgtaacttcacctagttaactttagatattttctcag

SEQ ID NO: 143506 - DNA, 1003 bp, Cannabis sativa
  modified_base (148)..(150): a, c, t, g, unknown or other
gtgtgtaccgaatcatgagagagacaacatataatcatgattgtattccattgtgttgatcacactacaatcaatcataaataactatatactctgtctggtggacttaaaagaatttatacattaaacatataatcatgaaataaannntgtgaaccatgcaatataaaataatttatgatctcttattaattagtaaacttgatcatattgaaattagttttatttaggatacaaaatctaacagttataaccttgccatgtccaaggctaagaaagagaagatgcctgccaaaagttctaaagaagggcccagcatagggcaatgaagtccagcccaaagtagggacacagacatagatccttaccttggggatcttgcaagaagcttcggacctgtagaagagttggaagaagtggaggatgatcccacttctcccaataagaaggctgaagatcgggaaaggtttagcaccaaaaataaaatcattactgataaaatttctaagggcaaacttggacctctttgcatgacccatgcactcaacatcgatccaaacatctgacttattcaataaaagaggaggttgttggacaaatagcgtgttcaagcgctcaaagatggggtcgaaaggctacgagcccatgacttcatcagagagacattctatccactttaggtatccaacccagtattggtacccaagcccaacaaaaattagagtctccgttgacttcaccaaactgagcaaagcatgtccaaaagactggtttttgctttctagaattgaccagcttgtagacgcaacatctggccatgaaatcttgagtttcatggacacgtattaaggttacaaccaaataaagatgcacccaccagattaggagcacacaagcttcatgatagacttatgcctttcaggctaaaaactacaaaggccacgtatcagaggcttgtgaacatgatgttcaaagatcttatcggccgcaacatggaggtgta

SEQ ID NO: 143507 - DNA, 1254 bp, Cannabis sativa
atcttacaaaagtaagttgcttgccacttcaacatgggaaaaaattctctcttagaggaatatacctaaagatatagctcacaagctacccgcatactcatatacggtccctccattctacatgtcactttgatgaagaagttgaagtaatgcctcggtcattctgactcttctagctcccacgatgtactaagttccaatgattcaaccctctggccatcatgcaaactctagcacacttctcaaccttcgcaggctcatgtgactactacgtctcactggcacaggcctctggcttccactcaaactctagcaccatctcaacgcttgcgctcgggtctccttagccctgctggcttcgttgatgcattcattccacaactcaacatctctatcgatgcctttgtgtgacttacacccactggtgctttaacaagccaacacattccactcaactgccttggcgcttccatatggatcaaataaaagtcacatgcgaatacctccaagtacaaccatatcctttgacgattgcggcctttacccccttggtctccatgtgcatccctcttgacacacacacgtagcaactgaagcattccatgtctatcccaatctgaaccatctcgctcatcaactctcgacctctatcgtgaataacaagaatatgacggtccctgcactacttccacactcttgccaacaagcttccttttcaataaaagcccctccagcaacttacgatgtcactcaggcaaacttggcctagtgtaccaagcatacagtatggactatccaatcaaccttgtactatgccagcgagtttcaaacattttgttatgcctctctacaattgtacatggtagttgtctttctagcatctctaaacttaactcgaatcaaccatcatcatctcttctctaggatgtccagtattcccatgaagaaaagccacccagtctcaactccatctcagtctactgatcctctttaaaagactaactggctcaacgacgtcttattccaacattcggaccatctcaagtcgtcctcccgcccacatcctctctaggataggccaactaggttcacctcccactgagatgaacttggctctgataccaattgtcacgaaccttttcaggcagcggaatactcgtgcggcaccttgtcttctctaagccaaggtcagccgtccacccatccaagtaacaatgggctcatatttcacgcgaccgtgtgcctcgtgcacac

SEQ ID NO: 143508 - DNA, 736 bp, Cannabis sativa
  modified_base (223)..(223): a, c, t, g, unknown or other
  modified_base (286)..(300): a, c, t, g, unknown or other
ataacacttatccaaggtataagtataccttatcgttgattatcatgccagtccaaattcagtgaactgataaatcacaagaattaaattcttaaacatataatcatgattatattccactgtgctgatgacactataatcatgaacaaatatatatacatatatttacatatattctggacttaatagaatttatatgttaaacataatcatgaaataaatnatgtgaaccatgcaacataaaagtaatttctgatcttatattaattagtaaatttgattatannnnnnnnnnnnnnntttagggcacaaaacctaacagtttcatgacttaattaggaaccatatggaagtctacattgatgacatgttggtcaagttaatgaaatctagagaccacattaaggatttagaggagtgcttcaacatccttcaggaataccgaatggagcttaatcctttaaaatatgccttcagagtccaattaggaaattgttttggattcattgtcaactcaagagggattgaagtgaatccagaaaaaataaggccttgcaagacatgactgtcacgaatcaaagacgtgcaaagcctaactagacgaattgctgtacttagcaggttcatctcgaagtcaatcgacaagtgtgttcccttcttttatttacttaaagaaagcaacaagatgtttgaatggactgatgaatgcaaacaagccttccaagctctcaaacat

SEQ ID NO: 143509 - DNA, 585 bp, Cannabis sativa
atccacataattattaatatttataacactttgcatttaataaaaaaaaatttgatattgtaaagtataatttttctagttgttttgaacttattaaatatcttttattatattatttattatacatatatattattagttttcaaaatatacacataaattaaattaaaattaaaaatatacagctataataattgatataaatttatagaaaatattttttaaaattattgtcatcatggtaatcagtgtagttcatagtcttcactttctttcttaataggcttgctctttcacgtaaaaaaaaaataaacttgttctttcacatcaaaaaaaaaaaaataggcttgctctttatataaaaaagctaatgaacgaaaaatcctcacacaaaattgagatctaaaaaaatacaaataattttaaaacagttgtcttcactgtatttcacttatagtatagtcattttttaaatatactaaaaaaaataaacaaagataaaaagtcaaaacatgatggtagattttagagttatccatttttaaaatatattatttttaaatatcttaatttttttttttttaa

SEQ ID NO: 143510 - DNA, 714 bp, Cannabis sativa
gggtttgtgtccaggtctgcacccaaatttgtctgggtcttggtccgagtccagcttcatatccgaatccctatctaggtccaagtctgtgttttggatcaggtccctgatttaggtccaagtgtggtctcagcttcggtctgggtacacggccgtctccgagctcgagttccagtctcagtttaggtctgagacaaggtttgtgttcggttctaggtcttcgtccaggtcctggtcacggtcctcttctttttctagggtcctggtttggcgattcttgtttaggttcttattttgtgtcccaggtctaggtctgggttcgggtttggttttttgtttgggttcttgtccgagcctaactcccagatcgagacaccgactactgaactgttccaggccccgttacccaaatcttgagtcaagatctgggccactgtcacgggcttcggtatggttcttgttaaggtcccaagtcccatttctgagtttgggtacgggatcgagactgggacgcagttctaggtcccgacactagttttgtgtccctagtctggtgccatgtttcggtctgagttcaagttcgagtttgggtcccgagttcaggtttgggttaggatcttgctccggctcccaattcagctctaggtctgattgggagtcagggtcctggtccggttacggttcatgatctaggttaaatttcaattatgattc

SEQ ID NO: 143511 - DNA, 942 bp, Cannabis sativa
tggactaggagtgtttgaaagaacactgataccacataaaaatctcttgtgtcaagtgattttattttctgtaattatttttatttctgcttatcctggtttgtttctgcaaagttgtgttctgtagtgacataattacattttgctgctgcagactgttacagttaaatatttattatatttctgtaataattattgacatttgcaaaaactcaatttttaaattggtatcagagcaggacactaaacttttagtgtgatccttttaacgttttcgtgtaaaatgtcattttttgcagaaggaagttcaatttctagaccactattgctcaataattttagttatctttattggaaagttagaatgagagctttcatcaaatctcaagatgagaaagcttggaggatggttctatcaggttggtcttctccagttgagatagatttcgaaggtaattctaaaataaaatctgaactggaatggtctattgaagatgataaactttctgcgtacaataacaaagctttacatgttatatttaatggagtaggtgaaggttatattaagtttatatcgtcttgtgaatctgctaaggaagcttggcagagccttcaaactcagtttgaaagaacatgtgatgttaactgttctagatttattatgcttcaaaccaaatttgatgagctgaggatgtctgaaaatgaaaccctaattaaattttatgaaaggctatctgatatagcttatgaatattttgctcttggtgaaaagcttgatgattctgtccttgttagaaaaattgttagagttctttcagaaaagttcgaaactaaacttttgaccatggaggaagctaaagattttagcacaatgaaggtggaagaattaatgggttccttgcgtacttttgaattgaatcaacaaatcaaacaaaaggacaa

SEQ ID NO: 143512 - DNA, 805 bp, Cannabis sativa
gaaaattcacaaacggtggatcctacatgttccgccagctgttaatcctggacatccggtgaacatggggaatagtgtaacaattcctatagataaaaccgcgcctggtgtgcaagagactgggaataacagttctgcacccaaccataacaacacaactgttccgcctggaaccaacacccagacgatcatcggagatgccacttagttacaaaatcttcgtgacgctctcggactaatgcagggtcataacaataccctacatcatgatcaggacaaactccgcactgcggtaaatctcgcgtttgacgaacaagggcatatgtttgccaaatagagatggaggcattaagggctcaccatgcagagatcgaaaattatagtcggcaggctaccgtgctgatacaaaaagcctaccaaactataggtcagcaaccgtcgaacgtcattcccctgcgtgagatggacaaagatccaccgatgaatacttctcagactgcaaatggtcagccgcccaatcctcgatcacgagttccactcgttggccaagaagtaggtaggcagaccttgtatagtaattcatcgggagatgtcaaacctgatggttcaaactagataaatggtgccattccatccgtcaaccaagcgaatcaatcgctgaggcagccaggcacttctatattcgaaaggttgggagcgaccaatgaactaaggaatgatctgaacagaaggaggggagtagacgatcagaatgttaccacaatctcgcagccaaaacctgtactcaaattcctgctcagaaaga

SEQ ID NO: 143513 - DNA, 842 bp, Cannabis sativa
  modified_base (265)..(268): a, c, t, g, unknown or other
aagtggttgagcaggacggaccacaaggccatcaacaaaatagggcgttttgttgatgagtacttcatggtgaaggatccgagcatcactctaactcagttccagcagatcccgacatatcaccgtcctcccatcacccttactcttagggatagggctcaaaaacttgcccggttgtcggtagaagagagggatatcatgcagttgacctccgacgaaaatctggtgcagtacgggctttacctagaggacttttcttctaagnnnntgacggggaagaagaggaaatctgatgttgcccagcccgaacgagctaataaggaggatgagctaagtcaacttaagcgtgaagctaagttgaagggaggttctcgggcaaagtagtatgctcaggagcttatgaatcccaaagatgaagctgaggctgagcatgtgactcctttgaagaggaacaagaaactcccggccatgcccaggcccgttgaacatgctatttgcataagggagcccatttacctgttcggccatctcatccctatgctggaaaagggaaggccgttatgtctgagataaagtcgatgtcaggtgatgagggacttctggctttcagggcgggcagtcactctgcgctttactttttttcagcttcttgactttcatgttttgtattttctgctggtttgtgctaaccacgctgtttttgttctctgcagacatttctcggcagatgattgacgatttgaggaagaggatgggcgaaagttctagcgcctcccctccggttaagaagtctaagggcggagaggggtcttcagagtggagaccttctggagaggttattg

SEQ ID NO: 143514 - DNA, 632 bp, Cannabis sativa
aatgtatattattgtaaacttcccaaataaataatacataataactcaaaatataagataaagaaactatttatatttatcaactaataaaaaactgagacaaagaactagttccataaagcaaccaagataaaaatttacacacaaaaatcagttaaaaaaattaaataaatcaaaaattggttccttttgaattaactaaatcaaaaattagttcccaaactaactaaattaaaaaaccagttcattgaattaattaaagcaaaaattggtttctaaaataaataattcatgaaccgtttgttgaaataactaaataaaaaactagctaagacgtaaattaaaatagaaccgatttcacaacaaaatgactaaaaataaatagcacaaaataactaaaaacccaattataattaaaaaaatataaaaggaaatcagttccaacaacacaaacacataaattaaatagatccggttccacaacaatatccgtaagagcataaaatacacactaactcacaaacttgttacaattagaaaaaaaaaacataatatacattatgtaataccctagaattatgaaatggattagcaaaaccctaattagataattatgaataattgaggaatta

SEQ ID NO: 143515 - DNA, 753 bp, Cannabis sativa
  modified_base (143)..(145): a, c, t, g, unknown or other
tttaataataaaataagtaatatctgatctaataattaaaataaataaaataatctaaaatttcaaaattaaccataaggctatttttgcgaaaaaataaattttcaaatttcaaagactactaatatctaaaactaattttnnntaattaaaaaaaattaataaaaattaaatttattcagataatcagatttttaattgaaaatttagattctacacaaaaatctaccaaaatttgaactttatttcaatgaaaaatgatttttgaatccaaaaatatgacaaaaacaattgtggtgcacaggggtatgcaatgcgtacccctgctcgagcggatgggaggaatctgaccgagagacaaggctgcatgcagcctacttggccgaggtagctcggcgtgacacagcttcagacaggtcgtgtccgagtttcctctgttaggctgtctgaaaccgcgtcgtgatgatgtcgattgtcccctaagtgcgcgcgcgtgtgggtgcatcaactttagatattttcatccaaatttaaaaaatcataactaattcataaaaaatccaaattagcttctgtaaaagcctaaattgattgattttttgtctactttccagtaaaaatatttccagaattcaaaaaaaaatactttacaacatacacagcgatttccatacattcatcaaataatcacataaaccatcacgaaaccatccaaatcaacacaaacatcgttttaaattcatatttcatgaa

SEQ ID NO: 143516 - DNA, 874 bp, Cannabis sativa
taattgccttttctaatcatattactagagcggtcattacaattctcattttatgagtttccattgtttcatactttgtaaatcttattttgagcaatcaatattggggcgatcgttacttagaataaaagattttacttatctttcgatattttacggtattaaattggtaatagatgaagctctattagggatgaatctcattaaaacaagaaccatgtataatggagattgaatacccttgacctaaaactcattattttaaagaattgtattttcatttgatataaattaatttattttttaatattcatatatttatttaattaaaattactaatttttagataaatctaaaaataaataataatttaatatttataaacttataccttaggtagatctgaaaataaataaaatttattttttatatttagtattaatttttaataaatattacgaaaattacttaatttaagttggctcaaaattaattaaaattaattttcaactcaaatctaattttctataaatatatataatcacaattcgaaatccaaagtatttaaaatatattttctaactttattaatataaaataaaataaatgttgaataaattattctaattcatgttggtctaaaattaattaataaattaattttcaacatgaatataattttctcatttaattaaaattattgaaaaatatctaatattttaagtatcttgaattaaaccaacttaaatattaatttttatttaattaaatacatctaaaaaatacaaaatagtctacttagaaaataactatatagatatttcataaactaaatgttgattttctaatataatatattttagactatttattt

SEQ ID NO: 143517 - DNA, 801 bp, Cannabis sativa
cgagtcaatcttattcagattttgagtctgttttttcttttttcgtcccctttcttgatcttatctatcactatttataatttcatagtggtagtaaattacaaagctaaccaaaatacatttatggctattatccctaaaatcatgggatttgattacaaatcaatccaaataaatgaggtttttacacagctatgaatatcccgcccttattcggccgagatgagcgcgtaattaaagacatacggtaagtcgtatctcatagggatgcctcgccgaggagggagcaaagatctctttgatagcgagcaactgcttgtcattttagcttcttgaaactagtattgtcttaaccctgatggttatacgttctggggtcgagaagatcttcctccatgcaagacatcttttagcgggataaatacctcgctgtttgttatcttgactcaccatactatttgtactcagtttgtatatcgcataatatacactaagtatttttaatgttgtcgctttatttttcacgcagcgaggttgaggcctcgtcatgagcgtatgcactcacatggtttctcgtcaatacataaattagcagttcgtatgtttctgtctcgtagaaggctattcagcctactgagttataaacctatcctgcgaattatatttccaacgagttgttccatgctaagcgtacttgtcgtttgtgtgtttgagttcttcccagttcgacacgtgtccccctcagatgtgcttaccgaactttgggtataacagaatttatacattaaacataatcatgaa

SEQ ID NO: 143518 - DNA, 511 bp, Cannabis sativa
ctctgtttcaattctttcgatttgattccactaagggcgttgacaacccccaacaaatattttgtagtatcctgttaattctagaaaatctctaaccttcattacaaatttgggatctgcaaaactcgcatttcttacatttagcataaaacttatgcttctagagacattacaacatcatccaagggtgtctctcatatgcctcccttggatccgaagaaatcacaatacccttaatgaaaacaattacaaagtcatcggtacgagtcttcaactggtaataaccatatcgaagacagaccctagagaaaatgatccttccctaaattgttcaacataacatctgtccttatcaaaggatacttattcttcacaaataaaactggtttattccagaataaaatacttagactagtaatttcaagcccaacctttcctacaactgaatcttcactcctttcaattctacagttaccatccaattcataattttagatacaggttttactcc

SEQ ID NO: 143519 - DNA, 504 bp, Cannabis sativa
  modified_base (56)..(58): a, c, t, g, unknown or other
ttgtcatttaacaaaacacagggtccaatctataacttttgcaaaacacaaggtcnnnaatggtatttaccctaaaaaataaaactctctttaggtcaagtggatcaacaatacttatttgaagggacaagacttctagaggtatcaacttaaagatgatagctggtattataagttgtgttgcattagagacaccttctcacaagaagatatagaaagtgtgcgtcatcagggcaaatttagtgttggtatgttgtatagaagcttaatacaacttgagaaggtaaaatactagcactttgtgtggaatagggtgagcgttgccaagcaaaaatttataatgtggcaggtggcaaatgttaagttactcactcaggaccacttggctcatttgaacattcaactgaatttcactctttgctcgatttgtggggttgaagaggagtgaaattccgtattttaatatttccagtttaattatttaattaaatgattaattaaatg

SEQ ID NO: 143520 - DNA, 652 bp, Cannabis sativa
  modified_base (105)..(132): a, c, t, g, unknown or other
  modified_base (309)..(312): a, c, t, g, unknown or other
cctggtaaaataaaatccaacatgttgtgcgtcacttttctattggatgcgttgagagaaaaaatagtttccatgcataatagtcattttaatcgaaatagtgannnnnnnnnnnnnnnnnnnnnnnnnnnnctttgtgaaatgtggcccggacccctctcaaaatatattttggtagtagtcacattgaattcgtgctacaaagacgtgaatatcaagattggttttgcattaaattttgttaaaatgaccccctaattcaaaaattaaaaatattcttctttttagggtaaattttaacaagttttnnnnttactcttacactcgttagtgttttattaattctcaccctacacagctccaacaatcgtgaaattgcacagggaagaagccaagaccattgtgcatcacttttcaaagggacacgttgagataaaaagtagttttcatgcactaacaatcattttaatcaaattagtgaaaatctcatcactttaatgataatggtacccctttgtgaaatgtggctcggaccttactcgaaatatttttaacgactagtcacaatgaatttttactactaaaatgtgaatatgaagattagtttcgcattaaatttggttaaaatagccccctaattcaaaaattgaaa

SEQ ID NO: 143521 - DNA, 673 bp, Cannabis sativa
  modified_base (622)..(622): a, c, t, g, unknown or other
agatagacgaagagagagatggggttgaattatgagaggggtagtattgagttttagataaaattgtcacatatttttaattttcatatctattccattagggaaaaaattatccccaaattactgcatagatattcaaattttccttaacaaatgtcaagttttgtaaaagttaataaattataataattagtgcaataaaaaagtaatatttattgtaggttaaatttgatacaattctatattttatattaaatagcatgatttttagtatgtgtcaaatttaacacacattctaataatttttgttaagtttgctaaaatataacaataaatcataattttagttatttaatggagatactcttaggtggtattttttgtaaatagataagttgtattattatttttgtttttatggtgtataatgtagttgtaggagacttagtacaaaattgtgtataaaatctaaataagtatagctatttgaatatctattttagcctttaaaaaaattgtgaaaaatcttcctataattatatcatatatttagttttgaaaaaattggaattaacctcatatactgtttttttaacttgttttttcaaatttacggtttggntttctaaagtggttgcagcgttagttgcaataggagtttttatgtagaatt

SEQ ID NO: 143522 - DNA, 669 bp, Cannabis sativa
  modified_base (166)..(168): a, c, t, g, unknown or other
ttttctttctttttttttttcaagttgttgccaatcaatttttttatattctctcaatttttacatttttttccacacatatacaacaaacttctcatccaaattctcccaaaataaagatatacttatggtataattagagttaaattgtggatattcatgggtnnntctttttaggctcaatatgtgtagaagaaaaaaataagttaaggctcaaaaacggtaactagaataaaattatagggatggcttgaaagacacaatcgataaaaaaaaatgcctcaatcactttcctagtcatgcataatttattatttcatctcaaatagcaagcaagcaagttttagaatttttcaaacaactttccacatatcaaattagcatacataaatcaattcaattactaaaaaattacctaatatgattacatttcttttaaagtataaaatttaaattagccaagagtataacatcaccaagcacacagatttttcgaaaaaataaatgaattttttaaatcatgctatctacctactttcaaattaaatcatattaagcaaattgacccacaacaataaaaattaaaaattaaaaataataaaaaaaaaaaactaaaaataaaactttaagtcacctcccccaaactaaagtggcacattgtccccaatg

SEQ ID NO: 143523 - DNA, 832 bp, Cannabis sativa
ttaattagacttagtaaagtctctcaattaacaaataaaccttaaaatctctctttttcactattaagcccttgcttagtgaacattcataaataagacatagtctaattttagaatgttaattgattcattaaaactaattaactaagtcttacaagcagtattgtatgcacattaatcaggattatttggatctaaaatagcctcttccaactcttcaatgggtttgagctggttactctcgtcttggactctgggatctagatcctcatctttcttctcaccttctcttgttatgactaccatcaattgatgattggctcttctattctaaagttctatgcgataacattcgtgagccagcaattggtcaccttgtacaactcctactcccacttgtgttggaaactttagagataagtgtttaatgagcttattgcccctagcacaatcaatgtagggcaacccatcaatacattgtaaactaatggaagattaacaaataagaattcatgcattagcgtcgttgataatggtggctatcctacagttaatgtaagttcaatgatgccttggctggcgatactatcacctgtgaatccacataagcttaccatgcaaggcttcaactttgcatcctgcaaccccattttcttcaatgtatccttgtaaaagatgttcatcaaactcctgttatccaccaatactcatttcactctcttattggcaagatgaactataacgacaagaggatcaacatgtggatactgcacatgttttttgtcttcctccgagaagacaatcgaaggttcatctaatttttctcttttca

SEQ ID NO: 143524 - DNA, 844 bp, Cannabis sativa
tcggttccagttctagttgcaattttgagtttgagtttggattcaagttcatgtcggggttcgagtcttggtctgagtttgggttcgggttcagatttcggtctaggttcgaatcaagctctgggtgtgggttcatgtccacgtccgggtctaggtccgagtcccaagttccattctcgatctgagtttgggttcagttctgggtctaagtcctgggttccgatcctaatctgggttcgagttcaggtctgggtctaggtttgggtctgattctcggtctgtgtctgagttcaggtcctaagtaagggtccgattttgggtttgggtccgggttcgggtttgatcttggtttgtgtccaggttcctatcatagtttgggtccggggtaggtttcatgtcttggtctgggtttgccttcagattctcgggtccaggtcaagtcctagttcaggttcgagtcccagattccgatttgggtctggttctggggcctaggtccctggttaggtcccccatctatgtccggttcctaggtcttggtcttggtcaaggttcaggtttgggtcccgagtcttggttcgagttcgggtcccaattcgggctcgtgtccaagtttcgttcccagtcttggttcgggttcgagttcgggtccgaattcgggtcccagtcccagtatgggtctgatttttgggtcccatgtctaagtctagttgttagttcctgggtgtggtcccagttttttggtctaggtcttggtcagggtccgggacccggtctgggtccaggtcctggtcttggtttatgtcccaagtcacatgtcccggtccgggtcgaagtcccagta

SEQ ID NO: 143525 - DNA, 590 bp, Cannabis sativa
  modified_base (249)..(249): a, c, t, g, unknown or other
ccgacttggaaactacacgtggacggattggctatagatcagttatctggtacaggaatttcccttgtcacgcctggggggcaacacctacacgttgtagtcaagtttggattcatggcatccaataacgaagtcgaatatgaagctctaatcgccgacctaaagttagcccgacaaatgaaagccgaacacattaaaatctgcagtgattcacagttggtggtaaatcatgtatccggagaatatgangttcggggagaaaagacgatagcatatctgagcaaaatacatgacttgctcgcacaattcaaaagcaacggtctcagaaaaattccaagggaagaaaacacaactgcagacgcgttggctcgattggcaagcagtaatgtaagtgataaggcgaacttggttcatgtccagttcctcgaagagcctagcatcactggtacggaaaagatcgaaatgattgatacttccccaaactggatgacatcactagtcgcctacctcaacactggggaactttcagataatcggaatgaagcttgaaagatgagaaggaaggctgcacgttatatcatagtagaggg

SEQ ID NO: 143526 - DNA, 1197 bp, Cannabis sativa
aacccaaaggagcaaaagattataaaatgtccatatcaacaacatatttattaaactacacgacacttaatcctttggttagaggatttgttaacatcgacgtggtctttcaatattttatcacaatgtctcctttctttaccaagtctttaactatgagatactttatttccatatgtttagaagcactactaatctcattattctttgaaaaaaaataacaatattattatcacgatagattagtatatgagaaatagaatcaactagtcatatctctaaaatcaaattttttaaccataaagcttgcaaagatgtcccataacatgcaaaaaactcaacatatattgtagatgatgtgattaaagtttatttaacactttttcaagaaatagttgcaccaacaaaagtgaaaatatagccaaaagttgactttaaatcatctacacaactacaaaaatttgaatatagaaaaccaataactcgaagattgtcgacatgcttatacacaagcataaaactattcgttctttgtaaatatctcagaactttctttactacaacccaatatatatcccaagaacattgactacaaaagcaatgtcaagttgagtgcaaacctgggcatacatcaaactccctattacacttacatatgggatgttcttcattgcttctctttccaagtcattcttaggacaatgttgcttagtaaatttatcccctttcagaataggaacaaaaccagctttacacaaattcatgttgaaccttttgatcacacgattaatgcaaccttcttgagataagccaagaacttttttattcttgtcacgattaatctcaatctccaaaataaaagatgtttcttcaagatcctttatatcaaagttggtagactaaaaaatttgatctcatttagtaatgacaatttattgctgtcaagtaaaatgtggtccacataaagaacaagaaaaatataatgactcccactgatcttcatataaatacactagttaaaattgttttatatgaaaaccaaacgatgtcacaatcctatcaaacttcaagtacagttggcgagatgctagtttgaaaacataaatggatcgtttcaatttgcaaaccaaattttcatttccattttccttgaatctttcaagttgagatatatagactttgtaaagcccgcttagt

SEQ ID NO: 143527 - DNA, 1111 bp, Cannabis sativa
tgtgaaaattttgacatgaaagatctaggtgaagtggatgtaatccttggtatacagatcacttggtctgaaaagggaatttctttggataaatctcacaatattgagagatcttaaagaaatataattactttaactgtaaacctgcttgtacaccatatgatcccagtgtaaaattatttaagaaacactagtgatggtgtaagataatctaaataagcgaccatcattgttagtcttcggtatgccactgattgtactagacccaacattgcgtatgtcgtgggattattatgcagattttctagtagacctagtgcagagcattacaatgctattgagagggtcatgagatacctcaaaagaacattgaccattggattacattatcagaagtttctagctgtacttgaagggtacaatgatgctgattggaacactttatcatatgactgcaaggcaaccgatggctatatttttagcatagctactggagctgtttcatggaagtgtaagaaatagactattttggctcaatctacaatggagtctaaaatgattgcactagctactactagtgaataagcaggttggctaagaagcctgctaggtgagattcatttatgggaaaaacttattccagctgtgttgatccattgtgatagtgccacgactattgcaaaagttcagaactatcattacaatggtaagagacgacaaatatgtcgtaagcacaacactattagagagtttctcttaacaggagctgttaaagtggatcatgtacgcactgatgataacttggctgatcctttgacgaaaggtttagctagagagaaagtccttaaaatatcaaaaggaatgagattgttgcccttaaattgatgaatcactcatagtggcaacctgacctatagactagagatcccaagaaataggttcagtgggtaataacaagttatgaagtgataaaagtgagatcatgctataattatacgaaaagataagcatgaattcctgaagaaatttaaggatgagttaatagaagctcttaatgagatcatgttgggttttatgctctaaataaaacccatttcaatataataagatt

SEQ ID NO: 143528 - DNA, 672 bp, Cannabis sativa
gtacttggaagacccaagtacaggcttccttcatccgcaatagccatgcctaaagtgttacatatgctatcacaaattccttgggtagtgttaatgctatagaaaatggaggatttcgaaaaattcaccttttggcctgaagctgcttcaaacttatggaggatgttttttattctattagcttcttgggtggtagccttgcaatacaaatagctatcgtccgcaaaaagcatatgtgaaatacgaggtgctccagccactttacacccatgaatgagaccagccctttcatacttggttagcaaagccgagagaccctcagcgcaaagaataaacaagtatggagataaggatctccttgtcggattcctcgggaaggtataatcggccccatctccctgttctcatggaccaccagatattcagctgaggttacacacttcattaacaaagaaatccaccattgatcaaaccccaatttccgtagcgttgcttctaaaaaaggccattcgatcctatcgtaagctttactcatgtctaactttaaagccataaagccttattttccttttctctttcgctttaggtagtgaagcacctcaaacgaaattagaatgttgtccgaaataagacgtcccgggataaaagcgctttgagtgtcagctacaatag

SEQ ID NO: 143529 - DNA, 882 bp, Cannabis sativa
ttatttaggcattgggaatgtcgggaatttaaaatttcccaaaataccctttgtaccccttttatgttattttggtgtggaggggcaaaatggtcattttgcccatgtgtgctttgttttgtatggatttattttattaagttttaaatcctttattattgtttagttggctgaagtaattcatttaattgggaaatccactctttatttcaatttattcaaaaattagaaagttgagaaaaatcatatttcttcctctctcaagctctctttctctctctcaaaaatcatagggttgctagggtttgttttgttcatcaattcagcaagttttcatcaaattttagattaattcaagttgaggtaatatttaatcaagcttctctttgttttcttgaagttttagaaaaatgaaatgttgcatgtttgatgaatttgtggctgtggctgttgttattgtttattgttgttttctaaagcttgaatatgtttaattgagtagattagaacaagttttgaggcatgttagttgattttaagcaagtatggagctttaaattcaaaactttagttttgtgggtgaaatggtgatttagctgttgtagttgttctttgagtttgggtatgttctctgtagttatattatggttgtatatggtgaattgagcaggttttgatagctagtttgtgggatgagcaagctttgagtttttgaactcaagcttgactcatcaatggtgatttttgttatgatgcatgaagttgtgtcttgttgctttgatattgacctttaggatgtttagaacaggtctggaaagtttggggaggattggggtttaattggttgagttatgaaaattttggtgtttcctgcactgaacc

SEQ ID NO: 143530 - DNA, 906 bp, Cannabis sativa
tgttgacttctccaagttccatccacagagtctcaagctgagtccgcgcatcttcagcttcctttttggccaagtctgcatccctttgcattgtgttggaagtggcaagattcttgatagcagccgacttagcttgagaataggcataggccatcttcaaaccagtctatgccgaaaatacattaaaatctgaactagtcaaagaagaataaacgaaaaatgttagaaaggacttacccatgaaagttccttcagaactcctcccagtaccaactccaaggacaagtcattgtccgccccagtcagctgcttgttcacctccaaaagcgaccgagctacatagtggttaagcatgtctttgcctcttttggtctccgtgcataacaccagagtgggggcaggggcctaacttgttcagatccgcccttgactagctcagacccaatcttagcctgctcaggtctattcgaactccatcctcaggaacctttggatttggtgactttcaaggtggaagggtccacaaaaggttgctcctcagagagatcaatgacatcttcaactggtgccttctctttggacgaagtctcactacctttggactttttggccggaagggacaagcccgaactccccctactctctttttttcaaagcctcaatcatcttctgagacatttctggacgaaataaaaataatacagtcaaaagatgacataaaatatatgaagacataaaaatcaaggaaaataagtgcaagttaaagtactctgcacgttggcaggagcgttttcctgaacaaacactgacggagcatcatcatctgaagagtcttcctgctcctctaggatagcttttccttttccctctataggggttgatggccgagcaggcacgcctggttcc

SEQ ID NO: 143531 - DNA, 1299 bp, Cannabis sativa
ttgaggtagttttcttctatgttattgaattttattactgaattctgaaataaaaattatgtgtgaaatgccatgattgtgttttaattgcatattgaaagaatgagttcattttgatgaagttatgagttgttgaggctttaattttgtggttttcctttagattattttgtatgaattttgggttgttaattggggtttaagactactgaaattgaagtggatttcttggagtttaagcttgtgatttcagcttgttgctcaagttgttgggtttgatgttatgtggaattttagctcaatatttggagcttattttgaagttgttaatatgatgtttttcatgtatgttggttgtggattagtgcatgaaattgatattttaaatctctatattgttgagttataataatgggttataatttgtgagtttgttgaaaatttggacatatttttgtgtgtttgggctgaatttcaaagctgttttttttttttgggatttcctgagtttggaacctagtccgcggccctcctccctagaaaatcctgggtttcaacccaggttctgtggccccatgttaggagtgtcgcggcccgcccccttgtttctgggcagattcgcacgcgatatttgaatgtttataactttttgattcggactccgtttcaggagttctatatattgttggaaagttatttccgagatctatgtgattatctaaatttgaatgccaattttatattatgtggaaatggatttagggattaaccctattttgtaaatcccaaaaattgtgactaggattactggcacttggtcaggagcacccagggatttggaatctccacgtttgcgagacattaggtaagacagtagctaacacgtagagttatgcgcagtggcgcttatattgaatgtgatatttatgagtaattagaaacccggattaggattattaccctaaagtgagtagtttattggcctagagttattaccctagtaaattgttaatgtgtaaatgttatgccgtgatatttatatatatattgagattaaagattatgcgttcaaagtataatcgggttggactcggtaactagaaccgagatgaaccgttctaaggtcttattgtatatagacgtgtgagtgtaatacgtgagtctacgccacatagacataaatgggagtggatcataacacgcgggtctatgttaaatagacaaatatgaatggcattattgtatatgtgatatgttaattataattgttgatatttattactgtcttgctgggcttgg

SEQ ID NO: 143532 - DNA, 635 bp, Cannabis sativa
agaccttgtctagtaattcatgagaagaagtcatacccaataattccaaccaagttattggtgtcggtcagcaaattggccaaaccaaccagtcactgaggcagtcgggtgtttctgtatttgatagattggggataacacatgatctcaaaaatgatctatataggaggagaggggtggacgaccagcttgacacgccaattgtgcagcccggaactcgcgctcaaaatctcgctcaaagagatgttattgtgactcatgtcggccaagaggtcgaacaagttagtctagctgtgcaggcacagttggacgaacttaaaaatatgttctaaggattggccagtcagaggaacaacgatcttgagttggacagagcacgtggaacccctttctcccccgaaattaatatcctggaattgctccataaatttaagatgccaacttggaagatgtatactggtaaggaagatctcttatcccacctcaattagatcgagatacaaatggacctgcaaggagtacgacgagatgcatgttacagggtttttcctacaaccctttcagaagccgcccaacaatggtatttcaagttggtgcccggaaagttcaagtcatggaaggctttctcctcagag

SEQ ID NO: 143533 - DNA, 967 bp, Cannabis sativa
ttttaattttattttagttttctaattaattttatgtatttttaggtgtatgtgttagaaaaatattgggatgaaagtgaagaaaatattgaagaaatgagccaaaaatgaaatttttagaaagaaaatcacatcagcccaaaaagaagctcactctgggtcagctctttgaccccatctggaccgttcgttgactaatctggacctgccacacttgcttgctctagcccctgtggttcccgccttgttagcgtcccaccaaccagcgcacgccacgtcccaccccgtcagctctagcccaccaaccgcaacacgccaagtgtcctactgagataaaaaaaaaagaagaaaaaaatacttgttaattggcttttctctcagccaaatttcccattaaaaaaaccaaaattcttattctctctcccacattttacacacaaatacctattttatcttcccaatttatttcatctaaataaacactcctaatttatttttaccctaatcttttcactatttttccatccaaacaaacatttattttcttcaacactcttacacatactctatttatccattctctccccaacactaattaaattaatcaatttattatattttgattaatttaatctcttaattttgcctataaatatggtgttggaagaccatttcaaacacacctcttcaccaccaaaacatctcttcatctcaaacacctttcactctttatttttaccatttttttttctaccatttttacattttgaagagcatgtcaagatgtttatcttttgtaatttttatttcaatctagttatgagcttctaatctttttttcaagattattaagataatgatgaagcaaaatgtaactagatagtgtctatttttgtatgttcatttcctatttgtgctataaagtttatggatttttctatcaaaaatttgtctttttcatcttcaa

SEQ ID NO: 143534 - DNA, 548 bp, Cannabis sativa
ttttttcccagaaacttcatcaaccattttctcttccacgctaagctttgatttcttcttaggatgtggcctcccacgcttggttacaggagtagcaaaatcagaatcctcctcttcaataattggacgtttaccctttgctttgttagctagagatttcaatcccatcttggaattttttttctgaactggggaaggagatgaggatgaacgggtgatagccattttaaaaagaaattggaaacaaaaataaactgagagggaaaaaaccgtgaggaatcgtggctttagtgggagttaaaaaattttggaagaacaaaaaatgagaggaaaaaaaccgtgatgaatcgtgggtagttatgcttcaacaatggaggttattgatcttccaaaaaaaaactgaaagtaaataaaaaattaaatgaaaacaaaaggaaaaaagagagggctgtgattggaagttgattgatggttgatagggaagccacacgtgtctgtgcatggaattgatgtgtaagtggtataattgtaataaaagaaagaggaaa

SEQ ID NO: 143535 - DNA, 516 bp, Cannabis sativa
  modified_base (163)..(174): a, c, t, g, unknown or other
tatttttaattgagttttaattgtttttggagcatttttacacttgttatcttttatttttgtagatttaaaataaaataagattataaaaatattagaggaaaaagatggataaaaaagataaaaatttctcacaaaaaatgatatttaaaatagagaaaannnnnnnnnnnnataaagctgaaacttcaagtctgaattcgactatcttctggttatattttgggaaaaaatcaaaacataaaagttctagatctctcttttatatttccaaaacattttgaatcgtccgattccgagtattatcgagagagttatgaccaaaatactatcagtcgacgcaacagaaaaatcatcgtcgaaacgtgaaattccaacacgggccgtggcatgataaagctgggccgcgacccgcccccctaaacagcacaaaaaatcatatttttgtctcatgtgaattttggtgatttcctaattcgaataggcatttaacatgtgcgttttctatctttttag

SEQ ID NO: 143536 - DNA, 574 bp, Cannabis sativa
tacatcctcaaggccattttcccattccttccaattgccactcgaatccttgagtttcgaaatttggttaaagcttctacggttgctagccgctctatggaagtatttactattctgatcgccttccttcaaccaaaattgctttgccctctgcttccaaaaaatttccttttgatccaacaccagaaagagttcctttttcttctcattataacgctggaccgagagagcgtccttttgttcttcaagtttttcagctcaacacgacattgcttgattcggatcttgaaatttccagttatattcttcccccaagtggccaacttatctgcgcactgagaaatcttttctgctaccgagacaagactagagccattccaacaatccttcacaatctccaagcacattggttctttcaaccaagcattctcgaacctgaagcgcctatttggagtgaagacaaccggagcaacaaattcaagaaagataggcgagtgatccgaaggagaagtttcaagattgagtagacgagcttgcgtaaaagtttggagccaagaagctgaaacaagggccc

SEQ ID NO: 143537 - DNA, 904 bp, Cannabis sativa
caaacactcagctcaacttttttctacagttttgctacatctgttttttctcacagcacagctacaactactttttcccacaacacagctacaactgcatcttcccacagcataactgtgccaaacttgccctaagtgtattgttagcaataaatatttataatttagttggttgaagtggatgacatattattcaaggttatgagttcaaatctcataataagcccccaaaatttaattcgtcttatcctcatatatttttaaggtcggccctgagtgtggaagagaactctttgaagagtgattaacttgatattttatttatgtattatttttaaattaaagaagatcaacataaaatctgtaactttgagccaaagacttgtacattgttttgtttcccggctcttatccactgaaacgagcatgcttagaatatatatatatatacatatggatcgttccttaatggaaacgtcaccactgatggaaactaaaatatattattttattgctgatgtggcacggtcaccaacttgccatagcaagtatttaacaactttgaaaagtcaaattggtgaggtggcatactggaatctttcattttattttacatttaattcgagattctttttttttatttgccaaaaggaatggtgattccacccaatcagaacaagctctctttttaatgtattgactatatatttccaatgtaatgtttgaatagttttaatttttttttggattattatacaaaattaaatccaacttattatctccaatattacatgtaattattcatattaacatagatgaacaagaaaaaaaatcataccaccaccattgttgaaacacctaacccagggtcgaaagtttgaagaaggaaaaatcgaccaacaaa

SEQ ID NO: 143538 - DNA, 1204 bp, Cannabis sativa
atagacaatattgagataaatgatcaaataaaagaatattttatcatttattagaatatttttatgtatggaatattttaactcaattttattagaatatttttatgtatggaataaaataataaaggaattattattgagataaatgaatattttatatttattaaattttaacaatattaattgtgtgatattttatatatgagcattgctattaggcaccagtggtgcctagcacttttgcgatatgtcgcgttgcgattggctaacgatactccttaaaagctattatattaaattacatgagacccgatacttagttggaccaatagcgatattgacacataggagggtgttatgcaccactgatgccctttagcatttctctttatatatggtcagatttcaatattcattacacgatttgatttcctgaattaattgttaaaatattctgataattaatgtaccgcagatactgatggagtatcttacctataaatatagggtctcggtctccgagctcttgactcattctgttaaaaacaacaaaattctatctaaagagagttgagagagcgaggaagccaaattcccataccaaagctatctcagggattgaagctcaaacatctatgactggagatatttcgatcctttcattacatgtacagtttattccgcattacatatcgtttatatatgctttattgttcatattatataatagtctaactgtcacgaccagagcccttggtcgtggcagatatataatatccataacttaggtggtcaaaggtcacactttgacccttgtaggaagataaagcttataaatgatcctttaatttatattacagaatactaatttaaaagtaatagattaactcctatattaataagaaaatattagtaatataatcaggaccactcatcaatataagaaaacaaaaatatcctcacagttatgtaatcaccaaatagataaatttaataagtcaataaaataccaaaataatacctagcatccatcattcctcatttctaactagtacattgctaatttaagtcatacagaccatccttttcaacttcaatacaaaatcagtttcattagaagactaaagagtagaataagactaaactaataacaactttcttcctcaacggtaccatcctcatccactagcatcgaactgagttc

SEQ ID NO: 143539 - DNA, 1024 bp, Cannabis sativa
  modified_base (325)..(335): a, c, t, g, unknown or other
taattccctatactatgatataccatacagctttccttctcattttttgagcttcattccaattatctgggagtttcccagagtcgaggtaggctgccattggtgtcatccagcttggggaagtatcaatcatttcgattacttttgtgccagtgatgctaggctcttcgaggaactagataggaaccaagttcgccttgtcacttacattgctgcttgccaatcaagctaacgcgtctgcagttgtgttttcttcccttggaatttgtttgagaccgtagcttttgaattgtgcgagcaaatcatgtattttgctcagatatgnnnnnnnnnnntctccccgagcctcgtattctccggatacatgatttcccaccagctgtgaatcactgcagatttcaatgtgttcgactttcatctcctgggctagttttagtccagcaattagagtttcatactcgacttcgttattagatgctttaaatccaaacttgactccagcgtgcaggtgttaccccccaggcgtgacaagggcaattcctgcaccagatagctgatttgtagctgacccatctacatgtagcttccaggtcgacttatctttattgttacttggctaaggtgtttgtactggctcggggttgctttccggtatgctttctttcttgcctgtgcattctaccacaaagtctactaaggcttggcctttgactgctgtttggggttggaaagtaatttcgtattgacctaactccactgcccacttgagtagctgtctagaggcatctggcttttgcagtattttgcgtaatggttggtcagtgtacacccgaacaggatgagcttgaaaataaggccttaactttctttttgctagaataaggcagtaagtgagtttttctatcaatgggtatcggccttcgaccttaataagtcttttaccgatgtaatagactgggtgttgtatgctgttctcttctctgattaacacggcacttacgacatgttccgtgacagctaagta

SEQ ID NO: 143540 - DNA, 548 bp, Cannabis sativa
  modified_base (490)..(490): a, c, t, g, unknown or other
ctcagcaataacaccaattccattctcacacgcttcttccacagcatctttccaagctgatccaaaaaaaaaaaaaaagaacaaatatcattttcagcagtaaggatggcaacttacatttttgtcctgtgatttacttactataactatatctggttttaaatttagcactaagatcaatcattacttaaatcttcccaatcaatcgaaccccattgatgaaaagaatgtctccttaccaaatgggaagaaagcatcactagccaaagctgctcccttaacctcatctcctgctttcttcaaagctatccttaaactctcccgacgatttggctgcccgcttcccattcccagcatacagttgttctgcccaatgacaaatacaataattggtgaaggattgaaaatgaattaaacagttggtgaacagcaattaattagaactatctcttcgcatattctctcacttctttttcttttcttttttttntttttttttttttttgaatcaaaacaaaataaaaaataaacctttggaaatcatcttt

SEQ ID NO: 143541 - DNA, 641 bp, Cannabis sativa
tcgggtagtcactacaattttactcccatttgctccagactcgaaagaactcttcaaagtgtcccacaaagaataagactcgttccaaacatcatcgtggacaaagagaaacttcttccccttcagtgcttcttcaatctccttctaatcagttcgtctgagctctgagtatcgcatttgttgccactgaccccttcatagatctctcttgttatctttaaaatattaaactcatcggacacagtaacccatacttttagctcaaaatgactttgaactctttcatcatcataaacaagttgcgcaagagtggttttgcccaccccacccatcccaacaattgggatcacagaaatcttattaccaccattaacatcatctgttagcagcaaatcaacaatgagttctttttcagcatccctcccataaacatcagattcctccaccagaggagcaagcggccttggtgagtgtttgttcagtgcacctaattctcttaggccaagaacatccttctgatcaaccagaatcttcagcttaagaaggatctccatggaatcaagcttaacagatttatcaaattcagacatgaataatgacaaagatttcagctggctaaataccttgctggcactactgct

SEQ ID NO: 143542 - DNA, 1097 bp, Cannabis sativa
  modified_base (574)..(577): a, c, t, g, unknown or other
ctctctggacggggtcgtctcaccacccttggacttcttggtcgggggagataagcccgagcttcctcccactctcttcttcagggcctcgagcattttttgagacatttctacacggaaaaaaagtaacacagtaagaaagaagcataagaagtatgaagacatgataattaagaaggttaaaaacaagatggagtaccctacactttggtaggggcatttgcccgaacaagtactgaaggggcatcgtcattcgacgagtgttcttgctcctccaagacggctttcccctttccttctacaagggtggatggtcgagaaggaaggatgggctccctgatctggattgcaagtttgatgggactgtgcccggtcggaagagtcttcttccttttaagcgacctttccttctcttcctcagcctcatcttcctactcagaatattcttaagcatgttgtttagctcaggttcctcccttcaacttagcctcgcgcttaagttgaatgagctccttctcttgctcagaatactcctgagcatgctgcttggcccctgcacctcccttcaacttannnncacgcttaagttgaatgagctccttctcctgctcaactccctcagcccggccagcactggacttcttcttcctccccttcacaggctgaggtataaagtctactggataaagcccgtattccacaaagttggcctccaaggtcaacaaggtgatattccgagcaacagccgacagctgagcaatcctctgagctctgtccctaagagccagtgtaaggggtggacggtaatatattaggatctactgaaactgagtataagtggtgtttatgccttcaacaaagtaataatcgccaacaaaactcccgatcttgctcacgatcttgtccacggtgcctgtcagccacttgaaatctggctgagagaagtagaagtaccccgacatgctttgtttgggggtagacttcaggttaaaaaccaactcacctcgtgcggagaaggcacaccccacttctggatggcataaaggatgaacagggccgacagatacttaatgccttaggagtgaactgggtcggac

SEQ ID NO: 143543 - DNA, 1008 bp, Cannabis sativa
aaaaaacaaaacaaaaacaaaaactctaacataacaatattttttattggcatctcaagcaactaatatgttttttttaataaagtagggtaatataataaaggaatgaatcgtttttgtgttgtgtatggaaaaataacattgtagttgcctcattttaggtatcataagcaactaaatagttatttttttattatggtgataatgaaaaaatatatatatcttttacatgtcaaaattaccacattcaagagtcgtttattttccttttagttatccaaaaagtaaccaaattttaatgtttcacaaaatataataggcgatcaaatttgcgggttactattttgttattctatttaaaagttattatatattaactaattagtttctacattaaagtaatgttacttaaataggtcataacataactttaaaataactgattggttattaatttagtagtctaaattttttgctaataaattatatggtttattttactttattgtaatacattagtttctcaaatagtatagaatgtaacataaatattgttacgcaaaagaaaaaaaaaatataacacaaaagtatatcttaatcaacataataaactaaacatgaacacatagttctctccaaaaaaaaaatgaacatatagtttaaaataactaatctaaaaattaaagattatcaagtggagatatttttatttagagtggatcattttgtgaaaagtaacttattggtatattatcgaaatcataattaaattaaatattaatataaagtatattaaatataactatttcatatatatgtttatttgttatattatatgaaaattaattagtttgtactgtaaacttaaaaggtaactaaaaatataactttaaaataactaatgaataatttaaatctttactgtaaagcccgcttagttaatttggaaattagcggttgtttatgtttaattatgaaattatttatagctatttagataatttatta

SEQ ID NO: 143544 - DNA, 756 bp, Cannabis sativa
gaatcaagcgtaaaatagccctaaaacaagaaacaaagagtgaaaactaaccgaaaacatgacccgaaactagactaattttagcctacaaatattgcacaaaatttagtaaacaatattatttttattatttatttcaaatatattaatttattaattatgtattattttttgtatatcaatttgcaattgcatcatgaatcttttcaggtgaaatttaatcttacaatgccattttctaaagacagtgatgcactttgtaacgttcccgttttaagtcttcattgggttcccttcacggatttatgactcttatatacgagtacatcactttggctacttcttggatagacgactggccctatagaccaacacaagtgtttccagagtaatttgtcctcactcgcacactttttagtaaaacttcccaagaggtcacccatcctgaaattatcttaggtcaagcacgcttaattgtagagttctttcacgatgagtgttaacccaaaaaatttccctggttacgtggacatcaatgtttgacacatggcatgaaggatgacgtcacaaagttgagtagactcgagtcatagcagttgacctggaaggggaccctagccctgtgcccagtgggatctctaggatggaagttcagagtttaatatcttgaatccaacccaatatctttcagtattctgtaccatgatgttgtgataaatccaacacgcaagtatacatatcgttttaacaagtaat

SEQ ID NO: 143545 - DNA, 543 bp, Cannabis sativa
ccgccgctaaagggttaaattgttgtagtgtgttgggtaattgctttgcaactgtcatagataataacaatacataaaactacattcaatgctatattgctatatgcaactacactattttccattttaaaagaaatggtgatggtgaggtatgctatctatctccattcacggaaatggtgatggttaccagggtcgggtagggcgaccggggttattgaccaagacccatcagcctaagatgccctcaactagagatagccctaatggttactactttttttttactttataatacatcaccaatattctaatttttctattttacaatacacttttatattacatcatacatcaaattctttaaagttatcacaaaaatcctattttttaaaaaaattattatatttattcgtttcaattatataatattattctatacacatatctctatacaaaatagttattaaaatccaaaacaattaataaaatatgttaaaaacaattaataatgttttataaatgtagagcacgagtagagta

SEQ ID NO: 143546 - DNA, 646 bp, Cannabis sativa
aattatatggtgcaaaggagtattcatgatgagggacaagttaaccaactcaactctctcatcaacagaatgaacatcgggattgagaacctgaactatttggcgccacctcctcggttttacctgtatgatcaactgccgccaccgaatcctttttgaaagggtctcatgtaagtctctcacctttgcattttatttttacacattggggacaatgtgatatttagtttggggggatagactttaaaatttttaattttctgtttaattttttttctatttttagttaggaatgggcaataagctaaaagatagttgtgtgctgctgttaattgtaatgtgttctgaaattgtaaaataaatgtgtgcttaattctgttaatctttggattagtttgaatgcttgtgaaacatgtgtatgaatgcaatttaacgatctgtgaaatatgttataattgttttactatggtttgtggtaagattgattggatagcttagaacttgcatgccttattctctcaaggagaaatccttgacagcattaaataggaacatgatttaggcatttgtttggatagtttgagcctttcaagcctaccatgaaatgattatccttagttaaccctcttgagcctaaacttgtttt

SEQ ID NO: 143547 - DNA, 647 bp, Cannabis sativa
tgtctataatgtgatgggttatccaatgcttccccatgttcattatccaacttaagcttaggatccataggtgtcttagaaggtttgctgcccataaaacccgaatcttcaaggagttggagtgtgtatttcctttggcataggaataatccttcttttgctcgagcaatttcaaatccgaggaaatatttaagatctccgagagccttgagtttgaatttgaggtgtagagattcttgcagctggtataagatggatatattagggccggtgatgattatatcgtcaacgtacacaagtaaggcaatgaaagtatcatcggatcctctagtgtacagagtataatcaactgtagactgtttgaatccttcttgaagtagagcatcagacaatttcttgtaccattgctgtgaggactgctttaatccatagattgatttgtgcaattcgcacacaagattgctacctacattgggagaagaaggaagtgtaagtcccttgtggtaaagacatataaacttcttcgttaagattaccatttaggaaggcgttattaacatcaagttgtagaatgtgccagttctttatagtagaaatagcaagaagaagtttaagtgtgaccatctttgccacaggagagaaagtgt

SEQ ID NO: 143548 - DNA, 672 bp, Cannabis sativa
tagttgcttttttaacggtgttgcagtgttgtttataaattttaattgtgttaaaacaatatgttaatgtttaataattttttttaagtttggttgttgtcaagtcgtttttgtgttgctatttagttgtttttgcgtaactattgtattgagaaaaagcagtccaacacgctcaagctcacttcgtcaaaactgccacgtggcagcgacagagtcactgtcgcatttgtgacgctatagttatgcgtgcgtcagccaatgactttgccctccacttgcgtcccacttgcgtgtgagtctcactcgcatatattgtccatatgtgtattttactctctccttttgcacatgagattcacatctctacagtatttttgtaataaaaaactttataaatagtatttttaaaattagtagaaagtataaatgtttattttttattgtaatagtataaatatttattttaagctaatgtaatgtaatttttttttgacctaaaatcacaccaaatttatccggccacaagcaaagattcaaaattattagttaactgatttttactttttcttttgggaaaaaaacaaaaaaatacaaaaaaggaaaaaaaattacaaaaatactttggcccggcccattaaacatttatacagtctatatacaaatatttacaaa

SEQ ID NO: 143549 - DNA, 874 bp, Cannabis sativa
atgctcaattataaatatgtgagtattcgcttagaatagcaagtacttagtttactggctactaaatggacaaaaatgaaagtagaaatagagagaaaacaagagaattatagtggttcagtcagagctcggtctgcttagtcctttattgcaatgattttagcttggttaatttgatttggatcacccctttatatagaaagcaagtgtcctttaggattacataactaatcggtttagaaccgtttttacattaaatgaaaatatttaatcaaagtaaatatttaaagaataaatgaagaacaatttaatctgttcttgtattaaaggtattgaaatgtatgcgacttgataatccccgagttgcatgttcatattccaacacacaaactcgcaggctctatgatattttgtattcgtaaggtggcctttgggcctatcgcttgaatgtctgcatttattctcaaacgcatagtccgacattctatgtgttgacaacatagaacatgcgagtccctcacgaattgtcgaacacattagtcattcagaccaatcttatgtaaagaagtgatatttattagtcgcaagagagatatacttggtcatcgcatataatcaatatacaccaccagtattaacttctcttgatcctgattatttatttgactatgcgaggcatagtatgcgactagaccctgtcccgattgcatcttctcgcaagtttgtaccaagaagggtcggctctatgggagctacctactaacacatcatcttttcaatcaagaattgagtcagcgtgtcagttttatacgaggttgtacttgtatttctagtaaaactttgccctataatagaaagacagaacctgattagt

SEQ ID NO: 143550 - DNA, 736 bp, Cannabis sativa
ccaggaaggaggaggaagaggccgaggcagcggaagaagaagatctatccaagtctcccctaaggtcggcttggtttttatttatctcctcttttttttaaatgtcctttgagccgagacaatggttttccccttgtggcccattttgtaaagacaaatttgcaaatttggatagctaactttgctttttctttattttatatttaaatgcctcgtatctttttgtttgaacttcaatatgcagttgtttgcttgtgttttattcacaatttaaacaatcatattttgatcatgcataaagttttttaggagtttccatttctcatatatctctttgacattaagtagttaatagccttctttacgcgcgagcagtttatcatctgccctgcactcgattcgctagcagtcattgattccgcttcgcgatcgtcagtagtaatcttgtttcaagaaagcttgatatattttcaatgatcttgtctcttttcatatatttttattgcttacatgagtagttagatcttctacctacgcgttaggtttaagtacttttttcaaaacaccttgatgtctcgtttaataatttcctttagtgcgagctgttagtgttcagctttatacgcgagttatgatttgtatctcctttataatttttgattttcctttcccgtcagataagtttttaatcaaaaaattatagttgtttgagccctttctcgtcagaaaggtttga

SEQ ID NO: 143551 - DNA, 514 bp, Cannabis sativa
ttatgatatggttatggtatgattgtaattatgatatgatatgattaggatataattatgatacgctatttaaataatgtatagtagttaaacattattgtagattatgtgacactgtttgaccgacaagataatgtatagtcgatttacaccctcgtttgaaactacttctttggaaaatctagtctaatatcatgccaaccaaagagcacattggtttggaggaaaatagatgtgctttctgcaactctgaggtcaaatcagctatatatattttctgtatgtgtagtttcacgagagctatgtcgttccagagttgttgggcaattcaggttgatgtgatgcattagaaaaacatcatggagtttggcaaatggtggacaaatttgaaggataatgatctcaagctctatgtggcatgtttgtgcaaggcaatcttgaaatcgagaaatagagtaattttcagagatggaagctgcaacctagtattaagtagaaaaatatatttaagctg

SEQ ID NO: 143552 - DNA, 517 bp, Cannabis sativa
taagtgagctactactagtcagcaagactagtagggcgggcatatgaggaccacgaggggattcatatgtctccatgagttggagtacccggtagtgcttctaagaagctgccagaggttaacgagtacgtttccattagcttgatgatatgccgcttgcacgggacgtggcgtacacctccaagaaaggttgtggtgtgccttggccacgagtctcaacacgagatgacatgggtagtcattcgtgggctagtttgcatacgcgcatgggacagatgcaccatgttggaaagagacagaggtctagtgtatgctactagtttggtggcttgtctcgaagacctgccaacattcgtggaggcatggcaccttgaggattactccatggacatataggagtccttaggcaatgaaggagactgttcagacagtatcgaatggggcatgacagaagcgttggcacgttggcttggtattggcatcttgccacacatgctaccttggtcaggagtgacaa

SEQ ID NO: 143553 - DNA, 591 bp, Cannabis sativa
atttaaattaattaaatatctaataagataatataatataatatcttaatttaaaatttttatatttctaagcttaaatttaatgaattaaatataataaaaaaaataatttgaaaaataagatatttgatggttaggatattatctattttatttaataattaaataaaacaaaatatcatatgtttgaaaaattttatagttagaaaacctaaaatttctattcaaactaaaattaataaacttttcataatttcatgttattttgccaaaaaataaattttaattaaataaatatttaataagattaaatgtcaaaaataacgttttcctaatcttataatttaatttaataaaatatatttaaaaaataataaattttaaaaaactaatatggttagtaaatttgaaattttaactagattatttctaaattttattaatattttaatatccaagtaagatcattttaaattaataattaaatagtaatatatgatcttataataaaaataaataaaataaacataagtaataaaaaatttcaaaattaaccataaggctagtttgtggaaaaatcaaattttcaaa

SEQ ID NO: 143554 - DNA, 668 bp, Cannabis sativa
  modified_base (142)..(148): a, c, t, g, unknown or other
ttttttatctcttctgaaagtaacctggtaccttacatttgaatatggctgagtttgttttgttgtgactgtaatttccaataaaaaaaaggccatatcttgaaaaaagtcacctgttagttcaatcttagggttttttatnnnnnnngaaagtagcttggtaccttactttcgaatggatgtgtttgttttgttgtggttgcaatttataataaaaaaataccatgtcttgaaaaaagtcacatgatagttcaatcttagggttttttatcgcttctgaaagtaacctggtaccttacatttgaatatggctgagtttgttttgttgtggctgcaatttataacaaaaaaatactatgtgttgaaaaaagtcacatgctagttcaatcttagggttttatatagtttctaaaagtaacatggtaccttagttttgaatatagttgagtttgttgtgttgtgactgtaatttttaacaaaagatactatgtcttgcaaaaagtcacttgctagttcaatcttagggttttatattgcttctgaaagtaacctactaccgtactttttgttagaactattattttctgtagtgacaaattatgtccagtagcattccagttgcgtctgggacttgtagtgttttgtctggggttcgtactgttagtgtt

SEQ ID NO: 143555 - DNA, 1026 bp, Cannabis sativa
ttgtaagaaaccaagccacaccaagtttgagtgtaggaagttacagttcaaaaatcaacaaagaaattctactaatattgaagcacaagtgatacatctgacaaatcaatccttatttgtgctgatgaatttgccaagttctcgaggtatcaagaatcacttaagtcttcatctccttttgtcactgtgttagctaattcaagtaactttattgcatgccttctttccacatcctcaaaatgggtcattgattttcgtgccacacatcatatgacaagtaattccaatctcttttctactttttcagtcttatagtcccacttttactgttgctttagctaattcaggtaactttaatgcatgtcttctttccacaacctcaaaatgggtcattgattctcgtgccacaaatcatatgacaagtaattccaatctcttttccactttttcagtcttatagtcccacttctactattactttagatgatggaacatcatcttctgttcttggatcaggtactattgctcccacaactttgctcactttgtcatcaatcttacggttagctaatttgtccttaaatttgctttctgttagtcaactcactcgtaatctaaattattcaatctcattgttttccaatcattgtttgttttaggatcttatgacgaaaaaaattattggtaaaagggcttgaatctaacagcttattatgttcttaattcacttccaccagtctctattgcttgtctgagtgttgattctgcttttgaggcccattgtcgtttgggccatccatcccaacctctgcttaagaaattctatccccagtacagtaagatattttcattaaattgtgagtcatgtcagtttgccaaacatcattgtgttagtttgagtcctaaagtcaataaacatgctagtgttccttttttgagttagtttattcttatgtttggggtcctttttctgttttgtttgaattcaagtattttgttatttttgtaggtgattattctcgtgta

SEQ ID NO: 143556 - DNA, 669 bp, Cannabis sativa
  modified_base (505)..(505): a, c, t, g, unknown or other
tagacatgaaagtagtttttcctgatcttcaggtgctatggcaatttggtggtgtccagagtaaccatcaaggaaacagtaatattcttgccccgccaatctgtctagcatctgatcaatgaagggcaaaggaaagtgatctttcttggttgctttgttgagttttctataatcaatacagatcctccaaccagtaactgttcttgtggggatcaactcattcttttcattcttgattactgtcattccacctttctttagaactacttgcaccggactaacccatttactatctgagatgggataggccactccagcatctaaccacttgaccacttcctttctgacaacttccttcataggtggattaagtctacgttgtgcatcaattgttggcttagcattttcttccattaaaattcagtgcatcacagttgagggactgattcccttgacatcacccagtgtccaagcaatggccttgttgtgcgcccaaagtactctnagcaatctctcagtttccacatcagaaagagaagctgacacaataactggcagctttttatcttctcccaataactcatatcgcaagtgactagggagcaccttcaactcaagctctggaggtttctcagtagatggcataagctcttttggcactactcccag

SEQ ID NO: 143557 - DNA, 1021 bp, Cannabis sativa
  modified_base (45)..(63): a, c, t, g, unknown or other
  modified_base (958)..(978): a, c, t, g, unknown or other
ttaaatgttatttctgatctatatcaataagtaaatctgattatnnnnnnnnnnnnnnnnnnnagggcataaaacccaacagggattagccagttctaacaagggagtaaaactctatgtgtattttcctacaactaaacatgcattttcaacctcttttccaaaattcaaagcattcagaaatgtaaggttttttctcaaacccagaaatagaattcaaaagaagattcaaaagactaaccttgggattcgatgctcttctctgtaaatagtctcgatcgtttcgagaagctttaacgattcaaaaggggcagaacagaaatttgtttgaaaagggggtttttgcctttgaaagcttcgggtgaatggagaaaataaaaatgagagggaaagtaagataatcgtttcgtattagagggcttaaataccaatacccctcataaattgggattgtgacacgtggaaacaggaatgcctaaggtcatcccatccaacgaccagccatgggcacgcctacacgaaaaccgaagagtttcgtgatgtggcaccataaataggataaaacgaaataattacagccgtcatttttcaaaaccctagatgggacaaccaaaggtcaccaccttgtgacaacctttcacctgtctctcacgtatagtttccctcgtgaccgcacctgccaagtcgcgaaactaggggcatgtgttatagtgagatttttctcacctagaaactcgagaccagacacctgtttggaggacacgtgtactcaatttccccaaggaaagctgagatgtcaatgagagactcctcaagtttaaacctcgcctgagctagactcagtgagatgatgcggatatgaccaagtctaatcgcattcgtgtgactcgcattatgtaggaccaaggaacgggtttagctcgcatgtcttggttctctataatgcgagctggtctcnnnnnnnnnnnnnnnnnnnnnaaccaatatagactcgcatgtcttggttctatcagctcgttat

SEQ ID NO: 143558 - DNA, 741 bp, Cannabis sativa
  modified_base (617)..(618): a, c, t, g, unknown or other
tgtggatgagcaagtttgagttcaagaactcaaagcttgctcaacaatggcactttttgattcttggtacaattattgtatttgagctgtaaaatatgtttaatatgttatatgttgatgctctgaaaagttttgtggtgattggggaagatttgagtaggttatggaggcttaaaagttaagattttttgtggttttctgcccaaacaacccgaattattccggttggttcagggctgttccaaccggaattctggttggactgtatcagggaaggttaaattttgttttggccataacttttgactcgggactccattttagacgttctttatatcgttggaaagctcgttttgagctctatatgtttatctatattttgaatgccaattttatattatgtgaaagttgatttagggattaaccctatacttgtgaatcccagaaattgtgaataggattatcggcacttggtcaggaacacccggggattttgaatctccacgtatgcgggacatcaggtaagacagtagttccacgtagagatatgcgtggtggcgcttatattgaatattatatttatgataaatttcaaaaccgagattagggttattacnntaaagtgagcggtttaatggcctagggctattaccatagtaattattaatgtgtaaatgctatgccatgctaaatatattgtaataaagaattatgcgcacaaggcataattaagttagactc

SEQ ID NO: 143559 - DNA, 514 bp, Cannabis sativa
aaccaaacaaagaaataaaataaaaattgcttcattttcatttcatttcatcacctccaactaaatgctacttaaggttacctagtttctagtaaccctaaggtatccttatatggttttcccataaattttttcacatacaataacttttattataaaaacatcatattttaacatagaaagtataaaattttataaaatatgcaatttactcctttaagtataaatgggagatttcaataaatgtaatgaataattatcataagaaatgatgtttttgatgctctgtttaatctttgggatgattactcaaatcactattttttataatttttttttttttaagtttaaagatcttattttacatttttataatattttataaaaataatacgacaaataacaaaaaaactgcacaaaaataataaaaaaataacatccaaacaacaaaaataataaactatcaacaacagattaataataatacaacataaaaatacatcaaaagactata

SEQ ID NO: 143560 - DNA, 506 bp, Cannabis sativa
  modified_base (38)..(46): a, c, t, g, unknown or other
ttaataaacatagttattatttaatgattaaaatgtannnnnnnnngtaataagttttcaaaatatataatttttaaaataatttttttttacacattttttgtaattacgttgtttttgttgtacagttatgaaaaaaggcctttttaacatgtcttatatatatatttatatatttttgagagtggtagctcaaaaatctaattcgcctaagattcatatattctcaggaccggctcttagcaccatatttattatatgttgatttttaagattcatattagtaatggtatgaaaaatgtatgacaggttgtaagagttgtcatcatgacttttcaaaacatgctcccaaaaaggacttttgattcacaaatggtacaacttgaactatgttcttttttgaggatctattggatgctttgaatcaactagacgagaatctaaataagataaaagcattgaaatcttttgatatttacaacagtaatatttcattttgatttagt

SEQ ID NO: 143561 - DNA, 836 bp, Cannabis sativa
ggcaaccaacatgctaacttaaagcaggcagcttaaaactcaaaaagaaaaacattcagtttcaagaactaagtgtaaacagtgtaaacacaacatcgtcatcgagcccccctaggaaacactaccaaacacaaaatacaacccgaacataaaacaacaagacaaacaacaacaactataacagaaaaaacaagaacacaaacagaaaaaacaagtgaaaaataaatactaagctgaaagaaagagtactccctctgtctatcccttggggtcatcctctaaggagctagaatcttcctgagtttctagatcagtccatcgagcaaacacttcttgtgggaactctgggaagtcaactatttgcctcggtgcaattcgcttcagagatttagctaatgcagtatcacgcgcctgaacatagcgagagtaagtcattggtttctcctcaacgtgtgataggcgattcatgatttgttcctgctgagtgtgaggaagactggcgggcgccggctgactgctagatggctttcgacgttttggagtagcaatcgaggatgtgcaatgagtggcaacacgctgaatcgaaaccaaatcaatgccgatccgctctcgcagaagttcttcatcgcccccaatagcggcattacccgctaggcaaatttgagtgataagagctgggaaaaataacttgccgccctttttcttaaagaagttccaaatttcctcataaattatctttcccacattcattttcttgcccgccaggatacaatacaataatagaggcgtgtctgactcactgtggtgtcatgggtcgtgggcatcaaagagcactt

SEQ ID NO: 143562 - DNA, 554 bp, Cannabis sativa
atgcgtattaatagacgtattggtatgatttaaataagtgtggtgatttgtgtgattattttctaattgaggtatattaatgaaaaattcccattaatattattgtattttattgacaaatgctattgtattataattatattaaacaaaacaagcatcagttaatagtgattgttaagcatcatttaatattagagtaaagaacatgaacatactatcttacgaaccgtttttatcattgcagtgaatacatgaattaaaaggatcgaaatagcctaaatctacactatttacatcgcgaacaacacaatactaatttactttttttcttttcagataaacatttcacattgtaaacaaatcaaatcaataaatatgaaatattatctaaagtgactatcccaaatagaaaaataacattatttgacctaaaacttatggaattgtttccacacaaagcataaagaaataaaaagaaagtcaaaactataagaaaggaaaaaagagagcaaaggaaaacgtgtatgaatgattactaggtagtgatagtaata

SEQ ID NO: 143563 - DNA, 527 bp, Cannabis sativa
gcaagggcatcagcgccccttgctggccgtgagcccccgaccaggtgcacattcccttataagggtttgaggcgcgattgtcgtgggcaggagcgtagcagtctagctcgcccaggtatccgtcttggtcgagagtgcggaggcgtgcctctgaaatcttggatggaggactcacccacctggcgcccaaggcaccctacctcctatgaggaactgcctcagcaagctcctcggtgacgtaatcaacgcccgcaaccaggacgtctccgtcagcatcaactggttgcccagcctcgttgtactccccatagttagagggttcaatctcctcctctccctcagcagcgggagggctgttcgcacgcgcctcgtccagttcttcaacttcctagacttcagcgtccccctcacggtcctcctccattgggaccgctaaatcctattcgggatcgggcagggtggcaagccgagccacctgggggtcagaagcgtcagccagacgccttcgtacgagccatcattctatg

SEQ ID NO: 143564 - DNA, 683 bp, Cannabis sativa
ttctaatcctaactaataccccagtcccgaatttcttgaaaccctaatcaaaacctaacctaaaacttaaagaaatcaaaggaaaatggtattaaaacatacctcaacttgactaactcctagggcagaaggtttcgccaagaatttgttgaagagaattgagtttctctcaagttctttgttggttttccttggagccgaaagagaaaggtgatgctcttgacttttctaaaaaaaaattgacttctttaacttatcactttatattaatagaataattaaccctttcaatttcatttcagccatccaaatcaaataaaacataatacttacttatcacaccaaatgaccattttacccttttggtagttgtaatatgtggaaaatgattttgaagtatatgcatgtttagggtgttacatactctatcaaagcctgtcctgcgaggaagcactattcaggaggcttctattatttgggaagccattccaacacaagatcattttttggcttccaaataaaaaaaaaaagggtttaaagaagacttcttctggacgacagggttccatccaattaatgctactagatttcagaattttacgtaagtattaatcattctcaaaatcttagttttgagttttagagtttttatgatgttatagttatactaattcagctctttc

SEQ ID NO: 143565 - DNA, 921 bp, Cannabis sativa
gattgaattaattggtattttatttgatatttgataatctgaaattaaattgggatttaaatatgcatggaatgacataaatacccttgtgagggtgaatatgtgtggtttggccctaaggacattttggacatttgacctttatttactatgtttagtaaaactgattttcattgaggtaaaggaataaaatttctggttgcttctctctctcaacccgaccctctctttctctaaccctctcttgctttttcaactcaaatttgtgaggaatagcttgaactaaaggttgactgtggggaaatttatgttggaggcttggtgctagtttgtgcaaggaattgaggtagatttatagcttttaaactttgaatccttgctgaatttttgttgttgtaaaagcaagaaataggtgatgatgatcttagttgtatgttgatgttttcttaatgatttgaacatgtttatgcatgaattttgtgagtatatgatggattgtgtttgggtaagctttgattgtaattttagggcattttccatgtttgaaatctagttttacttgatattgagttgctgaaaaatattgaatatgtgggtttgaagctcaagttttgagcttgaagttttggagtttgaacaagattttaagttgatttttacaatataaaattggggtttaatactgaaattgatgcatgaaatatgtttatttaagtatctattagttgttaccaaccctatttgatgatttggaagtttggttgtgatttgggatggtttagttgagttattggggctgatttttgtgttttgctgctggttttctgagttttgaacccaggtgtggcgcgcccatttctttctgggcagatcctttttgcaaacttcaaatagccataactttgtgatccggactccgat

SEQ ID NO: 143566 - DNA, 1404 bp, Cannabis sativa
  modified_base (1303)..(1307): a, c, t, g, unknown or other
ttcgctctgaacttacttagcaaagaaggatggtgaaaatgagtttgtgtacaaatgctcactggtatttataggcaagcaagagactggcaataacaatttagcaccaaaccagggcattcataacacagttgttctgcctgctaccaacactcaaacgtccattggagatgatactgagttacaaaatctccgtgctgctcttggactcgtgcagggtcatgccaataccctacatcatgatcacgaagaacttcgcactgtggtaaatctcgcgttcgaggaacaaaggtgtatgtttactgagtggagagacaaagagatggaagcattaagggctcatcctaaagagattgaaaatcgtagtcggcaagctaccgtgctgatacgaaaagcctaccaaactgtaggtcagcaacctccgagtttcatccccctgtgtgagacggacgaagatccagcgatgaatacttcccagactacaaacggtcagccgccaaatccgcggtcacgagttccccttgtgggcctagcggtaggcgggcagaccttatctagtaattcatcaggagaagtcatacctgatagttccaaacaggttaacggtgccattgcacttgtcaaccaagcaaattaatcactaagacagccaggctcttctgtatttgaaaggttgggacgactcatgacctaaggagtgatcggaacagaaggagaggagtagataatcagattgtcacgacgatcgtacagccaggagcccgtgctcaaattcctgctcagaaagatactaatgtgattcaaattgaccaaaatgccgaatagattagtccagccgtacaggcacagctagacgaactaaaaaatatgttccaaggcatggctggacagagaaataatgatctcgagctggaccgagcacacagaactcctttctctcccgagatcaatcttcttgagttgccccacaagtttaaaatgccaacatggaaaatgtacacatgaatagaagatcctctttcccacctcaagtatttcgaaatgcaaatggatttgcaaggggtacgaggggatgtgtgttgcagaatctttcctgctaccctgtcggaagccgccctcaatggtatttcaagttggcctctggaaagttcggttcaatgcaagccttctcttcgaaattccatgcacagttctcctcctctcgccaactttcgttgcacctgggagacctggtttaagccaagcaaagaccaggcaaacctctcagagcatacatcagcagattcatgacggaggcgaccannnnntcacgggtaactgaagatggaaagttgtccccgatactgaggggcattaaattcctcggtgaactttggaaggatataaggaagaacgggccagtag

SEQ ID NO: 143567 - DNA, 907 bp, Cannabis sativa
  modified_base (78)..(80): a, c, t, g, unknown or other
aatttatcataaatataatattcaatataagcgccaccgtgcatatctctacgtgcaactactgtcttacctgatgtnnngcaaacgtggagattctaaatccacaggtgctcctgaccaagtgctgataatcctagtcataatttccgggattcacaagtataggattaatccctaaatccactttcacataatataaaattgacattcaatatacaaataaacatatagagctcaaagcgatctttccaacgatataaagaacatccaaaatggagtcccgagtcaaaagttatggccgaaacaaaattcagccttccccgatatagtccaaccgaaattccagttggaacagccttgaacaaactggaattccggttgtctgagcaaaaaaacacgacaaatcttaacttttaagcctccataacctactcaaattttctccaatcaccacaaaacttgccagagcatcaacatataacatataaacatattttacaactcaaacacaatcattgcaccaagaatcaaaaagtgccattgttgagcaagctttgagttcttgaactcaaacttgctcatccacacaattaaacaataacaatagctcaatcaggtctaaatcttcaacaaaacaagcattctacaatcagattaacaataatccaaacaagctcaacacttgagcaaaattcaactcaaccacataatcaagagcttgaatatcacaacaagctttactcatccaaacaacaataaataggggtaaaaagatcacactttctacctctgaaaataaccgtaaaaactcactaataaataaagatgcatagcccacaattaaacaagttcaatcaacaaaataatcatttataaactccagtccacttcacatgcatccaagaac

SEQ ID NO: 143568 - DNA, 537 bp, Cannabis sativa
  modified_base (226)..(227): a, c, t, g, unknown or other
tttagatcttgtattttgtaaaagttaccatttagaccctctgttttgttaaataataaaatgaaccttatattttccaaaatggtaaaaatatgacctagagctcaatttttaacaattttactttttaatataaccaactttgatacaacttctaacacgaacagatacaaaaaatgcaactagttttattgtaacatctctagattggattattattaagttnnattttgataaaaaattagttcagggtcctatttgtacaattttagaaaatatatgatcattttgtcattttaacaaaatagagggtctaattagtaatttttaccatttgtacaagatctaaaatggtatttacccatattataaatatgtttttaccatttttcttctttctttcaagatttttcctttaactagtatattattgtacatatttctctttctccaagaattttagatgggaaatttgattaaatatgcttacattactttaaaaaatttcccctaaacttatacttaccaatattttta

SEQ ID NO: 143569 - DNA, 523 bp, Cannabis sativa
acaccccgggaacttgaaacaatgtaaatcaagcgtaaatctgctccaaaagacaccaatagacgagaaaatgctaactttaaagacccgaaacataggctaaatataacctaacagtgtggttggtgtgttaatgaaaagatgatatttctttagtttataacacttagaatgatgttatatgatgaatagaagctcaaccaacctacatttttgagtgaaaagtgagtttatataatgtaggaatgaaaactagtcgtctatagtcattagcacattttttgaggtcaattcaatcgtgatccagatttctgaattggttacaaccgggaaccagaattccggatggctaacaggggcaaaaggttaattttttcgaactaaaacgtgcataactttttactcgtctttctgatttcaaaatttccagttgcattctcttagttaaatgatatgtgatcttaaaaatcaatttagaaaatttagatatcattttttttgtgaaataacttgtcgcacaagt

SEQ ID NO: 143570 - DNA, 760 bp, Cannabis sativa
  modified_base (708)..(735): a, c, t, g, unknown or other
tgttatagagctggttctatttttgtttatatttgagacatctacttcttgtgtctttttcagtaactttttccagcgacggtgatttttccaatgacttttctaacgccgataaaatttccgacgcatgtgacttttccgataaaacttattattgtttacaaatatgagatttctatttttttaccaaaaatatggcataaataaacccataaccccttaggattatttatttatgccataaaaaagtaaactcttataattttctcatatatagtgtaatttgtactaatttttttgaattacatatcattattttgtaacaaaaatgaataaacatagggttttttttaatttttatacttgttaacattttttttttgcatttttacgaaattctatatagaaacccctattgcaactggcgctgcaacttaaatcgcaacaaaaaatcgtacagaaaccctattgcaactagcgctgcaactactttagaaaccgaaaccgtaaatttgaaaaaaaaagttaaaaaatagtatatggggtaatttcccttagatcatgaaatatataaaacaatatttgatatatcgtatcactgaaaatcgatataacgtagtaataaaattgtatacctcaaagaaattataataatactaaatgaatactaaaaaaatataggagtttttattgggttttgtgccctannnnnnnnnnnnnnnnnnnnnnnnnnnnttactaattaataaaagatcagaaa

SEQ ID NO: 143571 - DNA, 980 bp, Cannabis sativa
  modified_base (60)..(74): a, c, t, g, unknown or other
  modified_base (383)..(386): a, c, t, g, unknown or other
tattacccatgaatggataaaattagaaaaatttgagtttttatgcttaatttttctatnnnnnnnnnnnnnnntctcatttttatatcatatgggttgcaattgttctatcggtaaaaaaaaaaataaaaaaaaaaagctttttagcaagaaaaataagaaaagaaaaaattgaatttgagttaaatatttttgtatgaacatatttttgatatagtgtaaaaagagatattttttgatatattttttttaattaagtagtaaaattaagcatagaaattcaaatttgtgatttcattatttgttgttatttttttttttttttgaataacattattcgttattagatcaaaattcgatactttaatatttttaaaattaannnntatagttaaatttgtttagtaaccattcataggtacccattaagaagtgttccatatatatatatgctatacaattaataataaacaatattatatgaaaacttccctctctttacatcttatactatttccaactatgactcatgaggtatattaaaccaatagtaaatacatatcttctttcacaaattcacaatgtcaccaaaaattttataaatgtataatacttatattaaatgattgagattttgttggagtttgttaccattttttttttattatgtttggaaagattattaatctacatttaatagtattagctgttgacttcaataattttaattatttttatgttcattagatttattttttattttttcttatatggacgattttcggtttagttagtataatttagggatatgtggaatattaatttttttttaattatttttaaaaatctttacctgactatccttaaaataaaaaaaaaggaattttttctattttgggttaaaattaccttaaataaacatttatactaccataagcaaaaataaacatttatagtgtttattaatttcaaatatacta

SEQ ID NO: 143572 - DNA, 644 bp, Cannabis sativa
aaatgcaatttgaattgaattaattggcattttatttgataatgagaaatctgaattttatttggaaataaatgagtgtgaaatgataattatgcccttgtatgtatgaatatatgagaattggccctagggacattttagtcttttgaccttatttgatatactttgataaaaatagaatttttaggaaaaagaaattagaatttctggcttttgtatccctcacgcccgacccctctctctctctctttctctctcaaaccctttcttttagaaatcttgattttgagaagaaaatcttgaatctcggtttgctttgaagctttgttgttgtagaatcttgagatttgaggtaactttctttggtttaatctttaattattactgaatttaattgtaagatgagcatgaaaagggtgtggtgttcttgtttaagcatctttatagttttgatgtttaatcttggtaaatagagtgtgtaaagcataatttagttgtgatatatgtttattgaacatggaatgtgagtttaagtcagaatttatgagttatttattgagtttgcagctctgattttagtgttgttcttgagtttgtgttttgggatttgatgattcaaggtgtgagtttgaattttgttgatt

SEQ ID NO: 143573 - DNA, 540 bp, Cannabis sativa
tggaaacaagggagatttggatttaaggatcggctgcgatggctgtgttgaagtcgatcgtggcctgccttgcagacctttagtctcatgaacagcttctacaggcaaagcaacggagccaccccataaggtattgtcatagaacagagaagagatatgacccgtttgattgctccgtttactttaattttattttaagttattttctaatataaatattattaaaaataaatggtatagttttaaatttattattattttaatttcttttataatttcagaaaaaaaatcaattttttttttattaaggtatcctctaatggagagggggcagtggccgggccgcggtagccgtttcagaccttgcctctccgcgacccgtttacatggaattatttgaaaagaatttcattttttttttgtacaaatatctattttctccaagtattttttttttttaaaaaaaaattgaaatagctctaattacgaataatctaattgaaaatggaaaagaaacgcttaattatgtgcataaaatct

SEQ ID NO: 143574 - DNA, 608 bp, Cannabis sativa
taggggctgttaattgggattcaatgccaagttcgatcaaatgatctttgaactgcatatccatatattctccacccctataagttcgcaagatcattaaagtcttaccgaattggttttgagccaatgcaagaaattcctgaaacttttcaaacgtttcagatttctaatgcataagttaaatgtgacaatatctagagtaatcgtcaatgaaagtgacaaagtactcataaccacctctagatttgacattcagtggtccgcagagatctgaatgtactatgcctagtggttctttggcacgctctccctttgtagagaaagaacgtttggttatttttccttctaggcaagactagaatacaagtaattcacctaagacgatatttttcaatggaccgtctttggttaacctattgagtccgtcatagcctatgtgacctaaatgtaaatgccataaatatgtttcatcaacattatcgatcttttgctttttgtcgtttctaactttagctaatttaaacagtttgttatgaagcacaaatggttcgtctggtcttagaacataaagcccctgttccatggatgcaacacaaatttgaatgtca

SEQ ID NO: 143575 - DNA, 533 bp, Cannabis sativa
aaaaaaaaaaaaagcttaaaccatcttccatattcttttcttctcaagaacacttcatatatatatatatatatatatatatataaataattatatataacactctctttcctaattaaacttagtgaatacatttggctacgtaggctgattaatctcaacaatatcaaacaaaaaaaattacatcttcattctagtttatcaagaatacaatattaaaaaaaatggaaaattttaacaaatctaataaaaacaagaacacaacaaaattgcaaaaacaacatacatgccaaatttgaaatatttcttcaatcttctaatttcttcattagattttttaacatgattttgcagtgccattaaattttcttcaataatctctaaccttttaaccaaatttatatcattccttggagttggtgggtcaatccattttgaaaaatggcactcaatctgaacgttactctttcaaaaccaaacaaaaacccattaacaaattttcaatacccaaataataccaaaaaaaaaaaaaa

SEQ ID NO: 143576 - DNA, 591 bp, Cannabis sativa
  modified_base (63)..(70): a, c, t, g, unknown or other
  modified_base (541)..(550): a, c, t, g, unknown or other
tattattattatattagttgctgaaaacctcggtcaacaaggatgttaatcaacatacttgtnnnnnnnnctagatcctggtaaaatattccaacactagcatgcttgatgactcgataaggcgtcgcatgtcttaggttatcgacgctgacaaggtatccacatatgcgactcgattaggacgcaaatacctaagtacgagacccgttagtctcgttttaatagaacgcatcctaagcatgcgagcttgtgcgagtaaatgaatagacaacttgtatacttggttgctgtatttagtgaaacagatttcaactgttcttcatttattccatttacgtttttctcaatttactgttaatatttaatgtaaaacaatttgataatcaattaagttctgtgtaaccaaaagtcacttgctttgtatataaaggagtgatccaacatgaatgagacaagacgaaaatccttgcagcagtggactatgttggaatttattttaccaggatcttatatctactcacaagtatgttatttaacaccnnnnnnnnnnactttctaaaacgataattaaacatatataaagttaagaaa

SEQ ID NO: 143577 - DNA, 901 bp, Cannabis sativa
  modified_base (633)..(633): a, c, t, g, unknown or other
ttgatttgtgggaaataggtttggcgaagtttgtcatgtggtgtatataccctctcttatttaagttctgttacttctctttcttcttctttgcaatcgactcctctgtcgaaagattatttaagatatgggacatttttcgttcccacgttctgcgtttttcactttccctctgcttttgctgcttttgagatatttgcacccaatattttcctaggaaaaccctttgaatttccatctttggcaaacatctagagggggcctctttttccagcggttagggggctctaactgctggatttcttccttttacagaatcaaatgtctacttctacatcaggaaccaaatcttcccacaagggggcagtcactctggccaccctggaggaagttatgaagggtcctgttgcctaggagaactacacttgccgatctaatggttgggaggcggatgagcttcgctcaaccttgacctgtgcccactagttagaaaagattgtgaccgtggttggcatcaagccgtctgcttctggggtttttcaccgttttcctcgagacgaagagacacccaatcacaactacagaggtttcggagcttggagccagatccatctcatgtccggagccatgctncctcttcaagactactttataaattttctagtttttgttggcctcgcgccttaccaactcattccccaagtgtaccgcctagtttcaggtttgtttatattttatgtagcccgaggctgggcttcacctagcccggctaaaattttatatttttacgaacttgtatctgtccccaataagggggataaatttaaagacggttttttcacgcttcgggcccatcctgccaatgagggcccgatcccttacaattttcaaaagaatgtta

SEQ ID NO: 143578 - DNA, 605 bp, Cannabis sativa
atataaatacataaaacacacacaatatttaatgaatatacattcatagagctgttgttgatacatattgttagtttttatggaactaaatcaggtaagcagcagaagattttgtatgactgattatcattgtaccatagcctaatagatctcgagatgtgtatacactactacaatttggacttttagtgaccctatttagtgacacgcacaaaagtgcgggtcactaaaaagttaggagtaatttttagtgacatgcacaatgagactctaaatatttggggttagtctcatgtattgtgggtcactaaaagtatggagtgtcattatttaattttttttaatttaaaaaatattggtctatagtgacacgctaggcgtgactgggtatttatgtcctgactcacttagtgggtcactatatcataattttaatttttttaataaaaagtacaactatttttttaagaagtacaactattatagtaaataaaaaataatttaaaaaaaataaaaagagagtttatttttttaaaaaaaaacaataaaataaaaaataaactaaaataaggcaatattgctgcctctctctcttcagtaaaaga

SEQ ID NO: 143579 - DNA, 1097 bp, Cannabis sativa
actaagcgggctttacacaaacctaaacccgtaatgggagctagactcgaacccaaactcgggatccaaaccttaacctaaacatggacctagaccgagacctagcatccggaccttgatgggggacctaggccccaaactcgaacatagacccaaacttggaccaaggatccagacttagatgggggacttggacccgaaactgggctccggaaccgggaccaagaccgaaaactcgaccctagactcgagacacggtttccaaccgtgcaaacgaacgcaaaccaaaacttaggaccccgcccaagacccgggacccgaactggaaaaagaccgagatcagaatccaaacttgaggctttcacctgacccgtagtcagtgtttgaatccaggacccaaacccagaccatgatccaaacccgatccaagcccgaaatcgaaatcggaccaggtgttggactagaacctagacctgggacattaacacagcccaaacctaaacccaaacttagaacagaatccatactgggacttggacccggacaaagacctgtgacttgggacctaaactaagaccgggacctaacccaagacccaaacccagacccaaaaactgaggccggacccaggacctaagacctagactcggacctcgaacccaaaactcagacccacacttggactgggacctaaactcggacttgaacccaaactaggacctagacttagaccgagactcgagactcaaacccaaaccggaacacgaaattggaccctgacaaggacctaggacttgaacatagatgggggacccagaccagggaattgggcccccaaatcgagaccagaattgggccttggaacttggattaggatctgggacccgaccccagacccaaacctggacctaggaccgacctcgggacctgggatctagggctcaatgcttggacccgacccgtaggcggtgtcttgatctgggacttagaccagaactcgaacccaaacttgtactcaaaccaggacccgaacacatacccagacccagacccacaccagggaaccaaaactgaaactacttccaactatccagcta

SEQ ID NO: 143580 - DNA, 975 bp, Cannabis sativa
aaaattaggtgaaatttatcataaaatataatatgaatcatatttgcaccataataaatatcacattatttatttattcatttactatttaattttattaattaataaaagctttttaacaagatttttttatatttatttaaatgacttattttatataaatatatatatataaatatttatattgttttcaatgaaaatttaatatttatttaaatgacttattttatataaatatatatatatatatttatattgttttcaatgaaaatttaataactatgttgattttgatagttaattggcagcttgtgcattagagtacataattattaaattcttgcgtgttttttattctaaatttagataaaattattacaccaactccagtggttttagttattacatttacatatatagaacaagaatattatttagttagttaaggggcgtttggaatgaagtattcaaaacaatttgattataggatatagtatgaaggaaaatatgatggtagagaaatatgtaaattgtatttaattgtgtatggtaatatgtaatcatatttccattaattgaattatacagtttagttaagtacaagaattttatatattatatattttaaaaaattaaaatgaaaatacttttttattatatttgtttaatgttaattatacataaaaataaaattattattcattaaaaaaatacataaactaattaataaattttattatatttattattaattaaaatgattatttctatatattttatcactatattatttatttttgttcgctatgttatttgtacaccatccgtataaaatttagtataatttatatatatattattgataataacatagaaataacacagttaaaaatataaaattaatctcacagactaaatatatatcgtaatatttttttggggaattaatttttctaattttttttttcaaattta

SEQ ID NO: 143581 - DNA, 912 bp, Cannabis sativa
  modified_base (861)..(866): a, c, t, g, unknown or other
ctttctcattcaaggtttcattacgtgatttccaaactcggtttgaagaactcaccctctcgtttgaggggtgatgttaagatttagttaattgtcattagttgttaattgctctgttttcagtgctttttattaagatgtaaatcaacctttattttctgttattccttgttcccttggtgccaacattagggccacctgttatactctcatttgtcattgtaatctctctacagagtataaatacaatatgatttacttagaaataagaatcatagattaacgagagaaatactcagaaatcattgcaaaaactttcaagagagatcaagaacttttttcttctcttctcacaaatcaatacaagtgaaagggtagtaggctattaccacaattatggggtcaaacctctataacaaccttggtgttctctttgctttatctttattattattatcatcgttattatttaattaattattatcgctttaattgactcattgtcgttggctaaaagtgagcttaagagatttctatgatttaatgggggtgaaatattctatgttttggatgctcaacacgcttcgtttgtgatcaaaaatcaagtctgaagcttcaagctaattttttactattattacttcactttgaggaaaactattatgaataaaattactagatctttttttcagcttcctagaacatcttgaatcgttcaattctgaataatatttaaagagttatggccaaaatattattaatcctcatactaggaagcttgctgcccaaaaatagccttcaagtgtcgcggcatggaaggtcaatgtcatgacccacttgttcggttttgtgccctaaatnnnnnncatttcaatataatcaaataaagattagaaatcacattttatgttg

SEQ ID NO: 143582 - DNA, 767 bp, Cannabis sativa
aatgagaatcactcgtgccatgaagtgatggtagagtactaggactacatttttttttaattatttatttaatctttttgatgggatcaaagactacagggcaagatatagaagaaatgtgtccattattaataggaaaatactattttttttgagatggaaaaaggtatatagtagcattggattggtccgtcttgaaactggcataaataagtatgtgtaaataatatttgagacattttaccttttgggtattagagccatgtgatatgacttatacgagtcaaacacaaatcaaatgcacaggaattacgcctcgttttcttcctttacacactaatttatcaattatctcgtttcccactgtttctcattattttattacttacttttcacttatagccggctattttaaccagctactaataatgtaataatcatcataatactttcttattttattatttaatatcgttgtagatcaatttatgtctcctcattaaaaaaattaattgttcttttatagagatcagctctcccctttcaaaaaatatagaatatatatatatttttttgaaatgtagctatttttttttcttagaatatttgagaaagaagaatgcaatcatcaatcttttaagagaataatcacttgaggctagttcaaatgatcatagaaaggtacttgagtgttagaggtatagggttcgagtctcaagttatgcaatgtaatatataaacgcttgaatctaaaaaaaaaaaaaaaa

SEQ ID NO: 143583 - DNA, 638 bp, Cannabis sativa
  modified_base (323)..(323): a, c, t, g, unknown or other
acataatagaaaatcaataattttttttcatattttctttttagaattagaaggaaattatacttaaaaattatgatatatatatagttttgttaaaatttttattatttgaaagttatttcgattcgtttaattttttatgagttgttgtgggttgttggtatgtagattttattgtacagtatatttttgttttgttgtacagtatattattactcttagatgatatttattttttattttgctatatatgtataatagttatatatcatttcaaaaaaaatagttatatataattttgttagcataatacaaatattttnatgtatgtatataattttattgacatgctatatatatttaattattatatttatacattttatgatatatatatgtattttaaatgatatttaggcaaaggactcggtcccgcttgtactacatgcggaagaagtgatgcactgtcacatataataaaaaacaatatttttctttttcactttacatattttgacacattttggactcattaatacaacctatactttctaaagccggtttatttatttttttatttgtattttttgtcattttattggacaatttagtaattttatattataaatatttttttt

SEQ ID NO: 143584 - DNA, 572 bp, Cannabis sativa
  modified_base (271)..(277): a, c, t, g, unknown or other
tttttaaaaagtggacatttactaacttagttaccaaatttagggtcattttgcatctcaacccaaaaatatatatagggtttatgaccattgatttctacctcatactatgggaaggttttgtggcccaattacaataaaattagaggaaattacattgtatacccactttgctttacttgttttaatttttacctccattttcatatttttttagatatacccacttttatggatgatgtctcaattagaccctttaggttatgtaaannnnnnnctagacttaagtagagagtgaggatatattaggcaatccactcaaaaaaagtagatatattataataaaaaaataatatgagggtatttttgattaatggatacaaaaaaacggtatttttcaacttattccataaaattacttgatgtcgcatgttatgattgtgcatatttatgaatgtgtattttctatttatttttgggataattacacaagacactattttttgtaaaaaaattacatttttacgttttattaattttttttttttacattttcacagtttctggtaaaa

SEQ ID NO: 143585 - DNA, 590 bp, Cannabis sativa
  modified_base (27)..(33): a, c, t, g, unknown or other
atatttcacatataagtcaaataatannnnnnnagtttaataaaatctctgaaattgagaaattataactctaatactcatttctaaatattggggtccacaaataattagtatcataaataatcataaaagtaaagaaattagtgctaattgcctttactaatccaattactaaagcggtcattacataaagtcttgggaactttagtcgtggacataaagtaattggggatactctgtaataccaagccaaccaaggttgttctgcctgcttgagacaaacattttgcttttcaccctccaaacgggcaacaattttttccctaaggaattggaaatcccttctctttctagcaatgaaaaagaaagggttcccaaggtacttttcattgtgacctagcggattcatctctaacatattctttatttcttccttactcctcagctgagtatttagagaaaaaaccaactcgcttttctgtttattaaccatttccatttttcgtactttgtaatacagtccgtgaaagccacaacattttgaagattagccttacagaagaatgtggcgtcgtcagcataaaacagat

SEQ ID NO: 143586 - DNA, 577 bp, Cannabis sativa
  modified_base (516)..(518): a, c, t, g, unknown or other
tacatttttataggttaccccctgttatgaaagcttataatcttttaagcattgaaactcaagaaatcattcaatctagagatgtttactttcatgaagatatttttccacttgccaaaactacatctcctgcatctataaatgaattattctcactttccttaaatccttctacaggatattcacatactccctccgaggacacttcacatgttcccgaatttgatagaacttcatcctctaacaattttcctgtcaccaacattactcctgatgaagtaccatccacacccaagaacatatcaactacttctcctatcacttcaacaatgggaagaattttatctaaaccaaaacgttcctctgatcatatttgcaataccactgctgcttcttctactgctcaccttattaataaatatttgtcttacaaggttgacacaacactttcgagcagcagctctcgctgcccacacctttgtagagccaaccagctacaaaatggcagcaaaggannntatatggcaaaaagctatggatacagaaactgatgctcttgaagccaatgacacttgga

SEQ ID NO: 143587 - DNA, 938 bp, Cannabis sativa
gagagagagagatgagatgagttatcagacttagagcttaaggcttagggtttttagcttaggattttagggtttgcttaagtctctttatataggagagcttaaacccctttatcatgtaaaataagcaaatatttacatattaaattagtaaatataaatgactgaaatgccccttaaaactagatatttttcctctatctttgtgggctattaaggcctaattcgcagtctattgctgtccacgtgtaatgatgtgcactaaagtcctgcctggccaaattttagcaggccatgcatttgtaggatgcaggctggctgaccttgtgctatctttatcttaacaacttttatctttttccatatttaattaattcattataaaaataaataagtactattttgccaattcaaaatagatttttccgaaacaacattatagaactctttatccctacccttgacaatatttcaaagtggcgactcgaggaccatgggcctataattataagctccaataaattatgattactccactataaatatagaattgagctcttagtaattatagaattatatttactgaattttattgcagtgtccattgatataatcaatttcaataattagccctttatgtgttggttcgtaattagttttggtcaaattactgttttacctttctaattatctctttatcctttagtaccattaatttacaagtggaagtataattcaaattccatctgaatttgtgtgcaactttctagtactagaattaacacataaagggaaccaatattttatccgttaggattctataattgttgatcatgttcctagccatctatattattagattctcaaattagaagttgtaagaatcatcttctctgagaaactttaacgagtgtatcaaagaaactaataacatgaac

SEQ ID NO: 143588 - DNA, 613 bp, Cannabis sativa
atcctgccactccggtcgggtagtatccttcgtaagccactatttgggcttcttctaagttgatgcaattttggaccctcttctggaaatcttggagattcgcagctccctcttattgtaactcgttccagaacggggttcctgtacggatcttggcttgaagaagtgcaagctgttgtctgtcatcaactttcttagtctttgaggcttcttctttgaacctctttatgacatttttcaatgtctctatgggtagttgcttgatgttagtcagggcgctaacttcaagattaatcttcctcgcggcgacgaactgtcttcggaagcgaacttgtaatttgtttcaacagtccacaaatcctggttccaactttctgaaccattcctccgcggaaccgcttaacgttagtggaaaacataagcacttagcatcattactgactctcatgaccatcattactcggttgaaccgggacaaatgatcgttggggtctgagtcctcggtgtaggctgccatttcgggcatctgaaagttttggggaactctacctctagaatgtgtcgggtgcacggctcccggtcctcacagtcagagtctgagtcatcccccttt

SEQ ID NO: 143589 - DNA, 658 bp, Cannabis sativa
acctcaagtgttaaatgaggttttacataattggcctttaattaaaattgaataattgaatatatataatattaatatattagaaaagatttgcattttaattaattataattttgttattttaaaagttagtgtaattttttttttcttttggttaagaaatttaaattttatgttaggcatatttatattaatatataattttttaaaatttagtgtgataatgtatttataattaagaaagtaatatattaaataataatatgtgagatcataataattatagcatttttgaagagtgctataccatttgagtgtttttagaagtaagagtccaaaaaatgatgtggaagagagataaaataaaatattatatttttggatgatgtggatatttttagcatccttaaaggatgctaccattggagatgctattacacaatgctcataacactctttttcaaaaaaaaaaaattatatatattttgaagggctccaaaatcaaatttgtcttaggcccataaattttcaggatcggccctgctgatattaggggtgttcacaaagtatccgatccaatccaatccgcccgatccaatccaatcaaatccgccaaatgcggatatccgcacttgcgcggatcggattgtattgaaaa

SEQ ID NO: 143590 - DNA, 703 bp, Cannabis sativa
ttgggaagcgtgcctaattatttagggcgttacaacatgtcgtgagctattgtgttggtactgagaatatcagagaatatggcattggacaaaaaagtagttgccttttggtgattcacacacctgtgtttgacacatcctaacatagtggggtcccgtgtctagaggacgccacgtaggatgatatatggaggcctctggatatctcttcaattacccgtatccagattacccatgaaagcatccagatagatcctgatggacccttctccttctgggccaaatagcatttctcggatcaaagtggtctgaccttgtcgcgtctgtaagttgaatttacatctgtatccgaagctgcaacttgattccgtaattgagttgacttaatctgattgggctctagaaggggcctactttggttgatattggactttagaaaatgcacatgccactaatctgaaaacgggaataacccttatattttaaattttagtatgttttaagaattaaatttctcaaatgtttttctacacgtcttaaacgagtagataaaaaaaatcaccttgagtaaaacattaaaccttttgtaagaaataaattttagtaggggtgtttatcgaaccgctcaaaccgcccgcactgtaccgcaccgcaaaaaaaaaatacagtttgaaattctttgtggtgtggtgtggtgtggtgc

SEQ ID NO: 143591 - DNA, 552 bp, Cannabis sativa
tagtatagccgacagttttaaaccgtcgcctgtagtattgccaacagttttcaaccgttgacaattctcatgcttcaactttacgcgttttggatctgaaatgtcatttcccgcaccttcaatttcaaaattttactttccatatcttaaatttcatttccctcttttaagatataacccccccaaaaaaattatatctcatttttcaaagtcttttgtaaattttatttcatttcccgactctctctcctttgcgaccacgagccatgtcgtccctcctctactctctctcactttgtccctttcctccgctctctcgtggtagcataaaggtaagcacaacattttcttattttttgtttaaatttctattagccatgatttggtttgttgatattgatctgtgtgtgtgatcgaaataaatccaaagcttgcaatgcgaagaaagttttcagggatcgtcaagtgaaaagtaacccaaaacttgtaaaagaaaattttgacgaggatgaagacgagcacaataatggtggaggaggatgaagcttgtaa

SEQ ID NO: 143592 - DNA, 831 bp, Cannabis sativa
attaatcaaaaattagccaatgcactgatcaattaataaaactatcataggttatctaaattaaaatgacaaatttgaacttttttttatgtgagtaaaacatgtattaattttttgttgtgactaaaaattacatttagctacaaaaaaatttatgttgtgattataaagttgtcactaagaaaaaaagttcaaatttgtcattttgttctaattttggtctaatgtacataatattatccagccataatttaatctaggacatttgggatttttatcaaaatgatagtactattagaccaaaattatatcaaaaaataatgttatgtaagtacattataacaaagttgacaaaacttattattagtactacacctctcctcctcttaagtatatcgttatgtatgtacaatattatagtatattatatattaacaaaaaagggaattttcataaaggtttttaaggtaaaaatttgtaaaaatatgggttttttttttttaaaatatattatttttttggaattttttttttaaaaaaagttgaaaaatatgagaaaagtaattggttacccctatagttacgctggttacttttacctaattttttaatatttgtcaattttttttttttaattttttccataaaataactttttttcttaaaaaaaagaaaagctatatttttacacaaaattataaaaacccatataattaataattttctctaaaacaaacaaaaattacaatgaggaaattacactctataccttttttatattgtcctctttcatttttaccctcttttttaaagtctatcatttttacctct

SEQ ID NO: 143593 - DNA, 622 bp, Cannabis sativa
gagttgatgatgatgtttacatgaaagctgtcgagaagttcaaagattcggattggagagagatttttattaatatgtctacttctagaaagtaggcttggttagataggctttgatattattatagtttgttatgctaagatgattattgatacttatttttttttttttatattattatagtttgttatgccatgatgattttaactagtacctctttctttttatgaacatcggatgcttttgtttttgatttcaaacattatatgtcttttttatatatctttttacttatgttctttttctaagttaatattttgcatgctaatatgattttcaggactaagaacgatcaaatggataattcttgttcttgttcatcttctacagatagcgatatcgatgacttttctaattttttaatgctataccttctgagtgattacaatgaaaaatttattgagaaaatccctcaacgaacatctgtttctattttaagtggagagaattttgtaaaacaattattaggtgatcatgagagaacatgttacgaattgttgcgaatggataagaatgtatttgttgagctttgtacttgttaaaacaaaaagaatacattaag

SEQ ID NO: 143594 - DNA, 865 bp, Cannabis sativa
  modified_base (806)..(809): a, c, t, g, unknown or other
atgcaaaagatttttttcgaccatgtttggctttgttttgttttgttttcttgttttcttgagtttaattgttggttttcatccatataaatcctatgtgtccatacaagacacagttttccattgcttatggacttagtggatgtcacgaccctacgcacacacgggcgccagcgatccatgcaaaagatcttttatgacctagtttggctttattttgttttgttttgttttttttttcttgattttaacttttggttttcatccaaataaatcgtatgtgtccatggaagctacaattttctgttgcttgtggactcggcagatgccacaaccctatgcacacatgggcgtcaacagttcaggaaaaagatcttttttgaccaagtttggctttgttttgttttgttatcttgttttcttgagtgtaacttttggttttcatccaaacaaatcatatgtggccttgcaagccccaattttttgttgcctgtggactcggtgtaggcgagctatcaatcatctcaacttgttccttttcacatatacttggttcattcaacagttccaccaatatcaaattcaattcatcaagttcattctgcgaggccaattttgctaaggcatcgacattagactattgttctcttggaatttgtttgattttgaaataattaaacttgtccaagttcttccgaaccttctctaggtattttgccattttttaagccctttgcctggtattcacctaacacttgattcacaattaactgcaagtcactattgttggaatatgttttaccagnnnntagatttactaccatgtatattatttaacatcctaaatatgaatatctaaaacaat

SEQ ID NO: 143595 - DNA, 755 bp, Cannabis sativa
ataggcggttagatgggattataagttaattatctggggcttcctcttttcagatctagacaaaaggatgcagactttaactttattctggataacctaacttcaaaattgcatggctggaaggccaagaccctatttaaagcagggcgagcaactcttatcaagtctgtcggattatctcttcctttgtatgcaatgcaaaccactaaactctccaataaacttgccgctaagattgatggtttggtgcgtgatttctggtggggttcggagaaaggtaatcatggtctccacctaaaagcctgggacaaactttgcctccccaagtctcttgggggcttgggctttcggagatctaagaaatgaaccaggctttcctagccaagtgggggtggaaccttctgacaggacaccagtcattatgctatcctatacttgaagccaaataccttaaaggaaagtcttttcttgactacgagccgaaagcctcggactcgtggttctggaagaatgtgactaaagcaagagaaatcatccgaaaaggtgcttgcaagcgggtggtcgatggcctggatactaacatttgggtggacccttggattccgcacttgcagggatttaccccccatcctattgggcggaataggaatagggaaatgaaggtagctgagcttcttttggataatggaggatgggatcaccaaaaacttaacagtttgtttgatcaagaaactatttcagccattctgaaaggg

SEQ ID NO: 143596 - DNA, 815 bp, Cannabis sativa
ttggtccaccatcactgaaaaagtcatacaaaccaattgtaccaacttatgtccctcctctaccttttccaagtagattgaaaaaatcaaagaaagaagagtccatcaaggagattcttgaaactcttccaaaaattgaggtaaaaataccatgtcttgaagaaatcaaagaagagcctcattgtgctaacactctcgaggagttgtgtccaaatgagataaagttgaatggtggtgagaaagtaagtgtgggggagaaggctaatgtagttctccaaagaaagttgatgtaagattgggatcaccctcatcttccatctcaattatgtatgaatcacctggaatgacaagtccataatcttgcacaaaaacatctttaactatccttaaaggataagcattagtttgattagtcaattgaataaaaacttgagtttttcttgatggaccaagatttacaaaattagaataagacatattattaataattgctcctaaattatcatgcaatgatcaaatctggctttaccaattgtgcatggaattgtacttgtttcaggcaacaagtaaaaataaaataaaacaatagttcgcggcaacggcgccaaaactttcctgctgcgatgactggtagtattttgcccataactctctcgatattactcagaattggacgattcaagatgctctagaaagctaagaacgagatccaaaacttttatgttgagtaccaagtccaattctgcatctaaggtcgtatgaatttgcaattaagttccgccttgtacaatcgagctcgccgacttccactattt

SEQ ID NO: 143597 - DNA, 1019 bp, Cannabis sativa
tttaaatagctaataaataattacataattaatcatgattaactgctaatttccaaattaaacgaagcggtctttacatagaatctctataacgcttagggattgaagaagttattgatttatttagttcaaacacttttaacttttaactctaaactatactcaatacacaatagaatctctatgacacacacattttgattagacatggatataatataataaacgaactagcaaactaatagaacatatttttcatcctataagtgttccaataaacatgttactatcgtaatagtaactagacaccaattcaaagtccatggacatagaatcacactactttatcctagttggaggattttaaaattccagccaattattatttggaagacactagtgatagtctactatgatatgttcaagagaggaaccttagaataaaacaaagaaaagttaatttaaccattcacatgaatagtaataacttatcaaaattatgagaataagataggaaatttttgccatgtctattcgaaaaactgaagcacaatttctagtccttatgaaatgttttgtggtatctatagggattacttaatcttaagcaagtattttacatttatattaatactagaatgctattttgatgacttagtctaaatggaagttattgtttcagactaagacaaaatgtcacaacaaaaggtccctaagcataaatagtaggaggttaaatgcacacttgtgtatgaatttaaccaaactcctagtgttgagtgggagccatctaagatacaatcaaacaagaaacattgggagacaatcaagaaagattctcagaaagtgacatatattttagatgataggggtgtatattaaatccttatatctataaaaaaaaatcggtacttattagagatggtgcttactttggtagtggaggaattattatagaaggatgtaataacccatctataataattaagttccactagttaagctaaataacttagttg

SEQ ID NO: 143598 - DNA, 624 bp, Cannabis sativa
atgtagtaggttcgccaccaccacttttagagtgtgcccacttacaaacactccattcctaccttcaaatgagggatagagcgaaccatattctatgcctccttgtagagaggaggaatagactgaggctggcctacgtggccaattatcgaacatacgacctatatccccccgagtctagagttacgagtgtaatgccctgatactcaggaacgccatagtaattttttttaactatagtgcaatctttgctaatcaaagaagtttccttgaaaatcgtgtgtaattaaaattttagatttaattattaaactttataaacttttatagatataattacagaagctaggatcccataattaaacttttatagaatattcaaaacatatttagtcaggtcgcacaacgactacaaaataaaaccctagatatctcgagaccgaacactccaggttgcgccgccatggcatgtacaacatcaacctagcctgaggctcactcctattcagcctttgcctttcctttacgtacacacaaaagtagaattgagtcgagagactcagtaagaaaagcatataacaaataatgtaatactgagttgtatctaggcgcctatacacctat

SEQ ID NO: 143599 - DNA, 547 bp, Cannabis sativa
aggttgctctattggttgttatgtcatttttatgcgaatttctataaaaatacaaaaaaaaaaaaaaaaactttaaagtgtaaaaatgaaaaaataatcctaaaaaaaacaatactttttattattcaatactatttcatgatagcattaagcatcactagtacctaaaacactcatcataaatatatattgaataatttgcggtataaatattcaagtcaagtttaactctcagttgcaaataaatacttaagtttaatttttgtaagtaataatatcaaaattataattctagaacttctgtaggtacatgactattaaatattaagtaaattatcatatggcaatctgtgatttgtccaagtcgttaaatttttattttttatttttaaaaaaaaatagtttaaatatactaataaaaaaataacatggataataaattaacggtcatgtacctacagagttttaaaaatataacttaaatattattatcgtcaaaaattaaacttaaatatatatttggaaccgagagttaaacttaaatatt

SEQ ID NO: 143600 - DNA, 653 bp, Cannabis sativa
ttttagttccaggaggacgctctcgtgtggttggagttggtgtccgtcactcgggatgttagtgtaatgacctgggaggagttccgagagttattcaatgccaagtattataatgaagctgtccacagtgctaagtggaaggagttcacagagttagtgcaaactgaggggatgtcggttactgagtataccccaaagtttgaccgtttggccaaactccccgtgggtatcgtgctaacagtttcagtaagaaaggaaagtacttggctagcttgaatgtgaagattaggcatgatttggtgattactactaatgaagcaacaccatatgtagagatggttgaaaaagctctgcgagccaagggtgcggtaaaattccttcaagagcccctagtgactccgaatgatggtgggacccccacccttcctactcctgtttatggtagggatggtggtgattccaccactgatcagaagaggaaagttaccccagcatctggtggtttgaggcagagtaagcggtttcgtgggaaccaacgaaaaggtggacgccaaggttattcttaccctgagtgctcacgttgtaagaaacatcatcctggagagtgcaaccggaagacatgctttcaatgcgacatggtagggcatttcaag

SEQ ID NO: 143601 - DNA, 560 bp, Cannabis sativa
aaatagagttttatttagggtacaaagcgcaacaaactcccacttgcactaacataaaacaatcagtacatttcaattaatcctaaattaagtctgtgcttttcaaatgtagttgcagtgaaaactttagtgaatggatgaacaaagttgtattcagtgtccactttctccactagtacgtcccttcttgccacatattctctgatgatgtggtatttcctctctatgtgtttgcttctcttgtggcttcgaggatctttactgttggctatagcaccagtgttgtcacaaagtaaaaccagcgatttttccattctagaaataacccctagtcctgagaagaactttcttagccaaacaagttccttagtagcctcagcggcagttatgtactcggcctccatggtagagtctgatattgcggtttgcttagcgcttctccaaacaactgctccacctccaagagtaaaaaccatcccagatgtcgacttttagtcatcaagacaagcctggaaatcttagtcggtatagcctatgggatttaaagcaccatccttgta

SEQ ID NO: 143602 - DNA, 839 bp, Cannabis sativa
aatctccttcttggcctctggaagcaccggaaaaggtggagtaggggcccgcacctatttgggttcacttttgaccagctcagacccacacttcggtagttcagacctgtccgagcttcctccccttagacttaacatcttttggggtagaggggtttgcagtcgttagctcctcagaaagatcaatgacctccccagtaggcatcttttccttagaagaggacccctcaccgcctttagacttcttggccggaggagaagcgctagagcttccgcccattctcttcctcaaagcgtcaagcatctgccgagacatgtctgtacggaagaaaaaacaacatggttagagaaaacagacatcaacaacatgaggcataatagtcaagaagctcaagaacaagacgaagtggcatgcaaagtgattgcccaagtaaggatcaaaagtccatcagcacctgacattgctcttatttcagacataacagctttcccttttccgagcacgggaggggacggccgagcaggtgagatgggctccgttatgcgaatcgcatgttcaacaggcctgggcagggctagaagtttcttcctcctcttgagcggagtcacctgctcttcctcagcctcatcttcaggatttaaggctcctgagcatattgcttggcccttgcacctcccttcaacttagcttcgcgcttaagttgaatgagttcatcctcctgatgagctcgttcagcctttccagcatcaaatttcctcttcttccccttcactgggttgggaatgaagtcctttggatagagcccgtacttcacaaagttatccttggaggttaactg

SEQ ID NO: 143603 - DNA, 517 bp, Cannabis sativa
gagaagcagagaggccctttcgccatttttggggtccggtctaggatttaagacgtcaccgttttaaagatccgagaaccaagaataaaagctttggttggatgaaggacctgttaaattatgccaagtaagcaagttttatcgggagtcaaaattggaaaccacgtgtattaattttattgcctgttgttttatgtcaactcgttcataaacaagagaattttatttttttttttaaaaaaaataaaggaaaattaaactttattaaccttctgactctgtcaccaaaataggcaacagttcagtagggatgtttcccatactgaaagtacaatcaagataaaataaagacgcccttgcaaactcatgagcgactctattagctgaccgcttaacaaaacaaaaataaacattgcttaaattagccaaaatggctttacattcctgaatcacacaaccaaaataagaagtcaatctagtcgagctccttaaagcttgaatgaccagaaggcagtcg

SEQ ID NO: 143604 - DNA, 904 bp, Cannabis sativa
tttaagtttgatccccaatacattcccaagagggttggtgatgttgtgtgttctgatgaagttaatgatgaggtcaaggtattaaaaaccggtttcttattttattttgtttgtgtattttggtaattatatgtatatcattacttactttcatgttttttttgtctaatatttaggattctcatgaaaagttggaccagatttgtattgaactgattctatcaaagagtgtcaacaacatattaaggatggtatttctagtttgaggattgggtttttgggtgagtattctaaattaggataaattctcaatgaattgaagaataagagtgatgacagttctaaggattctgaatgtttttcatcccctataagagaggtaactagtttgtttgttttgtgttatttgattataggtttgttgtttttggtattattatagtttatttttatcaatttgttgaaacaagtttctgtattggatgtgtgattgtatgatttttgacagttagttgaaactggtttctttattgggttgggttgagatacattttttttcaatttcttgaaattggtttctggtttgggttttaggtatctgttgttgtgttattttctgtattaaaccagtttctatatttatgtttaaaaattggttttcaattaatttattgttcaggcatactatcaggatatatcggatgatggtggtgggttacagttgtccgtacatactggtcaagctgaggtacaagcttcttacatttatttttcgcttgttcaaattttattgttttttctaactatttttccttcaattttttaggaggaaaatgacactttgaattttgaaaatatgtttatcgatcctgattttcttaagggtgtggttgatagcactgtt

SEQ ID NO: 143605 - DNA, 673 bp, Cannabis sativa
tccatggatgtcactttctttgaggaacaatcttattatcccaaatttgtagttcagggagagaatcataatcaagaactaaaaaattagaactttgtttcactcattgatcctaagaacacccttgctccaaaaactactcatccttctatttcactcacaaatcctcattattcttcttctgacaacaccattgcttcaaaaattcatcatctgtctgatactcatactccaaactatttagtcaaatcacatgagccaagaaatcctcacccaattccttccttaagtcttgttcccatcaatgaggaccgacctaaccattcagccaatttacatgagctaaaaacttctcatccaaccttttcaaatcctgtccacatcccaaacacagaaatctagttttattcaaggaaaaagaagaatctagccaacattgaacaagctaccactcaaactcatcaaagtcatgaatataatctaattccattcattcttgaacaaacataggaagatgctcgagccgaacctattgtggaagaagatgtgtctggcgatctaagcattcgcattgctctcaggaaaggggttcgctcttgcactcaacatcccattcacaactatttgagttactcaagcttatctcctacctatagagcttttatcaccactc

SEQ ID NO: 143606 - DNA, 734 bp, Cannabis sativa
  modified_base (513)..(520): a, c, t, g, unknown or other
cgggctcttagaaggaatagttggaaccttatgcgaactttgaatgaagaatcgactctctcttggtgtattattggtgatttgaataatgtgctgagtcaagtggataaatgtggtggaaatccctatcctaattcacttcttgaaggttttcaacaagcagttgatgattgtgatttagtggacttggagttggttggtcatccgttcacttgggagaagggtaggattctgataattttattgaggtccggttggatagagctcttgccagttcggggtggattgatttatttcctaattctcggttgattaatcttctgttcaccacgtctgatcactgccctttgcttcttgatccttcctttcgggttccatctcggtctggtaaagctttctgttttgagaatgcttgacttcgtgaagagaattgtttttccatcattcaggaacaatggggcagctgcacttctaacgacattgttgataagattgtggcggttcaggaacctnnnnnnnnttggggaaatgatttgacgggtaattttaaagagaggattcaaagctgcaaaagaagaattggtgcactgaagaattgttcagatgatacatccctttttgagtaccgtgctgcaaagaatcagcttgctgagatttatcatcaaaaagaaattttttggcgtcagcggtctaagcaattttggttgaaagaaggggacagaaacacaaaatat

SEQ ID NO: 143607 - DNA, 772 bp, Cannabis sativa
ccaatcaggggaaaccgcgataaagtaccataaagatattggtcacactactctggagtgttggattttgcaggacgagattgaagaactaatcaggagaggaaaattcagcaaacacaagaaaaatgagtaaagtcatccccgagcggatgacaaagaagaaaatcaaaatgcgagtggttcgaggactcctcgcaatatcctgactactattggcggaccccatatcgcaagagattccaggaagtcgcaggagcgatatgcgagagaagccaaagataagccgctcaccaatgtgaacaacttgagagaacggccggagaagctgttaaaaagggagtgtgacgatatcacattcatggaaagtgatgcgagatgggtccaccacccgcattctgacgcgctggtcatcatcgcaaacattggaggagataatgcccaccgcatactcgtagacaatggaaattctgtgaatctcttgaattttcaggccttcaaacaaattgggttgcatgagaaggatctgggacctgtggcatcaagtatatacggttttactagagatgtcatcacattaaaggggatgatcaaactcccaatctctttgggaaccgcgcccgtagtaggtaagtcgacggctgacttcgcagtaattgactaatactcgacatataatactgtgattggtcgacctatcctaaaggagatgaagatcgtgacgtccatctatcatctcaccatgaagttctcttgtaataccctagaattaaga

SEQ ID NO: 143608 - DNA, 826 bp, Cannabis sativa
ttcaaagtttaatctaaactatttgattatatcagtagttataaattattatacgtatccattggtaaaatactgaattcctatcatattataagtgtcattatataacaagtaaaatatattctttttatataatttttattttgaataattagcatttttcgtctctctaaactttgagcactatttgattttgccccataaaatataatagttacataattatgcccatttttttaggttctgtttcttttacctttaaaaatttatatttttacaccgtgaactttgaccaatacaaaaaattttccctttttatttaaaaaaattattttaaaaattataatattctattttttcaaacaattacatattctattaattctgagaaataaaaaaaaaattataataaatttgataaaaaatattaaattaattaagatatattaattttacttaaataatcttaaatttttcgtattttttttttcaaactttgttattttataaacaagtataataaaaaatcaaactataattattgagaatctaataaataatttaaataaactaaatttttttgaagaaaaattaaacttatttatatttataaactcatatcttaataaataaagaaaaataattaaaaattcaataaaatataaaattattttgaaaaaaaagttataaattaaactaagaaatactatgttcacttaaacaaatctacatttttcgaaaaaaaaaaatatactcaagttttgttaccatacaaaattttatttttacaaaattaaattttaacatttattttaatatctaaatg

SEQ ID NO: 143609 - DNA, 540 bp, Cannabis sativa
tccaagagtaaaagttgtgaacccagagagtagataccggaagcttagtgtggatctggaaagctttgcgtagaaggtctagttgaattcagaaggtacttccagataatcttgtaccgtgtatgaaatgtctctcctggatggcttgtcactaatctagaggtatactcccagacagctctgtcaatcttgaaggttaatctaggaatgaagtcatgtacgtatatttagaaggcttatgttttacatagcttccagattgtccgtactgaaagcacatgtttcaagatgatgtggattattgttgctggtgatgagctggatcatttatggcagtgtaaatgtgccatgatgatttaggagatatatttttgcaacaatacaaatctatatatatagctataaatctttgtaacctgggtgagaatcagaaaagagttttttcttcagtgaaaattgtgatagtgtaaggtagagtttaaactagagagagaaacctcttctcataatctttgagaagtttgtaaagattcttgtaac

SEQ ID NO: 143610 - DNA, 527 bp, Cannabis sativa
tacacccagtacacgaagttgacggactcccaagagcgtgtgtactttgctactagggaaaatacacactatcggagaccacctcctttgtacaaggatagttcccggaggcaccctaacaaaagatgcgagtatcataacgacattgggcacagcaccaatgaatgcaagagtctgaaagatgagatcgaaaacttaatcctattgggacacctctacgaatggatcaagaatcagctgcctcatctcaatccaggtccggcgactggagctttgccacagggaacaccagggggtgcagcgggagtattggctccatttgctcccaccggagatgcctagcatatccccggtctaccacccagacctaatgggagagtggccatgatctcaggaggaccccatatcggaggaactacccgcaaagaattgaagcgttatgcaagggccgtgaaacacattgaggtttgggaagttactcaactcccagctcaaagcccccggctgatggatcaacccatcacatt

SEQ ID NO: 143611 - DNA, 823 bp, Cannabis sativa
catacatagtagacacgtagcacgtaggtatatatatatatatatatatataatatgtacataaatgcatgtaatattttctttttactatcttagggtgtgataaaagttgaaaattgttattagtatattttaatatataggttttatataaattaaaataataaataataagtgacataatgaaacatataagaaaaaacgatcaggtgatcaaattgtaattaagtatattattacacaaaagaaagtatattttcacttttaataacttacatataatggatttctgcacaaatatatatacaaagatatatagagaatattattatgggacactatctagcaccaataataactgttattagtggtttataatctttatataatatgtaaaatatgagagatttaatattgaattacgtacacaattaacgatattacacattacaaggtgctaattaagcccagcctttatcatttcacataaatataatatgtggattttcatgcctatggatccctaataataagagtattgttattagatactagtaggcttaacaccttctaaacatgtacgtcttatgattgattaacgatataacataaaagttattatataaaattatatgagacttgatacttactaatactaataacgatatttacacgtaataaagtattagatactaattccttttaatatttctctaacactaacgagaacacaacatatatataagatatgataagataagataatctttttataataaatattaatgtcttgtttagataaatcagacaaaataaattcacc

SEQ ID NO: 143612 - DNA, 728 bp, Cannabis sativa
cttctttaaatttatgataataaagttatagtgattttatgctatgcatgaaaagcatgcacgtgtagcatgttatagtaaactaaaatgaattattaattaagaaattgttgggtttatttgatgaattggggttagttacttgtaagctacttccatactgtatatgtgtgtaatataagtaatggggttggttagtaattaattaagcataaaattaaaatcttactagtggcaatctatgaataagtcttgctttagcattaagtccttcttataacttttattatttaaaattattatgtgcttagtcatatacgatgtggtcatattattaagttaggaaaagatttttataattattcttattattattgagtagtaatattagtagttgtacaattgcttaggaataatttttttgaagatatgatacacgtgggataaatgagtgaagttactaaagattgttagaagtttaaggaggatcgtatataacctactctagtaagcttgtatacgtgtgggctagagagaataaagctctcaacaattaacaagatcaaaactatttgtaagcttaaatttgattcatttagggaaatcattgaagctttgaccgaatagtctggggcttagttatttaattgtttaatttaatagctttataaagcttaaccatagttagatggcgatcgtggcatagattaagggatatagtttaaggt

SEQ ID NO: 143613 - DNA, 985 bp, Cannabis sativa
gggcgtcattggtaatgatagagtagtctgtgccactttccaatttcaagaagacggtttagtttggtgggacatggtgtccatgattcacgatgttacaacaatgacctaggaaaagtttcagtaattgttcaatgccaggtattataatgaggcagtcagaagtggtaaaagaaaagaattcacacagctgactcagaaggagaacatgagcgttactgaatacacgacttagtttgatcgcttagcgaggttggcctcgggaattatgccaaccgattttaacaagaaagagaaaatctggatgggttgaatgcaaagatcagacacgacttaatgatcactactgatgacagtaccacatatgctgatatggtggataaggcactgcgagctgagggcgcagtggagtgcaccttagagtgtcgaggaactccagttgttggcagggctcctactccccctacattaggctttagtaggggaggtagtggcttggccactgatcagaaaagaaaggcacctactgcatccagtggctcaagtctgagcaaaaggttccaggggaaccagggtcgaggcagtcggcagggtagctctgagacccgatacacttacccagagtgccccatttgtaaaagcaccatttaggggagtgtagagggcaaggatgttttcagtgcggtatgtcaggccactacaaaagagattgtccctaactcaagactgaagcaccgaagactacaacaaaacccactccagcaagggtgttcgcgataactcaagctaatgcagaagccagcccttcagtggtaacaagtcagctctcagtcaacaactcttattactatgtgccgtttgactctcgggccactcattcctatgcggcggctagaatttttagtaaattggatagaccgcacgatagttatgaatcagggtttggaaccgtattgcctggcggagaattagtcatctctaaaag

SEQ ID NO: 143614 - DNA, 1097 bp, Cannabis sativa
caaaatccataacacaggctcgtaacatatccccaagtatctcaattgtcctctcggtctgttcgttagtctaaggatggaaagctgtactgattttcaactttgcacccatggctcgctggagactttgccaaaactttgaggtaaacttcggatctctatccgatataatggactttggagccccatgtaacctcagcatactgatcgactataaatgttgttttcactggtagaaaatgtgtagacttagtaaatcgatctaccacaatctaaatagaatcgaacattcccgtggttctaggtaacccaactacaaaattcatggtgacatcctcccatttccactaaggttacaacaaccctgtaggtctctagtgttcaaataataaaataatcaagaatatattttctagtgtaaattttagtgttgtggttggggaattggaaaaaaatttaatattgtatccttttggtgttgatttaacactaaatttgggtttccccattggagttgcccttataaatagctttgtctacagtgtcccaccaaatttagtgggtactgtagaccacactattttttctttttaagtttttaataattaaataatactttttaagagaaaaaattaaataattatatatatttagtattaaaatatttttattatattaataaaataataaataatataaaatttggtgtaatttttagtgctgtgattggaataaaaaaaaatagcattgaaataataattttttggtgttgatttaacactaaatttaggtttattttaccattggagatggcctaagggtagtgctactcaattctaattgatagcagtttgttcactggggcagaggaaaattttgatcgagaactgtcagaggcacaaaaccagtcgtgaagttaatttgggtatgagcctttgtggatatttgttctataaatcattgagtatcatgtgaaactttcttatcctttgtcagtgtaatatccaaattaaaatagtatttaatttttttttctctccttgggatattaattgtgtgaggataattatcttatatatttgtgttgttagtgagtt

SEQ ID NO: 143615 - DNA, 658 bp, Cannabis sativa
  modified_base (259)..(261): a, c, t, g, unknown or other
tactttttgaatgcaccttcaactttgttgtagaagacatgtaggaaaccctaagtttagaaactctgcaattttcctttgtcatgggttcttgcaatttcacaatccataatgcttgctttctgaactgcataatgcctgtctttcatcacgcttattctaagcttcatgaaattttttgccctaactcgagaaagtttcaaactttttgagttttgacttttcgctgaacattcttattctttaatctgttgagtannnctggtcggcatatttgcttgttttaacgttcgatattacgaccaaacactcaccttgtgtgttgtcttttgtagatgaaaccagatgagttttgggagagcaaacatcgaatcgaccaggacttgcttcaattcttgcacgaggacaatcctcgtctctgttctagcccatattcttccagtgaaagacattctccctcgaatctttcgcccagccataggatgatggctcacactaaaaagacaacgcgcatggctgatgcgtttgaccctcaagtggctcggcacgctactctgcccagcaccgaacaagatccaaccgtccaggaggagggggatcatgaaggggacactaaggtccaggaaattgaggagcaggacgacgtccatcctagcag

SEQ ID NO: 143616 - DNA, 589 bp, Cannabis sativa
ttctaaggaaattcaatttcttggcttgcaaaccagtaagcaaccctattggcctacagtttagactaaatagctcccaatctccttgtactgatgaagatacaaaatacatggaaaatataccatattcaaatgtggtaggcagcataatgtatctattggtatgctacaggcctgatctcaatcatgctgtaagtactgtcagcaggttcatgggaaacccaggcgcactggaacattgtggagtgctgtgaagtggttactaagatacttaaggggaacaatggatataggcttgatctatggtccaaatacaactaatactcaaatagaagggtttgtagactcagattatgtaggagatttagactcaagaaagtcacaaaccggttttgtgttcataatgaataacagtacaatcagttggaaggctaacctacaaactgtagtagctctatcaacaaccaaagcaaaatacattgcttgcactgaagctttcaaagaagcactctggctcaagggaatcaccagggaacttggtgttgagcaaagcactgttgtcattcactgtgacagtcagagtgcactc

SEQ ID NO: 143617 - DNA, 663 bp, Cannabis sativa
  modified_base (617)..(638): a, c, t, g, unknown or other
taccgttatgaaaccaacgagacaatcattactgttatgaaagtgaagaagcgatcatgaccgttataaaagaatagtcatgaatctaaactgaaactgtttttaggttttctacttgctggttatctcatcagataacgacagtgacatatcagggatactagtagcaaggtatacgggttgtctagttttacaacgacaatgatatatgaatatcggcttaggtatcaggaatattttacaagattgcaactagaatatttaaatcctatatagtgatgttgatggtttgtctaatgaggtaatttcttgtttattatggattgttgttatatttatgatatgggctttattcgtgctttaactttgattgattatctatttaatttatgttattaattatgtttttatcgagtctcgcaactctcgaatgctttgtggtgcaggtaagggtaagtaaaaactagaacaaccatgagacaataattttctctcataaatgtacatatcaacttatcttgcttgtatagttgagttgtttgtgaagatcaattattctattgatattatcgatatatataaaatattgttgcgatattttgcacacgcaagtgtannnnnnnnnnnnnnnnnnnnnntcactaggagtgaggtcgatcccac

SEQ ID NO: 143618 - DNA, 639 bp, Cannabis sativa
  modified_base (582)..(585): a, c, t, g, unknown or other
attatcatgtcagtctaaatccagtgaactgacaaatcgtgggacttaatcttttgaacatataatcatgtgtttacccaaatttctacgtcaatgacgtgtcaagagtggcaacacgtggcacaaaaatatcgggactaaattaatgaagtatatgtaaagtcatgaccattgagatgaccatcgacgatgaaaggttagtctaagggtatacccctaccccctgcaccctcatggtagaagtcatgcattttatcatagatataatgacattctcaaaggtatatggggacatccacaatacaccataactacagacaatgggaaagtagggtcccggggggtcacccaacgatggtggttgtcaccaccctaaagttgggtcccgaggggtcacccaatgatggtggttgtcacacccctcaagttgggtcccggaggggtcacccaatgatgatggttgtcacccccctcaacaagggtcccgagggtgtttcacccaaacatgggcttcatccccaaaggtggttgacgaccatgtcacacccataagcgaccctctgttaggttttatgccctaannnnaactccatttcaatgtaatctattttattcaacattaataaagaaacagaagta

SEQ ID NO: 143619 - DNA, 548 bp, Cannabis sativa
  modified_base (161)..(162): a, c, t, g, unknown or other
tctatgatagaaaggaacaagggttagagatctgggtgagagaagtcatattattctgttacaatcaatgtaaggtttcttaactttatatgtgttcaaattcaattattttttaaattcatatttaggatgttaataaacatatttgttagtaaatctanntcctggtaaaatatattctaacaagaaaatcacaatttggttatgtttttcagtcaagtggatgctctatatgccaaaaatcaaacttggaaactattgttgccctgtttacaattgaagtcgagtacattacatgtacagaaactgtgaaagaagccctatggcttaagggaatctccatggaacttggtatagaccaaaggtgtataactacccattatgatagtcaaaagtgagcaaaaattaagttttccatgagagaaccatgcatattgatgtgaggctacattttattagagataattggaaggaaagtaaagctggtcaaagtggccactgaagacaatgcagcagacatcttcacctacttctaagttttgtcactg

SEQ ID NO: 143620 - DNA, 659 bp, Cannabis sativa
aaccatgaatgattaatgtaaccattgaatagtcactcatactatcacataatattattattattaaaaaacccactagatatacgttgttattattaaatattttttagtttatcaattattttttttatagatttttattttgtgtgagaattaggttttatttgacatatttcttttatataagaaaattgtgcagattcacttatttataaaagtgagtagttaactcattatttggtttgttttatatatacagcaaatatattgaggtcaagcctagcatcatgttatacacatgaattatgacaataacacccttgaatataatgttgactacaagtgagatacggtgaagagaaaagttttgaaattatatgataaattttctataaacttattaatttttataacaatttgggaggtgaatcctaacatcatattatacaggtgcagtctactgatccgggttccaactttttaaaccattcttcagcggaaccgctcaacgttagtggaaagtatgaacactttgcatcattgctgaccctcatgacaagcatcacccggttgaaacgggacaaatggtcactggggtctgaatctccggtgtatgctgccatctcgggcatcttaaagttcttggggagctctgcatc

SEQ ID NO: 143621 - DNA, 1305 bp, Cannabis sativa
attaaagcataaatctacaaattgatattttactattattataataatttttctataaaaagacataaatctacaaattgatattttgctattattttaatttcttataaaaatgtaaaatatttttaaaaagttagaaaataaaaaaaattccgaaaaatatattaaaacttaaatcaaatataattaatcgtaaattttttatatatatacatgaaatatcaatcaatatatattaatctatatctatatatctgcatatatagcagagagataaagcagtgacatgatactctaaaatttctttaaagctatttttcttttctttctttaattttctcatttttttttaatttttaattcacataaaattgctctaaaattacgtttctcttttctccttaattctctcacctttttaattttaattctataaaaaaaaagtacaaaaataattccataaaactgaaattatagtaataataatacaatatacaaccttaacgttttggcttttattttttttaaaaaaaatattataataatataaaaatgataactctaatgtttacattttttgcttttttttaagaaatacattaagatataataataatagataaattaaaaaaaagaattaattatacgtgatacttgaaattatatttcaattgttttttaccacgtttaaatttttcattaaaaaatattaattaattttaataaaagcctactttacgtctttttttgaaatgataactttaatgtcaagtatcacataattataactaaagagcattattattgggcaccaatggtgcccaacaccttttataggtggcaccctacgattggttagcgatattccctaaatcttatttttttaaagttatatgacatgctacttaattacactaatagtgttatgatatgagcaaggagggttgccttttagcatttctcataactaaaatatcacatttttttttatatttttttttctttttttgaattaaaatatttaaaaaataataatcactttttcaaaacatattaattaataataaaataataaactaatgaattttctctaatgtcttaaaaatgtttaaaaaaatatttaaaattcgagatgaaatctaagtttaagatatggattttgaaaatacaatagtgacgactacaagtgaactacggtaatgacaagggatgtgatacaccgatgacaacggggtgagatacggtgatgaaaataagtgagatacaatgagacaacaagtgagatacaataataacaatagtttt

SEQ ID NO: 143622 - DNA, 643 bp, Cannabis sativa
  modified_base (587)..(589): a, c, t, g, unknown or other
ttgatttgcctctggatgcccaacgaggcatcctgctcggactatgcttctcgagcagatgctctgagtggattctacgtgtcaccattcatgcaatgacacatcagaatgtaaaaattgggataacatttgcctcttaagtctgtacgggactttcgaagtcgcgtgtagacttcatccgagctgcttctgcctttggatggggacacgtgtcaagcgcgaccgtttgagatttgatgtgaggttgactgggcgtcccttcggttttttggctaataaattctctgacaattaatatttcgaaatccaattttctctctccagggctgacggctgcatttgattattttttatttccgatattcgcttttaaggagggaaactgaggcgtctaaggttcctttgaaatgattacctcttttcgtgacttgcctataaatatcacacaacattggcacataaactcattttcatcacccttctttcctaagtaagtttcaaagcgaaaagagaagttcttggcttcaaagttgttgaagtgccttcatcaaagctgctagttggattttttgggttttatgccctannnaaaactttttacaatctgattagttatcaatataagaaatttgaagtgatttat

SEQ ID NO: 143623 - DNA, 508 bp, Cannabis sativa
  modified_base (219)..(219): a, c, t, g, unknown or other
aatatattttgaacatgttgacctaaaaaaatgatcaactgagagctgggtcgtataaatctgatgctttccacgtgttacacaaatagaatgaaaaagtaataagcacagagatttgttatagaggttcaaccaccttgggatatcaggtaatgacctactccccttttggttgtattgatacttagagatattactattcagatcactataggtggnatctgatatagctctctataaggatacaaatcatgaatcagtatgcagatctctaatgagagagtgagattgccttagaggcatgtgagagagatgaagagaagagagggagagcccttcggggcgtgtagcagagagagaggaagagagactatggttttgaattaaaacaatttggagggttagtgacttagaggcaacttaggcttcaaggctagggttaaggcctttatataggaagccttaaaccctaggtttacaattcagatgccttgaaaatagcatagtt

SEQ ID NO: 143624 - DNA, 827 bp, Cannabis sativa
tttttaaatctaaagtcagatattttatattttaattatttaaataatgtttataaaatgaccttatttaaaatttaaaaaatatgatatattttaataaataatctagataatttttaaaaaatctaatcagagatatatctacttcaaaaatttggtattttttttattaaattataaaattagatatgagatatttatttatcattttattttattagatatttttattttattttataaataacataaatttgaaaatttgttgataattttaaaagatatttagggttattataatcttaattttcaaattataggtttaattttaaattgattttcttgattaattttgaaataaatatttattttatttaagatttttgaaaattaattaattattttaatttaaattaattaaatcttataaccaactatccaataatgtcatgagtgtttattcaaactttcttttctttctaaaacctattattgtttgatctaaattggtatggttaacttgttgatagatccaatgatctaattttaaccatagtccaattgtcaattattcaattaaataatttataataggcaaattttgtaatcatctttcatctgtgtataaacctagtaatatgataggatccatccaaatcattgtgtatgtgtatacttgagcctatatgtttgcttttggacctagatgcatatagagagcccatttaattttgatagttaaaatggattaggttgctaaaataaaagggaattttacaaaaatactgcttttggaccaaaactttacatttatactgggacacggc

SEQ ID NO: 143625 - DNA, 563 bp, Cannabis sativa
gtatcgacacacgatgtttttgataacaaagtctaatgcttttttagcagttatggtcttcatgggctcggcctctatccactttgtgaagtagtccgcggttactatggcatactttacccctccctttcttgttggtaaggacccaatgagatctatcccccacactgcaaagggccaagggctagtcattagggtaattttgttgggcggggggctcttggtatgttcgcaaaactttggcacgaatcacatttcaagacgtagtctacacaatctttcttcattgttggccaaaaatatccttgtcttagtattttctttgagagacttggacctccggtgtgatctccacaaaaccccttatggacctcttacatgatctgtctagcttcagggtccgacacacaccttaagtacgacatgctgagtcctcttcggtaaaggacattatccatctttacatatcgatgcgcctgatactatagcctcctagatatggatctttcctgaggcaactctcctctccttacgtatttgatgatggagtccatccaacttgg

SEQ ID NO: 143626 - DNA, 559 bp, Cannabis sativa
cgccaaataaagcttgggttatcacctatctctgttgtaaggaaatttccatttgggtagtaacgggccctgtaaatgcatcccacgagagagtcatcatacagaagaagacgccacccctgctttcctaacaagaaaagattataatcacgcaaattacaaaaagccacctgaattcttgcttctacaaagacgtcgccaactaaaccagcttacaccttttgttcagttagtagaggaacctcaccaatgctttgacattaagctttcaaggtgtgaacaagtcttgagcggaagaagaaatacagtcatagcataggttggcaaagcttgagcaaccgttttgagcaaaacctcatgaacaacttttgataacaaccgaccctcccaactctgtattcgcttgagcattttatctttgagaaaacccaagattgaatccttattcctccccatagtacaagggagacccaaataagtacttcgcgcatcagccatgggcatcctcagcatagcacacattctatcccgaatagcaagaggagtgttggagctgaaa

SEQ ID NO: 143627 - DNA, 668 bp, Cannabis sativa
tattatgaatttggatccatattctggtgctcatcataatgatgctgttgatatttttaattccgtacatatttaaatttgttagttcaaataataagcttgttgggatgttctttctttgtcagtattttctaagttagcctatttctaatcttcatttgttatttgttctatgtcaaacatccttaccgtctggaggaggtttaacgaacagtctgattgcattatttgacgatgatagcaaatacggtgacaactataatcgttgaagtgaagatagttgttgagcgttgtttgagtgtggtggtgcaaacactattgatagggtgattggagagaagacaaaagttaggcattaaatgttgagataacgagggtattaaatttcgatttcttattttatttttttaatttacatttaattttttatcttcttaccatatttaattttattaattgtctaatttaaattttatttttaaaaaaattaaattatttgctcttatcttgtctaagtttattagttgactgatttattatttaaataattttaagtgttttatcactataaggtattatctataatttatagttgagatattctgttattcttattagaaaattgaaattttagtttttagaaccatctctttaccataattttctct

SEQ ID NO: 143628 - DNA, 550 bp, Cannabis sativa
gccctagaggcaaggcacggggtcggggagatgttaacccgctataggctgcctaggattgggaaaataggtttatagcaatgcaagccagtatcattgaacaagacgatgagatcagatgtctgaggcagcagggtgctcctgcaatgcttgctccatagatgcaggtggcttttgcccctactgtgcaggcaggatcggttgcttctgtgaaccggatggaaccactgtatgaaagcatctgcaagcaggcacttccagtctttttgggaggtctcgatgtgatgaaagtcgaacagtgaatgacggttattacacgaattttgaactttatgggtgtcaccggtaacaataaagtgacttgtgtcacattccattctaggaagatgccctggtttggtgggatatgatggctctgacccgggatgttactaccattacctgggaggagttccaggaattgttcaatgcaaagtactataacaaggcagttcgtagcgcgaagagaaaagaaattactcagctgactcaaaaggaaaatatgtctgtt

SEQ ID NO: 143629 - DNA, 1428 bp, Cannabis sativa
  modified_base (676)..(677): a, c, t, g, unknown or other
  modified_base (1029)..(1032): a, c, t, g, unknown or other
  modified_base (1158)..(1161): a, c, t, g, unknown or other
  modified_base (1227)..(1259): a, c, t, g, unknown or other
aattttgacaatatttacaaaatcaatgtaaatatgtgtacggacaaagaaaaaaataaatgatcaaaagccataccaacttgattaattaactaaaacataagatagaaacatataatagtgcatgccaaaatttttttagtttcaaaggaataattttttatacaaaacttgatcgattcagttacaattggtgatgaaagagacgtcagctagtagaggcaagaggtggaaacggcattgagaaacatatcatgccttaagagtataagtttcttcaataataaaatatatgcctacatggttggccaaacatatttgttgatgctcaaataatatagtaataactagtatatataacataaattgtggttacatattaaatatgagaatatgaagagaatgtgataataataatcataataataataatagatatttaatttgatatggaagttataaaatgaaaaagacatattatcatttttatgtcaattaatataaaaataaatattaataatataattattataaatctatatataaatataaaggaaaagtatgaagcggtaatattatattctaaaatcacttcaaaactatttttctcttctctccttaattttctcaattttaatattttattaaagcattaatctacaaattaatattttannattattttaataatttttctataaaataatataaatctacaaattgatattttactattattttaattttctataaaaaatataaaatatttaaaaaaaaagttaaaaaataaaaaacaaattctaaaaaattattaaaacttaaatcaaatataattaatcataaatttcgtttatatacatacataaaatatcaatcaatatatatatataaatctatatatatacataaaacagtgacatgatattctaaattttttttaaagctatttttcttttctctctttaattttctaagtttttttaatttttaattcatataaaattgctctaaaactatttttctcttttnnnnttaattctctcacttttttaattttagttctataaaaaatacaaaaataactccataaaactcaaattatagtaataataatacaatatataaccttaacgtttttgcttttttttaaaaaaaaannnnataataatataaaaatgataactctaatgtgtacgttattggcttttaaaaaaaaaaaaaataatnnnnnnnnnnnnnnnnnnnnnnnnnnnnnnnnnaataataataataaaagaattaattgtatgtgatacttgaaatggatattggcggttaaactatctgaactttacggtttgtaacacttaaccacaaacaatgaatttttggcagctaaaccgcctaaaccctggttccgttttgctctgcacacctccgtccaaaaat

SEQ ID NO: 143630 - DNA, 1020 bp, Cannabis sativa
ttagaaaggtcaatgacctcttcgactggcgccttctctttggacggagtctcatcacctttagatcttttgggcagaggagactggcccaagttgtcccgaactctcttcttcaatgcctggagtaccttctgagacatttctgcacggataaaacaacacagttagaaggaaatataaggtatgtaaaagcatagtgcaaaagaagtaagtgcaagttaaaaataccctgcacgtgggcaggagcattttcccgaacaagcacagacgggacatcatcgtttgaaaagtcttcctcatgctccaccaggatggccttcccttttccctccacaggagcggatggtcgagcatgcatatatggttctctaatcctgatagcatgttccactggtgcttggtcggttgggggagccttcttctttttcttggtcgacctctcttgctctgaatagtcttgagcatactacttggctctgttgtctcccttcaacttagcctcaagcttgagttgaatgagctctttctcctgctcagttccactagcccggtttggcttgtccttttacttcttctccttcatgggccccgacacaaagtcctttggtaagagcttatacttaacaaagttggcctcagtggccaaccgagtgatattcagagcagcttctggcagttgaagaatttttcgtgccctctccttgagtcccaatgtgaaaggagggcagcagtatgataaaatcttctggaactgagtgtggacggtatccatgtcctgaacggagtagtacttgttaaaaatgtccttttttgttgacatcaaagtccacaatgcccttcaaccatttctcatccaattgggagaagtagaaataccccgacctgctcttcttgatagttgacttcagttcgaaaagccagttggtgtcgtacagggacaactcaccccatccttgcgaggcgtaaaggatgaacagggcagataaatatttaatgcccttcggggtaaactgggtcggg

SEQ ID NO: 143631 - DNA, 921 bp, Cannabis sativa
tgattgaggactaacttgctatgagcgggcatgcactcaatcactaaggcttaaaattattttatgaagaacactaagggaccgtttgatatgcggtgatgggagaagtgggaatgggaatctgaaagtttcctatgtttggttaggtttttaatattttaatgttggctaagtgaaagtggtaggctttagtttggttggcaaggaaaacccaatgaaaatgtaattttcactttccaatgctattggcaaacacatactttttcattttaaaattgtttttttatatatatgaatactaatgtatataaaaatatttaaaatatgaagtattttccttattttttttatatattttataaaatatattatcaattgtatgtaaatttactctttataattattatttattatttatttattgttatttttttttataaaattatatgaaaaataataaataaaaattattttgaacacttagaaagaaaaaaaaaatattgaattattagaattttataaaaaaaaaaattattattgtaaaaaaaaaaagtggtcacatttcattctaatgtcaacgaaacacagtaatgttgctttcttaggtttatcattcctttcatcagtctccaagcaatgttaaacatactcccatgaaataaaacttgcatacaaaacggcccctaaggatttcgaagattgaagaagaagaagaaagaagaagtctcaaactctctagttgtctaacaagatgaaaactaggttaagagtcattagttggattatgagaccattcttttcctttttatactagctaattcacatagggttaaggattgaattatttagaataaaaaatgataaaataatagcaaaaataggacttagtggccgacccctatgtgggcccaacactagtta

SEQ ID NO: 143632 - DNA, 681 bp, Cannabis sativa
taagaatctagtttgggggaatttgttaggctatttttggcctatgttttgggtcactttttatagttgttttccttctatattattatatttggaatagaactatggttgttttctttggtttcaggtttcacacttggaatgtatcaattgatcaaatttcggaaaacaacaatctatagaatagagaaaattctgcaagaaaataaagatgaaacttcatgctttaatttgactatgttctcatcagattttagaaaaagtgaaaacataaaagttttagatttctttttcttctttccaacgcatcttgaattaactcatttggagttcgtatgtgatagttatggacattttactgaaagatgctgaagctgtaaaattttactccagtagtcgcgaccaccactttccatggtcgcgactaggaatcaaacaacaagtttttttatcgtattttgcctatggtcgcgactaggctttatatggtcgaaaccaggggcgaaatacgagatttttggccagttttttactttttcaaacgtagcaaccctaatttctatttaaggtgcccgtgttttagaaggaagggaggcagaaatcgggcccaaaagtgaaagaaggaggcagaggaatcaatggtggcgatccggaatgccatcactgttgggttttatgccc

SEQ ID NO: 143633 - DNA, 661 bp, Cannabis sativa
  modified_base (451)..(455): a, c, t, g, unknown or other
tagaatcatatattaaaatatattaattatatatttattttgttagtagtttccatgcaataatcttgatgaagaaaccggtttcttgatgaagaaactattttcttggtgattttttcggcgataatacaaattctgatgacttttccggtacctgcggctactctggtgacttttccggcaacgatcacaacaaacttttaaaaagtcgtcggaattggcatagtcgctggaaaaattaccaagaaactagtttcttggtcatttttctgacgacttttttcggcattttcggcaccggcagcaactccgacgacttttctaacaacgacagctactctggcaacttttccagtaccaacagcaaactccgaaaaagtcgtcgaaataggcattgttgctagaaaaattactagaaaattaccaagaaactgatttcttgatgaagaannnnntttcttggtaattttttcggcaacaatgccaatttcgatgacttttccgacgtcgacagcaactccagtgactttctcgacaccgacagcaaacttcggcgcattttcggcgaccaatgtagttttatttttttaaaaaaatataaacgaaattttaatatttttttaatagcaattcaaagtggcatattccatacatgttaagt

SEQ ID NO: 143634 - DNA, 1191 bp, Cannabis sativa
gcaacaaaaatcgaatcaagctttttttagcagcaaagaatgaatagtattggatgcagttggtttgattataataatttgtttgttcattaaattttttttcagttgtttaatctgattatatttatttaataagtaagctctctctcactctccattccataaagctattgataattaaattaaatggtccaccgttttctcttttatatattattaattaagttggtaagtgggttggttttattaattaaaagtaaacttgggttgtattatggaatctagtgtagtagaactagtaaaagagtatagtaatgcaagcaaaacaactgtcatcatgtgcccctttagtttaattaattaattttacactaatataggattcctaatagtaattttttcatggttgaattgatttgtgtgtcactgcaatgcgactgtgttgaccaataaatagagcataggatattgatttgtattaatattcatgattatcttattatcattggaatggggttacttacactacaactccaatcatcaattttcattttgccaaacaaacactcagcctaaaacatttcatcttttcaatttaaaataatttcatttgatcaacctccatccatttaaactcaaaactaaaataatgtcaagaacaaaacacacaaccaaaaaacaaagtccaagattgaaatccattactaacaaagtctttctctcatttcttactatacttaaatcaaatcatttgaagtcataggaaatgtcccttcatcaaatataattcaaagtgaggtcattcacctcaaaattttcaaaggaggtcttttacctaaaaaatctcaagtaaggttctcttatattaaaatgctaaatgaaatcattcacctcaaaacgacaaaataaattaaaattaaaaattagaaattagaacaactacgttttacgtttggtttgacttgattcttataaaaggatacatgactaagtgcagtcaccaaaccacaaaacggcataaaacagaaatctcaaaattttaaaaaatatcatatttcagtgctaatccaatatgttaacaccatacttaataattttgcaaatagcataaaaatttggtataggaaaagaattcaattgatggcatttcaagtctactggtgtgtgtgcctgttaggctaaaattagtct

SEQ ID NO: 143635 - DNA, 516 bp, Cannabis sativa
agcagcttccacccatttcgatacttaatccacaaccaataaaatgtacaaattgctgaaagaagtaggaaaaggacccatgaaatctatcccccaaacatcaaataactccacctctaagatacttgtcaaaggcatttcggtccttctagaaacattccccgttctctgacaacgatcacataccttcacaatgtcattaacatctttagaaggagtgggccaatagaacccagtttgaagaactttcgcagcagttcttatgccactgaaatacccccaacattgtaaggcatggcagtgattcaaggctatttacatctcttcttcaggcacacatcttcttattatctgatcagcgcagtgtttgtagagaatcgactcttcataatagtaatgctttacctcggaaaagaacttttttagttattgacgagacatctctggaggagtgacatttgcagccaagaagttgacataatcagtaaaccaaggtaccatcaaactttccctcaa

SEQ ID NO: 143636 - DNA, 526 bp, Cannabis sativa
tttttaaatgctcaattttatgaattaatgttaaaatagaaagattaaatatttcatgaaattaaagaaaaaaaataattaaataacattctataaaatgaaaggacaccaacactcacagtttatttacaatgtatatgatacaatttaatttaattttataaatttactattactataattaatgatctagtattatcaaacaatataatatataataaaattaaaatattaataataatataaaagcatgttattattctatattaattaaatgggttaatctatttttattgttaattaagaacttctataacaactttctattgtgcaggagacctttcatatttccttctcctaatagcattaatttaaaaaatagaatgaataaagttgctatgtatatacaaaagagatattccatggtaaactatactatttataataacttttgaaatttcataacatgtctaaataaatttaaatacttaatccataatatttaaataaatcaagagacataatt

SEQ ID NO: 143637 - DNA, 538 bp, Cannabis sativa
ttaggcctggagggccttcgatccatgccagcttctagacgaagggtcctcccggctgcagcctgggccttgatgtaagccagctcctgctcccttctgaagagatacttttgataccgctcctcagctgaagtaattatatctacccggagcgctctttccgcggccggagtccttacgttcggacagatgaccttggaaaggttaaagtcatctaccgactgactctcaaatatcagcttggctttcgacagttctccatcgtgactaagtccccaacgttgatagccttcctgtcgtaagtagagaaagtcttagcccgctggaggaatacttgagtaggtgcggtccgcagttatggagggatcctaagccactccgtaagaagctccgagcggtccgtggcctggaaactggaggaaaagaagaagtggtggcggtactccttcatgtacttctggtaattaaaagggactgggccctcattcaaagggtgggaccgaagtccataaaatccatctttaaatttgtccccctt

SEQ ID NO: 143638 - DNA, 984 bp, Cannabis sativa
tgtcattttctctctctacaaaatacaaaaaggaaacccacaaaccaccatcaccaccactctccggcgacccatctccgaccactgcccagccccaggggcctgataaaacaaaaccccaggtgtcggtgacctcacctcccaagcggcgccgctcctttcgccgctgttagctcgggatcacaagtcaaagttgggggttcaaacttcgaacggattttccagtcacctccagtgtccatttgatgagtcgtcttcaccactaaacttagctcgtcgaggagaacaacctacaataaactattttgcccagctccctattttgtccagtgacatttttatagctctgcccctttccagcgactttccggcgatatcgtgtaccgttttgacaaactgttggcatgagtgtgatgtactcgtcgagatggtcgttttgatatacactactcctatttttgataatatttctggtacaccgattcttaccgccaccgatagttaatgtgcaccgcttaggtgagcctttggaaccaaaaattttaaatatagtcatattatatgtcgatggactcggttttgaatgtagaatgcgatgatgataattatttaaccatctgatggtataggtgagagtaatatctaagatttgactaaacaatgggagctcgggacttgagagcttaaatagtcttttggacaaagtttaacgacttgggagaggtagggaggagaggtagggactcaacttgattattggacatgatttttatatgtgttgtataaattagacatattcaaaaattgtttgaaaattgaaaacttaatctgcataattttttggactgttctgcggcattgagtgccacatatgtttttgtgtacaaatatttatgaaggttatgatttttgggtttattcaaaatacagccgttatgctaccaaattttctagaaaataaaaaggaatatattcttttgttat

SEQ ID NO: 143639 - DNA, 582 bp, Cannabis sativa
  modified_base (253)..(253): a, c, t, g, unknown or other
tggcagttgtgcggtttcgaggtacatcagcattaaatgaccatcttttccacttccactttgaattttgtccgtaggatcaaacatttttttgatctgacgaagccgatatcatgagtataatgtatgaaaaaagaaaccacctttgcattatttcctccattttagaaagtctgagaaatccttaagcttctttgctaagaatcaccatcgagtttgcctgaggatttgcatgccatccctgtccttgacnttttttctacgagtttcctccgacttcatcttctcaaggtgatccttactacatttgaagattttcggaccgaacaaccattcattgccccaagccctaatttcaaacagtaagtttctttcctcccttacatgcttgttacattgtgtttaattgctgcttaatttgtttgtatcgttgccatctcatttggtttttgtagtttttagggttaagttgtatttaggtcgatactagagttcaggcaatacgtaagttttttcagaatctccaactcacaaccttcgggtttgataaaattctctccagggattgggactgctttctac

SEQ ID NO: 143640 - DNA, 691 bp, Cannabis sativa
  modified_base (611)..(613): a, c, t, g, unknown or other
acagatctctcatagttgaatggatatcttgatatataaacaactccataaattccagcctgattcaaagtatcttgatttgtacgcagaataaggtctgcccattcgataagatatgtcacaaatacaacatgtccatgaaagaaaaaaattgttattagcctttttctctgctaaaacatgatgaaggcttggataaaagtccatagttacttggtaaaccatatgagcatccttttttttttgtcaatatccccaagaactttagcctagaaattgggaccaaaacctcgggtgtgctggacaacattatcatcaagtgaagaatgatattgtaagtcacccgaaattacatcttcaatcttacataaagaaacagggtattgatgatcattggatgcttttacttcattcaatgaaatggagcgccgataagatagtccaaactctatttctcttcctaaattattcagagctcgttgggagcaaggttccccaaaattagacatactgtaaaaagaaaaaaaagcaggtcagacaaaatcaaatacaaaattctcaagtaagacacgtgtacataaatgccacacatgttggaaattattttaccnnnatcttagatctactcacaagtgtgttgattaacaccctaaatatgaacttcctgaaacgatgatataaacacatataa

SEQ ID NO: 143641 - DNA, 1203 bp, Cannabis sativa
ttttttttttttgaaaattagctgttggggatttaatttgtcatttctaatgtgtataagtgatataaaataaaatgagaatagtttggagagttatttttgtacaagctgaaaaatttttagttactagtaactagttactatttttttcagctttaatattagaacattttttactatggggatgctttttaacaactctcataacattcaaatcacccatttaatcatatttacacccaattaagagatgataacagccattgggtgtaagatgtttgaattttaaaaagtttgtaatcctaaacactataaatagagacattgatatatccttcgagatacactcttctcttctatctttcaaacaaaaagctagacagttctaaggcttgataattcccagaagtatttccacaaaagtgtagaaaccttgttcaagcttttgatgattcccatctctactttgggtgtttgttcttcttttcttattttattctattatctaattttatcttgttctctttttctcctctaaacactcttatctatatattctatcatatatattatatatatactatatagtattatatatattatatatatacatactttatacactctttgtatctctactatatattatctattttatatattccatatcatatatatatgcttttatatagtttacatttatttgtatctttgttttgaattgtaactcttttcttttatttgtattttgtattttaggattgtaactctttatttaatatattgtctttgtaaattttgcttagagttgtaatgaagagacttccaaagcaaatgcaacttctaaagtttctaataagaacaagagtaagaccaaaaagagtaatagcttgggtccaaagtctaatccaaaccaattcaaaggtagaaattgtccatattttgtgtgtggtaaacttggacactatgctaaggattgtaagctagcatagaaaagactttaagggacccaaagtgaatgctatcgaggaggatatcattgctactcttagtgacgtgaattttgtgcaaggaaaagtgaagggatggtggtatgatacatgtgacaccgttcatgtcacatatatgacaaataattgttcaattcctttgaagagtcaaaaggtaaccatgagttctaaataggcaatgaggtcaaatcaa

SEQ ID NO: 143642 - DNA, 634 bp, Cannabis sativa
gacatttgcaaaaacacggtttttcacatgttaccactataaagaatataaacatataagttgtccatacctttaatagttgatggagaaaggagagaacatcctcaaccatatactacttcatgtcctcccacaaaccacatcgttatcatatttcatgatttgttctacatccccacaaagcatggttaacatcctccaccaaaccactgcagcatcttgtacaatctgagctagttggaacaccccgtttagctaaggcagcattagttggaatccataaatgacaaattttccaaataaaatgattgacctttggcggaactctaagctttcaaagatctttccaccaacattccatctcatgtgtattggattacttcacctcttcttgcatttcagcagccatacaatacccactctcaactgagtactacccatacaaaatcatcatcctaagttccatccaacttcaaatcaatgacatacatctaatttggaatatagggtttatcgtaaatagagacggtaatcacctatgtttggtatgaaggagggagatttggatggatggagagttgatgaatgatggagaatataagagagggagaggagagtaataatccttttatat

SEQ ID NO: 143643 - DNA, 976 bp, Cannabis sativa
  modified_base (364)..(380): a, c, t, g, unknown or other
atctaggttcatacatgttggccaacccaagtggagaactatccgcgatgatctcggccttttgttacaacaatgatcaagcaataagtgtttatcctaaaacacttcttaatattcacataagacaatctagggttttctaccaaactcgtggtataattacactaatataaaacttatattttagctctaaaacatacatcatattgtagagctcgtttcaagcttcgaaataatatatagaacgtccaaaatggacacccgagtcaaaagttatgacaaaaatacgatttctgatctcctagtaatttctaaaaactataaaactcaaaaatctaaatttttgcactcaccgaaacactannnnnnnnnnnnnnnnncactccaaacttcacagggcgcatatataccataaatattaccatccttacgtaacagaaataaaaatcgagcccttaaatgaaaaacaccactaacgatcaaactaagctttaaaaagttttaaactcgatttctaactaaaaatcacctcaaattcaacaagaaaatattagaactagtcccatgactactcgaaaacaatcctataaggtcagaaccttcataacaattttaattcacaaaatccctatataaaactaattatttttaaacttaaaacgaaattaaaccataccttaagctctccctcttcaaggatttgctatcctgctactaccggagcttagattgttagatttcaggttgaaaatcgaaaaaatgaatataagaggagaatgttttgacgaagaagggagaatgaaggttggttcttcgttctttacttcagttatatattaaacttaatatataatatatataaaactacgtaactgataagtttatcagttaatatactataataataatatataattatattaataaaaataaaataataatataatattattaataatattaataaaaattttat

SEQ ID NO: 143644 - DNA, 1291 bp, Cannabis sativa
catctccacttatacttccatatttcatcagatctgatctttgaacattttgtttaccaatctctggtaggtagccccagcgttctttagaaaccatacaccctactccattctttgttgggaacttgatgcacgaatggaaaattgatgtgacaactttcaggtcatataagactggtcgacctaacatgacattaaaagctcatggaacaccaattaccaaaaattgtaccatcacagttatgctcttcggagcttgtcccacagtgagaggtcggtgaatttaccccaaaggtgcaacactttggctgaagaaaccatacaccagttgggtacaggggatcagatctttgagttggagtcccatcttttcatatggtgtcttgaacaaaatatttgtggaagctccattgtctatcatggtccgggccactgttttgtttgctatttgtacttctacgaccaagggatcgttgtgcgggaagagaacgtggatagcatcttcttcagttaaggttatagtaggtttccctacccgtggcatttttggctttctttcttctacgactaaaactacttccttttgtttgtgttgtaaagttcgggcatacctctcccaagcttttcccatgtctccagcaatgtgtgggcccccaatgacttgtaaatggccgtccactggtggaggcattagtaggtcttgattattgtctgtttgggcggcctgttgattttgatcggccttgacgtatttctacaagttcaggttatttatttcgattaagaattcaatttcctgcttcaagttgttgcactcattcatgtcgtggtcataatctccatgaaaacggcaaaacttagacgtgtctctcttacttacgtctttcttcatgggagcaggttttttgtatgggaccatagactgggtttccatgtagattgtctctaagtcgtgagttaggatagagaaggcagtgaatttggaggcattttctctaggggtttgtttggctttgcttgtgaactttcccttcttcccgttaccttgcctaccgttgttattggatcttttgccgctcggagttaagctgctgggatattgtgggctttgagcaggtgctcctgccgaggggacctgtggttggcgcggcctatgttagacatctgctggcttaatggcctcttcgagcttgataaacccatctgctcagtctaaaaactctgtcatagatcctacagggccacttttcttaatgtctttccacatttctccaagtacttcaatgccccc

SEQ ID NO: 143645 - DNA, 647 bp, Cannabis sativa
caaaacaaatcgtttaacaaaataatttacaattaattatcgaattttaaataaaaactactagaacttgaataaaactaatatttacgtggctcgccacgtaacttttatctagtcaactaataaaaatagccaaattttatttaaaatttgtaagatattttattttaataattttattttatataaaattcatatactaaatttttttttaactttttcttttaatttatatttttaaaaaatatatctattaaataaaaataaattatattttaaatatgacaaaataataaaaataaaatattatatgaattttttaaaaaaataataaaaaatatttatacacaagttaaaaaaaaattataaaatgagggaaaaattttaaaaaaatattaagagtaatttttaaaaattattttaagtttatattttttaaataattttgatatatttatcattttatggggtgcaaaaagaactcccttaaaaataaaacttgaatggtaatgtgaaacattaccttgtttgttttgagtgtttaaccttagaatgttattcccttagggggcgtttggtatgaggtattcaaaataatttgattatagagaatattatgaagaagaatatgattatagggaaatgtg

SEQ ID NO: 143646 - DNA, 535 bp, Cannabis sativa
gtacccaacagattaaagaacagccatgttcgaagaaaagtctaaactcaataagtcagaaagtttttcttgagttagagcaaaaaagttcatgaagcttaaaaaaagcagaatggaaaaccgacgcaatgcagttctaaaacaagccttacggctaaaagctaacgcaaggacatggaaaagaagagtcgcagaagtttcaaaccctagcgtttcctacaatgttctttttacagcaaagttacattcaaagcacaagcatgcaaaggaaaaacataaagggaatcagaaacttactcaaagattcaagtgtccggattcaagcaagcctgaaatcgtctgtaaactcttcagcaactttgaagcctgaaactctctcgttttgctttgaagtttgctaacagcgaagggtgatgaaatgaggtaatatgcaagtactcctagtattcataggcaaaagggtaactgtacgtaaaggaaccttagacgcctcgacttcctgccttgaaagcaaatatgggaaatcaaaataatc

SEQ ID NO: 143647 - DNA, 543 bp, Cannabis sativa
cctgtgggatcgacctcactcctggtgagtttactacttataacgatacgtacacttgcgtgtgcaaaatatcgcaacaacatcatacataacgtttctttatattttttttacatcattcaattaatattattttttattttctacactactgaaataatattttttaaacttatatacaacatatataaataaaatattatttatatattattaaaataagtttagagaatacattgtttattctttacatgtaaaacaagttgcattggtttgagtgaatctctattacacatatgtgatttaaaggagctgatagaagctttttttaatcacatttagctaaaaaaaattagagaatctctattataaagagactttggatattgctcacacagttgaagttagccgattcctcctggtaaggattactgggaagctgtgaaatggatattgagatatctacgagatacttccaggttgtgcttgtactttgacaatggtgaacctatgcttgatgggtacacaaatgcagacatggct

SEQ ID NO: 143648 - DNA, 589 bp, Cannabis sativa
  modified_base (273)..(276): a, c, t, g, unknown or other
aagattaattttcacaaaattaaacttttagacaccaaacatgtttaaattgcactttattttaagacacaaagcatgtctcaaattctcatatttgagtatcatccccacattttcacattttactatcaagataatattttgattttaaaatatagaagactattttatctctataatttttcttaaatttaatttcttttttgaaattattttaaccaaaatatgtcaaaattttacatatgcacatagccaaatttgatttagaatttnnnntcaaaatcaaataaattaatcaataatgtcttaatatattttgattaaatttgtgggtcacccccacatttttaccataaaatatatataaaatatcacttttgtgtatttttctcttcaaatgactctttaaggccactttgaaaaatgcaatttaacagttttagttttctccacaaaactaaaataccaaactcacatttctactcgcaaataaatgtgattatttttactcatttttttaaagttatctcctcaatgagattaacccaaatattacactaaagttaacaaaattctcatcaattttgtt

SEQ ID NO: 143649 - DNA, 608 bp, Cannabis sativa
aaaagtatttgtgtgtgtgtatatatatatatgtaatatatatgtgtatatgtaaatgtatatgttacatatatatataatatatacacatagtactatacttttatttagttaatatttattttttttggctaaataggtttttggtattcctttgttcggtgtttggcaaaaatcacttctcgttatattggaaggttagtatgcttatgttatattatttataatatttaaaaaaaaatttacttgaaaatgcatattagtagagtttgaatatcctatatattcatccatagtgaagtggaatctgtgaaaaatatactgcggtcggatgggtggcaaaaattaatatgtatgtaaattgttttgatattgtgtttgtgatttttgtgtaggtgttataaatttaggaatgatcaattgtaaaatgttatgctgtcgaatttttagtagcataacattttcaatttgataatagtttttatttaaaaaataattaaaacatcgttaatatcatagatatgataataggtataatgtaatatgcatgtaaactgttttggtattgtgtttgtgatttttgtgtaggtgttataaatttaggaatg

SEQ ID NO: 143650 - DNA, 1052 bp, Cannabis sativa
  modified_base (379)..(380): a, c, t, g, unknown or other
ttatccaactaagtgcctctttgacacttagaatttctgcaatctcgggtcggcaactgacaaaagaaatagttgaaaacgcctcaattatttagtcatcacagtcgcgtgctacaaaaccaatacctatctcatttgtgtcttcaaaaactgctccatccacattaatttttaactgtccagcagccggtttggaccagtggtctcttgtgtcagtgcaattggaagccagggaaaccgagtccacccgcttagactgaggacacttccattgtcgaagagtggtacgagccagccaaacaacatcaacaacactacaacttttaccattccaaagcatttcattacgagctctccaaattgcccaaccaaccatganngcttcttcaaccaaccccatatttcctactgccaacgattccataaaccagtcaaaaaaattggttgctgcagaatggccaacacctaacgcagatcggagccaacatgaatgagcaaaggagcattgaaccaaaacatggaatattgactcttccccatagttgcacaacacacaatgtaaccacaggaacatgtttactatgaacttgagtacgtgtaggcaaacaactcgaaaaggcttctttccttccaagcaaaatgtaaaaccttaagaggggctttaatcttccacagcatcttcaaaacatcatcctccatggaggagttccaactaccattgactgactgtaagtgattgtaggaacttttgacagtgaaaaaaccagttggatccttgttccaaaaccaactatcactcgacctccaagaatgaacagttaggaaagtatcgagccttatatatccgacccacaagggaatcctggtacagcagtaaccgccaaccttgcttacccaacaaagatagattatactcacgcagactccgaaaacccatcccgccagagttcttatgtttgtatagtttcctccaactaaaccagttcacacccttcctactactcgaactccatcaatacttagacataaggctttccaaatgtgaacaagtt

SEQ ID NO: 143651 - DNA, 723 bp, Cannabis sativa
  modified_base (244)..(252): a, c, t, g, unknown or other
tttgtttcaaaataaacagataagtgtgtcccattcttcaatatcttgcgaggaaacaagcagcttgagtggacggaggaatgtgaaaaagctttccaagagctaaaagcgttacttgcaaaacctcccgtactctcaaaacttctagacagagaagaacttggaatatacttagccgtcacggaacatgtcgtgagtgctgtggtaatcagagaagaaaacaacatacaacacccagtctatnnnnnnnnnaaaagactcattgaggccaagggttgatacccttcaatagagaaactcgcttactgccttattctagtaatcagaatgttaaggccttattttcaagctcatcctgttcgggtatacactgaccagccattacgccaaatattgcaaaagccacatgcttctggacggctactcaagtgggaagaagagttgggccaatacgaaattactttccaaccccgaatagcaatcaaaggccatgccttagtagacttttctggtagaatgcacaggcaagaaagaaagcataccagaaagaaaccccgagccgatacaaacacctcagccaagtatgaacgaagataagccgacttggaaactacttgtggatggctcagctacagatcagctatctagtgcaggaattgcccttgtcatgcctagggggcaacacttgcacgctgcagtcaagtttggattcaaagcatctaa

SEQ ID NO: 143652 - DNA, 514 bp, Cannabis sativa
cattcagatttcttgatgtctctaactaaatgtacaatgtttaatatcaataaaaattataatattgcccataaattgtaacttgagtcgctcgaaggaccgatatttgggtccccttaaatcataactggcacttgggcaggactcgtacacttttcttctttaccatcagtctttcttaactgtgggtaggttcttcttagatgacacactactccacaataacaagatctggctctacatatcccaaatggcatctttttgcatcttgaacactcaagataaggtcaccatttcttattctcacattgaccgctatcttgaccaccctggaacctttcttatcttgtcccataactggtggttcatttagtttttgtttcttgatctactaataagttgccttcatatacatctagtggtacaataggaagtgtcgatagtacaagaacaaacacaagatgagcctattgttctttcagatctcaattttgtttccccttgttgtctaatc

SEQ ID NO: 143653 - DNA, 955 bp, Cannabis sativa
aattactaacttattaaaatttataatatcactttattatattttaaattttatattacatgtcataattaaatatttttctaatcatttattatttaaatttaaaatacttttttttttagaaaaaagtattactttactaaatttttaattacatgtttcaattttatgttttaccttatttattttcttttatcaacaattaatttttttttattttattcttaatagtaaatcaattttatttcatttaaacaattaattaattttacattatctctactaaaatttaggcagcataacagcttaaagattgtaaaccaaaaatttccaaaacctataaataacacaaacaaaaatatttcacgacaatatatgaacaaaaaaataatccacccatccaacaacagtcaattttatcacaaaacctacttcactaacatgcataagcatattaactaaaaacaaaaactactagctagtaagagaaagcaaaaaaaaacatacctcaatcgagtgcaaaaataacaactgcagacagctagcggtaatccggagcggtcgaacatggacctaatttcataaaaaagtaaaaccaaattaaaaatttaatacctaaatacatatgtacacatacacacatatatacgtatatacactcatatacacatatccattcactgacactcacttacacatataaacacacatacacatacacatacactcacatacacttatacacacacatacacatacactcacttacacacatatatacatacatatttacatacatacatacatacatacatacacacatatatacatacatatctatataatacatatatacatacatacatacatatatacatacatacatactcacctacacatacacacatatatacatacatatctacatacatatatacatacatacatactcacc

SEQ ID NO: 143654 - DNA, 502 bp, Cannabis sativa
  modified_base (444)..(454): a, c, t, g, unknown or other
ccatgagtgtgggagctgggcgatgaatgtacatgttcgggccacactagaccaagcgggtttgggtctaccagcgttgaaacttttgtaactttattttgccacttaggtcggctaagggaaaagacttgtaatattttgaaaaataatttttgggatccggaaacacgtaacttttgtttgtaaggttaaaattattacaagtttattctcattccgttttcgttaaaagtttaatttccacgtttatttaattcgtaatcccgtttggaggattagggtttcttaatcatcttgggtagcgtgcctaaatgttagggcgttacagtttggtatcagagccaggtttcgagcttgggacatatctggtaggattatagacatcctcactccttctttagtttcctatttccaaaagcgtgtgatttcttctttctgcaactnnnnnnnnnnntggagtgctaggggcagtcaatttagattcaatgccaagttcaattaa

SEQ ID NO: 143655 - DNA, 1095 bp, Cannabis sativa
tgaatgtgaagtatttatatatatatattatataagctatattatataagtctgaaacagaaaaagaacgaacgaaacctcgttcattttctttcgataaaactttctcctcctatatctaatttctttgattttcaatctgaaatctagcgatctaaactctggtagtattagaatagtgaattctcagagcagggaagcttaaggtaatgtttaatatcattttaattttaataagaattggtttcgtatagggattttctgaattagagtaattataaaggttctgaccttataggattgttcgcgggtagtcatgggactagttttgatgttttcttgctgaaattgaggaatttggggttaaaaattgagtttggaactttttagagcttattccgagtgttaatggtgttttctgtttaaggggtcgattttaatttctgttacgtaagaatggtattattcatggtatatatttgccctgtgaatattggagtgatttggataagttttggtagtgttttggagagtgcgaaaattaagattttcgtatttcatagtttttagaaatccatagcagatcagaaatcgtatttttatcataacttttcactcgggtgtccattttagatgttctatataccatttcgaagcttgcgacaagatctacaatatggtgtatgttctagagccaaaatataagttttattttagtgtatttatactacgaagtttagtagaaagtcctagattatcttacgtgagtgttaagtggtgttttgggataaacacttattgattaattattgttatgatatagggcccgagattatcgatcgttctccaagtagtttggccaatgtacctaatccggaacttaaggtaagaaaagtataatgtaccacatggcatgacaagttctgaaattatcgattgtgtgattaggcaatgataatgtaatgatactatggacaaaatatatgggctcacctgattaggtgatgcaatatacatggcgacgtaataggcaaaagtacggtcgttagtgacatatgataagtaccgagcataggtacgagatcgtctgattag

SEQ ID NO: 143656 - DNA, 785 bp, Cannabis sativa
aactaactctccgccaggtaatagggctccaaactctgattcgtaactatcgtgtggtctatccaatttactaaagattatggctgacacataagaatgtgtggccatagagtcaaacgatacagagaagtaaaagtcgttgaccaagagctgacctgtcaccattgaaggactgcttctgcatcagcctgagtaaatggcgaacacccttgctggagtgggtttcactggagcctttggtgctttggttctgagttgagggcaatccttcttgtaatgtcctggcacgccacattgaaagcacccttgtcctctacactcccccagatggtgccttttacaactggggtactctgggtaagtgaatcaggtcttagaactactctagcgactgcctcgaccctagttcccccagaacctcttgttctgacctgagccaccggttgcagtggatgctttccttttctgatctatggccgaaccactgcctcccctgctaaagcctaatgcaggagggctaggagccctaccaaccactggagtcctagcagactatgtcatgcatccaactgggccctcagctcgcagtgctttttccaccatttcagcataggtggttttatcatcgatggtaatcatcaaatcatgtcgaatcttcacatccaacccatccaggtatttttcctttttatttaaatctgtaggcacaattcccgaggccaacctcgctaaacgatcaaactgggtcgtatactctataacactcatgttttccttctgggtca

SEQ ID NO: 143657 - DNA, 867 bp, Cannabis sativa
  modified_base (820)..(820): a, c, t, g, unknown or other
tttataaatcttattatttattgttatatagaatattcttattcttataaataacatatatgcatgaaatagattgaatcttttagtcttctaaaatttccaatacatatataatgaaaatatatttataatttaattttatatatatagttcatataaattgaaaaaatatatatataaatttttatgaattttattttttaaaagatttattagtaactaaataatatatattttctatgcatataagtttctaatactatgcaaatgagtaaaagaatgttatattttttaaatcacaaataaatttaatatcttatattcatttagttaaaattttagaattttgagaataacacatatatttttggtcccaaaaaaattgaactaaccatgcatgcttatattaatcttgtaataacaatttactgtatactacataatattttttacttttacatattttatacacaaaattgtgtatttcttttttctatatagtcttattagcttgatatattacaaacactttttattattacactttaagatacaaatttcatattgttaaaattaattctataatctaaaattttaaatatttatataataacaaactatcttaatatttttaataaatatttgtttttttttggttcatttattcagtaagttaaacatatcaagtgagttacacaaaaaaaataatattacagaataataaatgatatttcgatagtttcaacatcaaaggaaaaaaagtctaaataaatttttaaataataataaaaaaaaattgcataatcagtcacaagacgantttattaaacttaaaaattattatttttatttattttattataaaaa

SEQ ID NO: 143658 - DNA, 529 bp, Cannabis sativa
  modified_base (389)..(389): a, c, t, g, unknown or other
  modified_base (485)..(497): a, c, t, g, unknown or other
ttttttttttttttgagaggaatagaataaccttcaaaagttttggttatgtttggatggaggtgaacagagagggaaggaaagagagaggtggtgggagacgccaaatctatttgtttggcaaggattgtgggaggaagaggattctcggctagaatttttttcaaaaatactgcgtaagttttatactgtatattgtattaagtttttactgttgttccacacttgttttttagttgttccactattattttaagggtaaatactattttgaaccatatgttttacaaaagttacaaattaggttctctgttttgttaaatggccaaatggatcctgtattttctaaaattgtacaaataggaccttaaactgattttttatcaaantaaaacttaataataatctgatctagagatgttatagtaaaactagttacatttttctgtatctattcgtattggaaattgtcttaaagttggttnnnnnnnnnnnnnaaattgttgaaaattgagctcagggtcttatt

SEQ ID NO: 143659 - DNA, 787 bp, Cannabis sativa
tttgaccaagtaaagaaattcccactagttttaatatcatccaactgacaatgatgaacacaatccccaaatgccgaatcaggatagtacctcaccttgtttccaattctttcttcctttgctagaacatcattaaaatcgcccattatacaccattcctcttgaacactgatctcacaaatatgcttccaaagtattctcctatcatcccgattattggaagcatacaccaccgttaagtaactagaaaacaccccatctattgttgctatttttaaatgcataaattgacttgagcatctaagaatatcaacaataaatctcaaagggttccaagcaattactatcttacctcccgagtgccacgcaatattcgatgaaaagcaccaaccttcaaaaacattggagtacaagatcccaagctttggggccttgactcttgtctcgaggagcccaacaaaatcagctttttgaacattaataaattgtttgattaagtgttgtttctgctgattattagctcctcggacattccaacatatcaacttatccattgatgaaagagggttctcccccctcttccatattgtccatatgagttgattcaacttcctctaaactctgctctgtatccaaggcctgaaaagtgttgctgaccatagtttcagccctcttttcctttactttttcactctttttggaccccactaccttggtaaaaccctcctcatccacttgaatattcttcctattatcagccttgacaatccactctgttttcccaact

SEQ ID NO: 143660 - DNA, 1784 bp, Cannabis sativa
ttaatagatataccttaccgcttgaactgagatttatcttaacttgtgtttgataaagagaatttattataaaattgtgttccttccaaactccaatcgttaatcatacagagaacactttttatttttaaccatcaatggaatcaccaaacaaacaaagtctatcactaaatcttttattttttttttatgaaaatttttacaccaaaatctctcaaaaagaatatttataatacttcttcttattaagctaacttttttttttttgacaattattagtaatttttttttttaaatcctagagtttggaattaggggcggtgtattataaatgtggaaatcttatatatgttgttgacctcgtttttagccaacgacaatgagtcttattcagtaagcgataagtgatttatagcaatcgatatatagtaaaataaatataaagacacaagaattttatagaggttcaggcccgaccagttcggtaatagcctaatcctcgttatttgtattgactcaagaacaaggagaaagattcattttcttatagctcttacaacagtatctctgaataagaattcttagataatatatttagtgtaaggtctcgactaaactgtttgcgaccctttgcccagtgagcatgtatcactattttataaggctacaaacttggagaggaagtgtttgccttctcgttacaatggatataaatagaaaagaatgtgggattaatgttgagtacaaagatcgtgtgattgacgtagaatacactgatcgtgggatcgtgtgtatgccatatccctgtaatctgatcctcgagatattgggatttcgtttatgactcatgatgtgaaagctgaatttgctaagtgttgattcctctacagggatcactgatcggtttgcttcaagtatgccaacgaggcatcctgctcgggctgttccccccgaacaaatactccaagttgattccacgtgtcaccattatgcgattccatgtcagagtgcgaaaattgggataacatttgccccccaagtctgtgtgggactttcgaagttgcctgtagactttatctgagctgcttctgcctttggatggggacacgtgttaggtgcgtctgttcgagactcgatgtgagtctgactgggcatcccttttgtttttggctaattaatgatctcacaattaatatttcaaaatccaattttctctcactacggttgacggctgcacttgattattttttatttcccatattcgcttttggggggaaccaaggcgtctaaggtttctttaaaatgattacccctttttcctgacttgcctataaataccaaagagcattggcacaaaaactcattctcaccacccttctttgctaagtgagttcagagcgaaaagagaggttttcagcttcaagtctgctgaagtgccttcatcggagctactcgttggattgacgttgcttgaacccagatatctgatccttaagtaagttctcgagttcctttatgcttatttttgcatgtttacattttgaatgcacttttggctttgctgtagaacattcgtaggaaaccctaggtttagaaactctgtgattcttctttgccatgatttcaagcgattaatagttcataatgcttgcttttttaactgcattgtgacggtctatcatcttgcttattcttagcttcatgaaattttttgccctaactcgagaaaatttcaaacttcttgagttctgacttttctatgaacattcttgttctttaatcta

SEQ ID NO: 143661 - DNA, 1251 bp, Cannabis sativa
tttttagaagtaaatgtgcaaaaatgtgcaaaaaataataaaaaataatataaaagataaaagaaagaaagaaagataaaataaaatattatattttggatgatgtgaaaatatataacacttatatgttttaattttattttatatttagattattttaatttctttccttaaagagaatgaatggacataaaacagtctttcaaagaatatagattttacatatattattaatgcttgaagcaaattaatatatacttattttattatttcttaaaatcaataatttcaaactattattgatataagatatgtatatatacatttactacttaattcagtttgaatattcctagaagtgaatatataatttactaatattatagtaaaatttgttagtgatccaatataatttaatatagttatattcctcaaaatgataaaaaatcacaaaattattatttgaattttttttttttttgaagaagtcttaaatactgctacttgaagtagttaaatatatttgtatgtatctagatgtatagtttttatcaagttatgaaagtaacaagaaatgacttagtatatgcgctgattgtacatctaaatatataatatgtcaagtcgtgataattagactgttgaataatttattaatttaatcgacgacttgttaaaaagacatgtaaaaaaataaatgttatattatgattacatctatttgtcccttacaacaacataatgaagttgtcttgtatattttaaatgtacatatcattgaattgatgatgaggaaatataaagtttgataaacataatagtgactcttgaagagtgtatatattttagagaataatataattattttgtacgtgtatatgaaaaataaaacttgtaatgattattatatatattgtagtgattttacaaattatcttaagaaagtttcatttaaatataaattatagcaaacttgaagttcataaatggagttattttgccatgattaattatacgcaattaattgtaaaataatttgattaaattttattgaagaaccaattttttttttcattgttaatttataatactcaaaataaaaatatacatatattttgcacacagataaagtaaaagtgtattttaatattctataaattgaataataatatatgtataattttatttaatttttcttttatacttatttataaattaaaattatatttttattgataattattttactaa

SEQ ID NO: 143662 - DNA, 571 bp, Cannabis sativa
ttgaagttgacatagagctgtggaaaattaatgtgtacgactgtgattccagcatttgtcattggaccgccatggcacccatcttgaagatttggaaagaactgttgccctcactaatccatgcatccagggattttccacttaataaccagatcatggcgttaactaataaggagatcaccgtgattctgaatatgcatgcgagtcgagccactcacgacttagctccgaaggcaacaatcaggtacatagcgataaaaaagtactatagtattaagatatgatttacattgtactaactttatattttatgttgcatttagtggtgattgtggcgtttattacattgagtatgtgaagcatctcatgatgcgacgtgaattaactgatgtcacgcaaggccggatcaagttgtttcgtgaacggtggtgtgttgatttgttttaccagaatgtcgggtgattatatgtgtatgttttttgtaattaaaaatacagttatatattctgtttacttaaaaatatttttttggtatttagtcttgtaaagtctaacggtgtctcagttcttc

SEQ ID NO: 143663 - DNA, 671 bp, Cannabis sativa
tcattcattttatctatcattactgatgactcgataaacaatgtccaaaaagaaagagaaacagagaaagtggtaactgtaaaaattccaatggcatattcaaataaattctaaatgtagattcatgtagctaataataaatggtaggggtagaaagcaaagtatctaatagataattataaatacagaaaataatttttgaaagggtaaaaaaattaaaatcatttaaaatacatgtacttgcattgaagagcaaagtatagttttagttttatatggacacaaatgaactgagttattaactggattggtacatatgcactgcaccgtactacaagttggattcaagcccaaagagcgagcgtgggaaactcaaaaatcttgcaaatttgaaattttggagctacagatacaaattggagaaagaaattcccatgctacaaaagcatatataagaatccaattatactagagctatagatctcagaagatttgagagacggtgaaatcaggcttccattctacattttacgtgtgtagactacagccgattgagaaccgctcaattaattcagaggttatcaaattgttgttgagattttttttagaagtttatggccatcgctccattaattgcagggctagaatcacacacaatgagaaaaggaaca

SEQ ID NO: 143664 - DNA, 634 bp, Cannabis sativa
  modified_base (515)..(539): a, c, t, g, unknown or other
gttacaattaaatatttgcaacccaatatttatattgggttactaaaaatatattataacccgaccaaatcgaccgacgtacacccctagctcatagctatactacttttttaaaatgttattaaaggtgggtttgaaaataagtgtctgaatggagtagtgttttagctttgctaaagtatgccatcattttaagcttgtgggcttggtattcgcaaaggatttgattgacaacaagctgggaatcactataaatctctagtgattcagctttgttggccagtgccaaatgaagttctactaggagtgttttatattctacttcgttattagttacggtacacttaaactgcaatgcatagtgagtgcaaaatcctttaggagttacgaggatgagacctacaccatagccatgttcattggaggacccatctacgtaaagcttccaaggaggtccagaaccctcttgagctatagtctcaagtgtgtgtgtgctgggttttgtgccctaaatnnnnnnnnnnnnnnnnnnnnnnnnnttactaattaatataagatcagaaattgcttttatattgtatggttcacatgattcatttcatgattatacttaatgtgtaaattctattaagtc

SEQ ID NO: 143665 - DNA, 605 bp, Cannabis sativa
gagaattcgagaggaagattcgagaggaagatatcccgaaatatgcgttccgtactcggtatggacactatgaatttcttgtgatgtcttttggactcactgatgccccggcggcatttatagatttgatgaaccgagtgtttaaggactatctggataggttcgtgattgtgtttattgatgacatcttggtgtactctgagaccgaagaatagcatgagttgcatctcagagcggttttacaaaggttacgggatcacaagctgtatgccaagttcaaaaagtgtgagttctggttatctcgtgtctcatttttgggcacatagtggataaagatgggatcatggtggatccggccaaaattgaagctgttcgggactcgccagcaccgaagtcagctacagaggtaagaagttttctgggtttggctggttattatcgtcggttcgttgagggtttttcaaagattgttgtacccttaacgaagctgaaccgaaagaaccagaattttatttggactgatcggtgtgagaaaaatttcctggagttaaagcaacgcttggttaccgctcctgtactacctcttccttcagataaggaaaagt

SEQ ID NO: 143666 - DNA, 596 bp, Cannabis sativa
  modified_base (67)..(68): a, c, t, g, unknown or other
tcttggtccaagattgtttgggatagattcatcattcccaaacacaagtttattctttggcttgtgnnttggggaagattgaacaccaaagaaaggataggcaaatacaacacagccatcgattcgacatgtttgctttgtggacaagaagaggaaacaagcaaccatttattctttgaatgtgagtatagccgaaactgtttacaagggctaaagatttggctgcaatggagatcgactacaacaaatatgcagctgctagcaaagagtttcagcaagaacaaaacaatacctactgccagaagaagtgtcttgaagactgttcttgctgggctggtataccatatctggaaagccagaaatgatgtattttggcatcaaaaactgtggcatacaagagtcatcatccaacgggtccaacaagagagtaaactcaggattttggggctgcctaacaagctcaatgatgatgataagcagtggttattaggaaattaactagatagactttgtatgtattgattgagtttgaattgtatagattaattgaaagcaaattacctactgttgcccctaatttttcccaatatacgtgg

SEQ ID NO: 143667 - DNA, 653 bp, Cannabis sativa
aggttgtgcatgtgtttattctttatttctctttattaaaacatctatctattttaggtcaaatgaataaaataattttactaaatttcttagttttattaattagcaggttcttaaagaaacaaatctcctataaaaattttactttaactattatatatattcacattgaatattcttaaactttgtattagtttttctcattttttcaatacttttaacattatttaaaaaaaaaattaaaaattttattagtagtttcttttaatttataaattttaatattattacttttttatatatcttggtaacattttgtatctaatttaatttacttaaaactttatacaatattttcattttttttaaatactatcatgtttttttttaaataacacttcgattaaatattttctaacaaaaaatgatgttgtttattgaataatatccataaaattaaagaaaaaaaattaattatacaactaaaaaatacacataaccaaaataaaaactaagaatataactaaatatatgttgcgcgtaatattagcctagttatatattaatatataggttacgaatttacatgtgttatgagataaattttaaggccttttttatttttacacattaaaacagtttttttttttttt

SEQ ID NO: 143668 - DNA, 551 bp, Cannabis sativa
agatcctgaagactggtttgatatgtacattggctgcgaagactcgtttgactcatggtttagtaagtgttaattattcgccgattagtgaattatttattgattatttgaattgtctgcttatttgaaatgtgtaaattgttaaagaagcatgatcagttttgatatgatataaagttgcttagtatatttatgcgtgtgcggtaatgcttattagcattagttttagttataaagattctaactttgagaaaggaatgatcgcgagtgtactagaaggtgtacttgaagcgatctagtaagaataattacgagcctgctaagctcgtggtaggtggtgtgggtatgaattttccactacataagaccgagagtaaatgcatgctatgaagtaagagattacttgagtaataaggtagtagacctgtgtggttaatcccgggtagcataatgatggagaatgacactaggctgaaccgattggcaaagttttgttaaaatgcagcggctaataaggccgctaggaaggctttaaggtggaacgagtatat

SEQ ID NO: 143669 - DNA, 837 bp, Cannabis sativa
cttcaattattttgaaatgattgaatacataggtccgtgatttttttctatatttgtcttcttaattttcttttcgggttttatattttctattataaaaaataaaatacacactattttctactaataaatagtttaaacaaattgttatacatgggatcttttatttttggacgtatgaaaaaatatttgttttcaactttgtttttcaatgtataaattatttgattttttttaaaacttagcggaatttattataactaaaatgagaaccatattaaaaatattgaaaatgtaataaaacacatagatgtgccagtttagagacgtaccgatttaacacatgagagtgtgttctactgtaggaatgcccttacgtgcactcttattggtattactcatgaatgggtaatattgaatttttatgcttaatttttctatttaattagaaaaatatctcattttttcattatatgggttgaagctgttccattggttgaaaaaaaaaataataaaaaaaaaattggctaaaaaaatgttgaaaaaatattaatttttaacttaaatatttttttatagtgtaaaaagatttattttttgaaaattttccttaattgagtagttaatttaagcgtaaaaatttaaaattaatttcttttattatttgtcatcggatcacaatctaatagcttagtatttttaaaattaatatttatagttaaatttatttaaattagaaaattttgagttataattttatgcttaaattttctatctaattaaaaagaaatctctcatttttatatcatatggactgagattgttctatcggtaaaa

SEQ ID NO: 143670 - DNA, 1365 bp, Cannabis sativa
  modified_base (48)..(66): a, c, t, g, unknown or other
  modified_base (999)..(1001): a, c, t, g, unknown or other
tgtttaatttatcgttttagaatgttcatatttaggatgtttaaacannnnnnnnnnnnnnnnnnntaagatcctggtaaaataaataatccaacaacatattcaccaaggctcttcttccctctcagtttaacaatattgtatccaagatgggtgtcgttaacatttacactccatcttgagggggcctattagaattagttagttatattggttaattagttgttaggagtttaagtcaattagttaattaattaagttagttaggttcttcccctaactaacttcacttcacctactgcctatataaattcctctgtctattgtatccagcatacacagtattttgggtaataaaaattgtcttcttcatcttttgccctgttattcttctcatatgatatgtataacttctacttgagtatctccaatgagagttgttcattggagtagtctttccatacatgtaatgtggtcaaatatttaagactaaattaataattttatgtgaagtgttgttcaatatagataatggtcatatgactttttttttcttaatttatttattagaacaaaattattttttacttaaaaactttattaatttaatgtgatgtgagactaactattgaagtattttttttttttttgtaagaaaatgtgacaaatctcacgaagatgagagaaaaaataaaaaaaaaataatattattttagaataaaataaatattttgacaactacaaatgttgtccatattcgaggaactctaaagaatttctttccaaaattcaagaaaaaaaagagtaaattgcggcataaatacttaatgttttagattttatacacttaaatacagtatctttatttttagaggcaaaaatactcaatgtcacaattctcttacaaccgttactactactttcgttaacgcataaatatggatacgtgaaggatctagatgcattacatttatttatttttattttaaaacttaatannnttaatatcaaaaactaaatgctacttgtttaaaaaaatccagttctcataataattttcacctgtactgcactgattcactcagttataataatttagttttgcatctctcttattttttttttaaacaagtagcatttaatttttgatatcaaatatattaaatttgaaaataaaataaataaatgtaatacctataggtcctccacgtgtgcatatttatgagttaacggaagtagtagtaatggatgtaagagaatagtaacattagatattaacgtctctaaaaataaagataatgtatttaagtatataaaatctaaaacatgaggtacttaagctgcaatttaccaaaaaaaaaaaaa

SEQ ID NO: 143671 - DNA, 941 bp, Cannabis sativa
atgttcagaaccttcattatctcacaaccttgactttcttgttctttgtttattttttttcaatgtaataaagaaaagtagaatgtatgaacatgcctattccttttgcatcatacatgggtagttagattaaaatatataaattatgagatctaaaggccaacactttaaaaatagcatataactttaaactaactgtaaatatcaaaatttgaaaatacatttttattattataattatctggtatttttgttatagaatactatcactttttgttaaacatgggatcaccttttatttttggaatgagtttcaaaaattctggaaaaaattcttgaatatgtcgtgagttttggaatgttataattgaacttggaaaaaattatggtatttttattatagaatactatcattttttgttaaacacatagttttcaccttttatttttggaagtttgttgtaggatacgatgatgatgggtcaatgctaatcatgcagtttatagtaaattggttagtttattttgccaaattaataaatgcaattgatattcttcttcatcgttatcgccatcataaaaaatagattctcattattcagaacacatctttgaagttgaagaagctctaatctcatcatcaaaatcgttagtcaatcagattttgctctctttggtcgcccataccactgataaaattaaactaaaatgtcttattttccagttctttgtgtgtatatatatattttttgtttatttcccacaatcgaggacatatatatgatattgtggtttgcgttggaatttaatgtgtctccttagttgttcgttacctattcaagttgagtatatatgatagtattagcattgaccgccgatcaatattcgattgtggggtttatgcatttttttttttgaaaaaaagacgacatgcctatata

SEQ ID NO: 143672 - DNA, 926 bp, Cannabis sativa
ttaagtcgttttagcacggctgcgactaggattagattgatgacagcacacaacttacaacctttcaggcgaggatttctactgatccatcaaccgcagggggcgagttgtgggacgacttacaaggccatccagttagaaacatcactgagttcaacgaaagggctcaggttttcgttcagaaggaagaagcccgacaggaaatgaatttgttgaaaacaagctcgggaaacaaacccagcaatgtttcaataagtactgtttcaatgagaattgataactcgggggcttctgcttcgaagaggaaggacagttctaaggaaccgtcgaaggataaaaagaagcagaagaagcacgataagtacgtgccagtgtatactatttataccgagcttaataaaactcgggagaatatttacctcgcacatgagcaaaaggttgccttcggcaagcctgagcccatgaggaatgcgaggagcaaaagagatcctaacaagtattgtaaattccataaggatattgggcatacgaccaacgaatgtctccaattgaaagattagatagaaagtctcatcgctcgaggccattttaaacagtacgtgaaaagacagggccatggataggtacaacctagtctgcctaataatccaaacaaccaggggtttcaatctcttcctgttgaagaagagaacatccttgttattttgggagggccacatattgcagggaaaagcaataacgcctagaaaagatgtgtgacagagataaagaacgagcagtcggcattcgccccagaaccttccaagaaggtgaaaactgaagaacctcccattatattcacggaggaaaacgagaaaaatgtgagatattatcatgtcgatccatttgtgattaccattcatctcaccaataaaaggatcaagaga

SEQ ID NO: 143673 - DNA, 532 bp, Cannabis sativa
aaaaaaaaaaaaagtaatttttccttctcattttggtacctttcacaaagatcaaacctccaaaatacctccttgtatttggtttaaataatttgtattatttgatgttttctctttttgggtataaaaattgaaacataagaatgaattgtatatctatataggcataaatttatgactttatgaaacataagaatgaattggatagtttttctttcacaattcgttttcatatgagtataaatttatgactttttcctctaatcttttatagacatataaccatccatgtccataatttgagattgcttactggacagatattgcacaccccacccaacaatctacatatacaatatatatatatatatatatatatataaatacaatcacaaatatatatatctcagcaaaatatatatatatttgtaagactaactagtaatgccaccctgttggattaaaaaaaatcctttgtgggcacatatgtataatgtatatgctattataaagtgtgatacaaaattaagtg

SEQ ID NO: 143674 - DNA, 549 bp, Cannabis sativa
acttctgttactttattgatatagaataatctggattacattgaaacagagttttatttagggcataaaacccaacacaaacctctttaaaatctcatgttctttattgcttactggattttggctccatcttaattacatttcttatcacttattaattgactcattgtcgttgactaaaagtgaggtcaacattttggtgctttcattgggagcaataatccaagcttgctctttgccttaagtcttattagcacacaaaatggtggtgcaaactcgtagaggcgtggttgatcagagtgacccactgttagcagatcctacattgcagactcttgggaatacaagggtcccaccaagtaccaatcttgagcaaccaaacacgcaaccacctactgtgggtcaaggtgtgacatcccctctggctgggatcacacccggtgtgcaagagacaagaaataccagtttagcagccgatcagggtactcccagtattggaatttgttagcccaagatatgtttccaagagggggggtgaattggaaattt

SEQ ID NO: 143675 - DNA, 683 bp, Cannabis sativa
cagccagtcgatgctgacagagacttcctggttgagggtgtggactacgtcagtgaggagcttactgttgcggttcctcacagaaggcaaggtgccttgggcactaggtcagtgagtcctccgtccagggttactgaggtgcacctgccgactcttgaccagggtggctacctgagcgaattggactgctacattcctgcccacaataatcgtgccacaaaccctgaaagggggatgtgcactgggttgggtgctcatgaccagtaaggggcattgatgcctttgtaccaatactttaagaatgttgcagacttcttcggcctctgccccgcccagttcactcccaagggcattaagtatatgtctgccctcttcatcctttatgcctcctagaagtggaatatgccttctccccatgaagttagttgattctttgatttgaagtccacccctaagcaagccaggtcggttacttctatttctctcaactagacatcaagtggttgaacggcaccggggattcggccatcagcaaaattgcgcattttgttgatgagtacttcttggtggatggtgcgggcatcaactgtactcgttccagcagattccaacatatcactgccctcccctcactcttactgttagggatagagctcaatagcttgctcgactgccgggggaag

SEQ ID NO: 143676 - DNA, 1002 bp, Cannabis sativa
cttgatgacgtgtcacggcataccgatggattgtttttatataatatttttttttgtaatattaatgtatataatgtatatatataaaaatttcccaattttctaacctagttccaatatttgatgagattttgttttggaaaaataaaagacaagtaatagtaagattgaaaattaaagatgagtgagtatgaaaatgattttcaaataaaattattaagatattagaatccacaaaatgcaagtttaatagtatttataagtatattgattctcaagttttagatatagttgaaataaatcacacaatattttccaaaatatattttctatttaagcacaagtttctttaaaaaaggtagcacttttcttcacttataaagtgtataatttctaagcattaaatatgttacaattttatgaaactacacaaaattaaagaaactatgtttaggcaaaatataacacttatattctaagaattagatgtaaataatttaatgaaagacatgtaatcaaagagtattatatttttgcataataaataaccaagtgtaacatgctctaacaattaaaaatacatgatattgaagatgaaaaaaatatatttttgatagaaaaattcatgaattttgtagcacaaaagagaaatcaacatacaaaaataaatcctatctagttacattttacttcattatcatcttaataatcttaaaaaaaaaaattagaagatcataactagattgaaataaaaattacaaagtgacatacttgacatgctcttcaaaatataaaaatagtaaaaaaaaaaatggtccgggaatcagacgactaactttttagcttgttcttctagttctatttctggttgtatttgctgcggggtagtgtcccggctgatttggaagctattttgatagctgatttaatttaataaaagtaaattttttggtaaaaaaaaaaaaaaaactcttttaggtggattagtattgaaaatataaa

SEQ ID NO: 143677 - DNA, 964 bp, Cannabis sativa
acaaaacaacataattattcggaagatacctattcacagaagcacccattcatttacacatgttatatatgaaaaattaaacatttttgcaattgttaaacaaaacaaaaactttgtgtggtgccgccttccaaattaatttccactcattcttgaagccttataatctgataaaatctgcaaagttctcactgcgatctgtaaaggtatttttttgatgcttcattatttaaatttaatagcaataaatttatagacattctcactgcgatctgtaaaggtatttttttgacgcttcattattgtaaatttaatagcaataaatttatagacaaaacttaataaatttaatagcagattgaaagaaggagattgatagaaattttattttatatatgtatactatatatttgatttatatatacattatatatataaggtaacagaactacaaacctgggattatctttgatcattttcattattggactatgataagatcagtcctcttgctctgcttcccctccctttctctatgccattcccttcaatcgtttttttaaagcagaaagaatcggcttttgaagaaaatcgatgggtaaagaggagtcttcttcctctgcccttctctatgcctttccttcaatctttgaagtagtatcaattgatttcctataaaaaatggtttctatgtaacaaaagaaaaatatataaaaaacatagaaccatacaaagcatatacctgtgagatttagtgtgaatggccaaacattctccaccatcgaacactaacggcgccaccatcaccaccatcgaccataataaaattactcaaccataaaaattctagcttcttccgtaagaagagaggagaagaagatttcataatttggagttttttagacaaaataatggttgccctaagtgatattataattagatggaaaattacttagggcttgcc

SEQ ID NO: 143678 - DNA, 907 bp, Cannabis sativa
ggccgcatgaaagcagtcaattcgaaggccatggccacgattggagtggccaagaaagtgaatgtcaagatcgatgattaggaggggcaacttgaccttgtagctgttcacatggatgacttcgatgtggtatttggaatggagtttctagcagaggagggggccattctgattccagcaatagggaatctacgcatcatggatgagaatccttaaatggttcccgctaaagtgagacagcccccagaagtcaagcttctatcggccttgcaactgaagaagggtctgaagaagaaaaggccaacatttgtcattgctaccgtcgtgtatgatgcaaaaatggagcagtccactccacctgaaattgagcaggtgttagatgaattcaaagacgtgatgtcggatgaactcccgaagagattgcctcccaggaggggagttgatcactaaatagagctggtgccgagtgcaaaggccccagctaaagcagtataccgattgtcttgcccagaacttaaggagttgaagaggcagctaacagcgatgttggaggcaggattcatcaagccatcaaaggcaccattagctgccccttgttgttctagaagaagaaggacgggaccttgagactatgcatagactatcatgccctcaacaaagaaattgtgtgcaaccgataccccattcccttgatcgctgatttgtttgaccagctaagtggggcaaaatacttcacgaagttcgacttgagatcaggctactatcaagttcggatcgcagtagaggatgaaacaaagacaacttgtgttactcgatatggggcatttgagttatgcgtcatgtcgtttgggttgacaaatgcgctagccacattctgtacactcatgaatgaagtcttccatgaaga

SEQ ID NO: 143679 - DNA, 724 bp, Cannabis sativa
aatggtgatatgtattagtttagatataaaatattaggtatatgtaaatatagaaaatcaaatttccctttagtttatagttacataaacaaattcacacagcaggagttatacacgtcttcgacaatgcataaaacaaatgataaaaatatcgtatgtttcagtatttgcgtgtgttaaaaaggacatgactaaagctcctgatataccttttttcactttaaaaaagttgaggcaattggaaaagtgaagatccattgcataatttcttaaaatttagcattaggtgggagtgggacttattaaagtaaaaagcaagaatcctactaaagggtattatcaaagggaaatttatgtttacaaatacttaatatttttcccctaaacacataacatgtaatatttgtggaatatgacatattttacaatatctctaaaatacccatttacattatccatatcccctctcttcttctctctttcttcatactcatcggaccccaatcgaggtcaacccgtcggacccaattttttttttacacagcacatgcatcggaccccaatcggggtctctattggacccgtcggaccgaaaagtttttccaacacatgcatcagactctcatcgaggtcccatcgaacccgtcagacctaaaaacaaaattttttcgcacatgcatcggaccccatcgggccatcatcttccccaaactgcaattttccc

SEQ ID NO: 143680 - DNA, 575 bp, Cannabis sativa
  modified_base (250)..(255): a, c, t, g, unknown or other
gaacaaactttgagtaataaatctgcacggactaagtctgcctgaccaaacaaagcaagggcagatgatttgaacaacaaatgaagtcatttctccgagtcgtgcatcaagacttaactacttcagttttgatatcataaagctcaagcacacaagcaatccctacaatcatgggatcgtatcaaagggatatggcaagctatctgaatccctcattttatgtattctaaatatgtaatgtatgttcttnnnnnntatagatattgtaagcaaaaggaaaaccttccctcatgcatttagccctacaaatagtgatctatcctcactgtaaaagggatcgaaagaattactttagagagatctgagagaaaatacttagagatttcattgtgagagttttgagagaggaaacactgtattctttgttctcaagtcaatacaatctaaggggagtaggctattaccgaactatgtcttaattacatttcttaatgtttattaattaactcactgtcgttggctaaaagcgatgtcaacaggtagtttagatcctggtttggctaatgaaaaggtta

SEQ ID NO: 143681 - DNA, 592 bp, Cannabis sativa
aataattaattataaataaaaaaaatatactaattttggtgtagttttcaagagttaaatatttaaaccattggattaaataaatcaatatccctattgataggtaaaaaactcaatccctaccataatagcccaacaacaagtaattgataaacaaaaaaataaataataataaactgggaactgaagctttttttttttttgaaggaaacaggaactgaagctacgaatcaattcaatatatatattatatatatgtatacagccaaaaggtaggcactgaatgaagcataacgcaagaaaaaaaaactatgggacatatcgatgtaatgtactgaagcacgaatagatcaataaaaaaagggaaatttacacctcttttttctcattttctttcttttttactattacacggtaatatttatttctatactgtttttttttatactgccgtgtaacaaatgtatgttagacaatttatatatgtaaactgtaacatatatgattatgtataaagtgcggaattagtaaaacatatatgtactataacttaaggatcgaaatacctccgccattgattcttgagcttcaa

SEQ ID NO: 143682 - DNA, 1270 bp, Cannabis sativa
  modified_base (638)..(641): a, c, t, g, unknown or other
  modified_base (830)..(838): a, c, t, g, unknown or other
aaacgatgtatgtgtgatttggatatgattcatgttgatctatgtgtttattgatgtttgcaaaaattttaaataaaataattggaattttattctaaattattttagttggatagtatggaaaaaattaagcaattcattttttttacagaacttaatttcgattttatttgaataagttacgttttttttttgaaaaatcaagaaagggatgcccacgtgtgcgcgcgggcacgagtgatcactccgtgtgcacgcgcattaggacagggcttgtttgaaaaagctcggcagtccccctgaacagccctgcacgtgcaaagatcctgcaatgcaggatgcgtgtgcgtgaaatcctagatgtgcatccctcctgcgcgcgcggatggtatgcattgcatactatccgcaccaaatgaagtttttttcatgctttttcatggaattaatttcgaattttttgtataattttgtatttagatttttatttttcaaattttaaatctaattatcagaataaaattaattaattttagatattagtagattttgaacctgaaaatggatcaaatttgatattttacttaattggttaccttattttttaaaatttgaatattttatcttatttttaaatnnnnggtcagatattttatattttatattatttaattaattttataaaattgccttatttgaaatttgaaataagattattttaatctagaaaattttaaaaaaaatctaaccagatattttgtcaactttcaaaattttgttattttatttaaattgaattataaaattggataaatgatatttatttatcnnnnnnnnntattagatatttaattttattttcttttaaaataacataaattttgaaaagttagttggcatttttgaatagatatttaggttggttaaaaacctaatttttcaaatttataggtttaattttaaaattaatttcaaaaataataatttattatttagatgttttgaaaataatttaattatttgattaatttaaattaaataaatcatatatccaactatccagtttgttgcatgtgtgtgttttatatattgttattaaatattttttttgtaaaacctattattgtttgatctaaattgccatgattaacttgtcgacacattcactgattttaactaatggttcaattgtcaatagttcaaataaataatttgtaacaggtaaattttataatcttcttttatctgtatataaacctagtaacatgat

SEQ ID NO: 143683 - DNA, 549 bp, Cannabis sativa
cttaattcgatttgtgttttgttagctttcacatagaaatctagatgatgatatctcgttgatgatagtgattttcatgactgatgaagtaagctttagtcattcttttttgctttttgtttattttttaattttttttttccataattgataaattaattatttttcaaaacatgataattttaatttttgcagatttccaaatccactgtcaaaaatggttataattttaccattatatttttgtacgtatcagtggtcctttttacagaattttcactaatcttaaaactaaaaagacgactactataaagtgtctatttggatgcagaagtaagatgtaccctgatattgagatttttaaacaccaaaaggagaaacaataccaccgttatttcaaaaattattctgtggaatgtcatatatattaatagaagaaattaagataaactactactgaattgtaaaaataatacaatgactaaaataagaaattaattacataaatattacaagacatatatacaatatataaatattataagaaat

SEQ ID NO: 143684 - DNA, 1310 bp, Cannabis sativa
ggacccaaacctagaaccaaactctgacctagccccagacccaaaccgaaaccaaaactaaggcccaaacatgttcgtatacccagaccgtgaccgagacctggacgcgaacccggagaaggacctagatcagggacccaatcccagatctagactcggacctagatagggattcaaatacgaacttggagtcaaacccaaactagacctagaccgagattgaaacatgagaactagattcaaattcagaccccgaccccgacccagacccaaacccgaacccaaaaactgaatcgaaatttaaattgggacaaggacccaaacgtgaatggacccagatcgggacctaggacctgaacctatattggggagctagacttgggccccagaacctagacctagatcggaactcgggacacggacccgagcctagaactagactcgaacccaaatttggacccaaaccgagatcagaacccaaacccagactcggactaggacttgacccacgaccgggtcctggacttggactgggacgtaggactcggacttggattagggacctagacccaggacatggccataaaaattaggaccgagacctgacctcaaacccggaccctaacctaggacctagaccaggaccggggatcaaagtagaactagactaggacccggaccctgactcatcgcttggaactgacccgtagtcagtgtttggatctgagacccatacccggactcaaacccagacctggactcggaccctgacaaaaacccacacccgtaccccagacttgtgtccgagtccgacattgggtttgagtctaacaactagaatctgactaagacccagaactagacccctaccgagatgcatacccgaattaaaatcgaatcgggactcgggacacgagcccaaacccaaacatggactaggaccaagacccggaccaaggatctggctcgggattggagactcataccttgactcaagacccagacctagattggggtcccacactagaaattagaaccagaatcgggacccaggactttgactgtgacccaagccccgaccccggtctcggtcccagacctggacccagacacggactgggacccaagatccgaatcggaacgagaccgggacctaagattgggatacggatcttgacccacgacccaagggtgtgacccaaccgcttgtgggcgtctagatcttggaatcgtaccaagacccgaacttggaaccacttccaaacaaggacccaaacccaaaattagatccgagaatcgaaataagaata

SEQ ID NO: 143685 - DNA, 547 bp, Cannabis sativa
tattttacttaataaataattttgcagtatttcttttttttttttttttgtcacaaaagtctaggttgaaaataagagtttttttttaaaaaaaaaaatcaaaatgtaaacgcttcattaagatcattttgctttaaaattagtgtaatttaattatattttttaatttaataaggatttttttcttaaataataaaaggcagcgttactcatctaattttttttctcatgattatataaattatagttatttaagacatactgcaaaattttataaaattcggaaaaatttaacacaccgaaatctgctttcaaacagtgtgttgtacacgtgactattttattttatacgcgtgtaagtacacgaatatgaaacaaaatcagactaaaaaattcttccgtataccgaaataagaaaagggtgcatcagtacatctcttttaaggggtacactgtagaatcaccctggaaaattctttaatgcacccccttaaaatggatgcaccgatatatctctatcaatttttgtatctgaaataatttttta

SEQ ID NO: 143686 - DNA, 617 bp, Cannabis sativa
aagcagtcttgaacaaaatgtttgaagaagctccattatcgatcatggttctagccaccattttgtttgctatctggacttccgcgatcaacgggtcgttgtgcaggaatctgatctggacagcatcttcatcattgaaagttatggttggcttcctgctcgtggaactttgggcttcctctcttccacgaccaggatgacttcttcttgctcgtactgaactgttcgggcatatctctcttgagctttgcccgtatctccagcgatgtgtgggcctccaataatgacttggaagtgtccatctatcggtggaggtaacagatcctggttgttctgaccttggttggccttgacatacttctgtaagtgcgggttgttttttcttgatcagatattctatttcccgcttcaggttgtagcattcgttggtgtcgtggccggagtctccgtggaaccgacaatatttcgtcatgtcccttttgttggtatctttcctcatgggcccgggcttcttgtacagaattaatgactgttgccatatgcacactcactatatcttcagttagaatagtgaatgcagtgtgtttggcatgatcacggggagtctgtccagattt

SEQ ID NO: 143687 - DNA, 860 bp, Cannabis sativa
  modified_base (823)..(833): a, c, t, g, unknown or other
aaatatctaaacttataattaaataatatataaatattaaggaaattaacaaatttttaaatctcatcataatttaaaatttatgtgaaaaaatcaatattcaaattagtaaattccaaatatctaaaaaaaacaacttttattatttaaataaataaaaattatttttttattctgatatttagattttcaagttgaaaaattgaaatctacataaaaatctaataaattttagtttttattttgctgagaaaagaattttttttatcaaaatatgcatgaaaatcggacaccatgcaaactgtcctgtttcagcatgcacacggggctgcatggtccgaaaaactcgcacatggtcgctgaaaacagaggaaaaacaggggacattgcatggtcacatgcgcgcgcgcgtctgaggagcatccgctgagaaaatcagctcctggacacccttccgctcgcggaatgaagggctgaccaagggatctcgcccatgatcgactcctcctttcccgattttcaaaaattcatatctctttcattcgtaaaaaccaaaattgcttaattttatacaaggaatccaaataaaatattttcagaaaaaaaaataaaattattttcatggaaaaatttcgtaaatcacataacatcatcaggtaacacataaaccaacatgaacacatccaaatcaacacaaaacatcgtttgaattcataattcatgaaactaaatcattaccatggctctcaggccagttgttggaattattttaccaggatctaggtttactatcgtgtatattgtttaacatcctaatatgaannnnnnnnnnnatgtaaataaacacatataaagttcaa

SEQ ID NO: 143688 - DNA, 570 bp, Cannabis sativa
  modified_base (127)..(131): a, c, t, g, unknown or other
tgtatacaatatattaaattttttcgttcttcgagaggattgcaacctgggtgaaagtggatgtttgagaccacttatgtagacctaaggaagccttttaaagttgtataagggtcggaggtcactnnnnngagtttcaccattgttgaagcttcgaaggcacgacttgaaagagacacgaattcgaacatgtttaagcttgttcttgggtcaagggaggttagatatgagtgtatgggaccctaaggattattttttacgtaagaaaatgaagctttaacatccaaaacaaaggaccaagattttgactccattaaagacggtacaccgccaacaaaagagacaactccgatctgccaacttggtcctcttttctttggttgatcttgatccttttgaggtcatgagcactgtggagagcttccccaatcgaaaggactcgtcaagagcaatcggggacaaagttacaccttgtcggcgacaaaactgacgtgaacgccagcgaccacgttctgagcagttctaaggtgtttttctcaaatatttttgtagattttgattccttatttt

SEQ ID NO: 143689 - DNA, 735 bp, Cannabis sativa
atcacgtttttcattaacctcgtttattagcaacgagctgcacatcaagtttaaaatcacgttaacacgcctaggctagctagggtatttcaagtaaagtatactagtatcagatgtatggagtatatgataactctaagatttagagttatttttatatctttaagcttgaattttaagctgaattgtggagtaattagtgtgtatacttgtataattgtgtttagtttgttgtgtcattgtaataaatggaagtgtttgtgttagtaagtgtttaatagacttatgttgtttttatgtgtattaagcagaaaaaatacgaaaattggtatttggaaatatttgggacaacaaggaaaagagcagaataaggcttattgctgactggcattactatagcaatcatcgcgtagcaatttgtcagcccactaagtgtatttaggcagaaagtccagctggcattaatgaagaaaaaagagagctgaggtggcgaaaatgtggccaatgactcaactaatatgtggaaaatgaagggcaagtggactatgacttggatttccaataattggggtaaactttagtaccctaattggggagcaaaagagaaggaggataaatagaaaggggtggttgcacttgaaagggggcagtacaaaatttcagaaatctaagtacagaaaaaaaaaaagagaaaggagagagtacaaagaagagaagaagaagactaagaagaag

SEQ ID NO: 143690 - DNA, 610 bp, Cannabis sativa
  modified_base (540)..(541): a, c, t, g, unknown or other
ttggtatttttgtatagcggcccagtttagttagacattgggaatgtcgagattagtcgggaatttagaatttcccaaaatacccttagtacccttttatggaatttagaatcacatcttggtatttttgtatagcggcccatatgtgatttgtctttagtgatggttaattaagttaataagctgatttatttcctatgttttaagctgagattattatggtaacactaggtttgaattcatttattcaaaaattgaaatttggaaaagatcaagagagaggctttttctctcaaactctttctttctctctttaagcctagagcagctagggtgtgggggtttctttgtgattttcaagctggttttagcaaggaattagtgatctcaagttcttggtaagcttcttgtaacttcctttttgatttcttgatttgtaaggaagagaatagttttgcatgcttgaagtttatttgctgtggttgctgtagttggttgttgttgtattcaaaggtttaatttgttgggttttgtgccctnnataaaacacatttcaatataatcatatttacttattaataaagatcagaaataacattttatgtcgcat

SEQ ID NO: 143691 - DNA, 579 bp, Cannabis sativa
tctacatctaggatggtattcactcttgggggtggagcagttgtttggagaagtgtcaagcaatcagaaatatttgactctaccatggaggtcgaatacatagctgccactgaggctgataaggaactagtctggctaagaaagttcttcacagagcttggtgttgttccagatatggaaaaaccactagtgttactctgtgacaacaatggtgctatagccaacagtaaagagcctcgaagccacaagaggagtaaacacattgagagaaaatgccaaatcatcagagaatatgtggcaaaagaagacgtactagtagaaaaggttgatactgaagacaacctagccgatccattcaccaagactttgacacataccatatttgaaaagcacagaaagaatttaagattaattgaaatgtactgattgttttatgttagtgcaagtgagagtttgttgagtttcatacccaaactaaaactctatttcaatgtaatcttgaatattcatctatcaataaatgaacaaaattattttattacttatttgatatattgcttggttcacatgtttgcttca

SEQ ID NO: 143692 - DNA, 1257 bp, Cannabis sativa
  modified_base (1011)..(1011): a, c, t, g, unknown or other
atcagaaaagaaaggcacctactgcatccagtggctcaggtcagaacaagaggttctgagggaaccagagtcgagataatcgtcaaggtggctccgaaacccgatacacttacccagagtaccctagttgtaaaaagcatcatttcagggagtgtaaagggcagggatgcttcctgaagaactaaagactgcagtaaaacccgctccagcaagggtgttcgcgataactcaggctgatgcagaagccaacccttcagtggtaacaggtcagctctcgttcaacaactcttatttctctgtgttgtttgactttggggccactcattcttatgtggcgtgcagaatttttagtaaattggatagacagcacgatagttatgaatcagggtttggaaccctactgcctgacggagaattagtcatctacaaaaggtggattaggtctatgctgatcagaattgaggatagggagttgagtgttgatttaatagaaatgagtttagcggattttgatattatactgggaatggatttcttgtccaagtactcagctagtattgattgtaagaggaagatggtaatcttccaaccagaaggcgaagaaccatttatttttgttggattggttcagggatctcggatcctagtaatttcagtactaacagtcagggaaatgttatgagagggatgtctagggtttctggccgtggtattggataccactcagcttgactctgtttggccataagacataaggtggttcaggtacctggagcagaaccggtttccaaggccccttatagaatggctccagcagaacttaaagaattgaaaattcaactccatgggttgcttgacatagggttttcacggcctagtatgtcacccttcagagctccaatactgtttgttaagaagaaagatgggtctttgcgaatgtgcattgactactgggaattgaataagctaacaatgaataataagtatcctttacctaggatcgacgatatnttcgatcaacttcaggggaagactgtcttttgaaagattgatattcgatcgggctatcatcagttgagaatccgagaagaggacattccaaagacggctttccgtactaggtatcgacattatgaatttctggttatgtcctttggactaactaatgttcccgcaacttttatggacctgatgaatagggtattcaagaatttccttgatatttgtgttattatatttatcgacgacatccttgtg

SEQ ID NO: 143693 - DNA, 617 bp, Cannabis sativa
  modified_base (556)..(560): a, c, t, g, unknown or other
aaattatatttgaagttttggagaactcttgctactacaaattagatagtatatatatataaatatatatatatatattattttgtataggatctgacaagttttgacaagttgtaatccatataaattttctctaccattacattttcttaattaaaaaatctttaatattgtaaacttcctctctatatgtctactcctttaaggatactggattctttacttttggcaactacatctgtgttagtcaagaagtaacactattagttaattcattattggtacaacgccaaaaactatatagaactctccataggctgaataagtatctttcctataactttaacattcagtctcactggtagagttagacacttcagatacacttctccaaaattactactctaccccagagtagtaatttttcaaacttcattatacataatatacttaatttcatgaaattgatgcacgttctttgaccgaataaaatggataaaattgtaagtttaaattgttgacttattcagccaatgttatatatatatatatatannnnnactagaagaaagttacgtgcaagacacgtatatttagttttatgttatgtgttctat

SEQ ID NO: 143694 - DNA, 566 bp, Cannabis sativa
  modified_base (143)..(145): a, c, t, g, unknown or other
attttatttcattcaaaaaacaaataataaaatgttgattgaatttgctgtaatatgtaatacaagaagtttttttggttttgattaaaatgattaaaatagaataattgttagagagtcccacattaccaatgtgtggaaannnaatagaatatataagaggaataagctactccctcccattgccaacattgccaattattggttttgggatggaacctcattcatcttattcctttaattctaacaataatgaataacataagagactagagtaggcctacaaatatctttattttcattagatctgttcatttttattatatgcataattaattatacaattttctattttttattaggattctgattgtatctctatattcgaattattttagtttgggtttaactcaatcgtagagtactcagcttttaagtacggctagcattttttacacatttttatgaagtaacgaattcatctatactatcaatagagtttgtaagaccccgactgatcctgaaaggaatgaatggaaaaagcagcatgtcgtatcaatagagaa

SEQ ID NO: 143695 - DNA, 965 bp, Cannabis sativa
tttattgagtctcatcaaccaaataatctcttgtttattaattctatgattactccactataaatatggaattgtactcttagtaattatagaattatatttattgagtttaacaatagttttcattgatgttatacccaaaattcggttgccatctcagtggaggacacgtgtcaagagaaagggaatatggatcagtgcaatcgctttttatggaataactctttaattacgtaagtatcagggtatatttgtaacctgctgactgtaaggtcttaggcgaggaattaatatacaaactggtgcttagtatattagcgagaaaccatatctcattgaaagcgtatagcgaggcatcaaggacagtacacataggaagacgaaagtgacacatatcaactgcgaaagcccttaatatataatgtacaaactaagtgtaatagtcggatcggctcgagacccagtaagcgaggtgcccgtctcgctatgggaaggcttcctgtaacttcatccagttaacgtcaatgaggcttacaaccctaacgagtcagaagctagcattcaaacgagcttcgaagagccctttgtaaataagaaccgtgatcgtcacaagacatgcatcgtcgacctcggaaggaaaaatggcctcaactcgctattgagatcactggaaccaagcttctgtcgagatatccccagatactacaattaaagacgtgtttaatacacgatcattttgacccaataaaagcgggaaaatcacagctatatgattttcaaatcataatcgcatttaaactacgtgatatgtaatcaaacctcagattttagaggatgatcattgtaaacagattgcagtcaactttgtaatcaactgcacactatgtaattataaatagtggcaaacaagatcaaaaaagggggtacaaaaaaactcatacaaaagaggccctgaaaaacaatca

SEQ ID NO: 143696 - DNA, 594 bp, Cannabis sativa
  modified_base (319)..(322): a, c, t, g, unknown or other
agtttgttcggttttgtgccttaagtaaaacctatttcaatataatcagatttactaattaataaaaaatcagaaatcgcttttatattgcatgattcgcataatttattttatgactatgtttaatgtataaattctattaagtccggaacatatgtaaatatatgtatgtatatttgttcatggttatagtgctgtcagcacagcagaatataatcatgattatatgttcaaaagtttaattcccatgatttgtcaggtcactggatttagactggcatgataatcagcgatgaggtatacttacaccttggataannnntatgtcctttccagggcattagcatagtttttaccagtatcagatgtatggaatatacattggaagggaccgatattgaactttgataagatatcataaacttactgttgcccctcattttgtccaaaatacgtggaccattcggatgatgacacataggtagaaagggtttggcctttatgtaattcagctaagttttcttaagcgtagggatcaaccttagacatgcctcctggagaaggcatgtaagtctcacatactccaggagagca

SEQ ID NO: 143697 - DNA, 1095 bp, Cannabis sativa
ttaatttcattgttttagaaattcatatttggatgttaatgaaacatactggttagtaaatctagattctggtaaaacataattccaacagttgcagcctttaaaactatctgagtggaagtgggaagatatcacgatggacttcgtggttagattacccagaaccacgggtttatttgattcaatttgggttgtggttgatcaactcacagagtctgcacattttctaccagttaagacaaccttttcagtggatcactatgcgaatttgtacgttaaagagatagtaagattgcatggtgtgccaaagttcatagtttcagatagagatctgaagtttacctctaaattctagcagagtttgcaacgcgctaagggtaccaaactgaaattcagtacagcttttcatcctctaaatgatggacagtctgaaaggacaattcagatactggaagatatgttatgagtctgtattatggatttcgaaggctcctagagtaagtacctaccgttgatagagttctcgtaatagttatcaaagtacgatagggatggcttcctatgaactgttatatggcagaaagtgtagatctcccattcattgggatgaaataggggagaagaaatacttagctccagaattagtacaacggaccaatgaagcaattgagaagattaaagccagaatgcttgcctctcagagcaggcaaaagagttctgtagatctgaaacgtagaaatgtagagtttcaagtaagggatcaagcgtttcgggaaaagaggaaagttatgccttagatttacaggatctttcaagattctcgggaaggttggacaagtggcatatcgtttaactttgcctccaactctttcagcagttcacaacatattccatgtctctatgctaaggaagtacgtttcagaccctactcatgtattaagttatgaaaatcttgagctgtaaccggacttatcatacgaagaacaaccagttcagatctagcttagatagaaaagataaggtccttcggaacaagaccatagttttggtcaaagtactctggagaaatagcaaggtggaggaagccacctggga

SEQ ID NO: 143698 - DNA, 621 bp, Cannabis sativa
caatatttaaatagacaaaaaaaaatttgcaaacatagtgattattatattccataaaattcaaataataaagaaaaaaataacgaagctcgaaaaatgaaaaaaaaaaaaattaaagaatgttcaaatattagaatgtcatataataacctataagcttataccttcatacatatacaaatattcattcaattatttttttatctgattactttttataaataaaataaaaaattattttcaatatttggacaaataaaatttagagaaaaatacttatataaacttacttaaataaatttagtttttaaaaagcgtttttaattttataaattaaaaagatatagaaatgtaaaatagaaaaaataatctcaaaaggaatttaatctataaatctataaataataataaaattaattaatatttatttataagattaagtatatattattttagaaaaattattacttctaaaatataattaatatgttgtatattattatgttttttttaaattcttctcaaataaaacattaatcaattactcataagacaatgctatttttttttgaaagatcaaaatgacataataaaaacattattcataacctaattagataa

SEQ ID NO: 143699 - DNA, 683 bp, Cannabis sativa
  modified_base (226)..(246): a, c, t, g, unknown or other
attaaaaggataaagttatcttttaatttaaaatatgactaatattaaaatatctgatcttataatcaaataatatataaatattaaaaaaattaacaaactttcaaaatctttccacaatttaaaaaattaaaataatcaatttttaaattcaaacctcaaaatatcaaaaaattaataataatgtattaaaaattaaacattattaatttaaaattgatatttnnnnnnnnnnnnnnnnnnnnnaatattttattttaattttagggtttaaaaattgagaaaattcggaaaattggaaaaaaatcccacaaaaataggattttggggtgttgctgccaggagggctgcatgtgcagcccagggaggctgcaaacaggcattctgcgcacgcataagaggagtttgtagcctcctgaccgacgtttctccgtcagctgcagcatgcgtgtgcgaccggattgtgtttgaaggctgcgtctagtgcaaggtgaccgaagcttcagataggaatatgtccccttgtctgcgcgagtctggcttccttgtccgaaacctggtgcgtgcgattgagcaccatgtgcaaacattcttaatttttatcagaatagagttccgtaaaaaccaaattgtttaatttttcacaaggaatccaaataaaatattttcagaacgaaaataaa

SEQ ID NO: 143700 - DNA, 509 bp, Cannabis sativa
atctagatcttggtaaaatattcccaacacaaatatagtgtgtttgatttgatcttatcaagacacagtcgaactcattaagggaaaataagataagtcaaagtttccataaaaatcaaactttccataagagaaattgtaacgccctaatgctaaggcacgctacagtactttttcaattatagtgctatctttgctaaccaaagatttctttctcaaaaaatgtatcaaattaaaacttttataataaatatcaaactttataatttacatggtgatttacaaaatccaggatcccaattctaaacttaggtcgcacagcgactacaaaataaaattcccaaatgtcccgagatcgaacactccaggtcacgctgccacgacatgtatacaatcgcatcctagctaggttcactcctgttcagcttttgcctttcctttacctgagttgacagactcagtaagaaaagcatataacatatcaaatgatatcgacttgtatctaggcg

SEQ ID NO: 143701 - DNA, 522 bp, Cannabis sativa
ctcttatgcagatatgtatgattctctactctctagtccaactctggtgctaaaggaagcttggtcccctccccctgaggactggataaagctgaactgtgatgtgaaagtcggtctggagagttcgtgtattgcggtggttgctagagatcatcttggcagagtgattaatgttcacacggctcgggaggagttctcggatgccctgtgtggtgaagctgcggcttgctgcttggctgtatcagttgcttcagattgcggctataagtatgttattgtggagaatgattcgagagtagtcatcgacgctatcaatgggaatggatctcgttgggccttagagaactacgtctcattttgtactaagtcatctcctttatttaattcctgttgtttttcttatgttagcagatcttgtaactttgccgctcataatgtggctagatgggctttctcccatcagttgtatggttctatcccggtcccttctataccggatgctattttatgtaatgaccgtga

SEQ ID NO: 143702 - DNA, 635 bp, Cannabis sativa
tcaattatttaaagttgttgtcatgtcattatatctcacccgttgtcattaccgtattctatttatagttgttgtcattgttatccccaataagtttactcaatacataataatacaaataaataatataatgaagtgctaataaagatgaaaagattaaaagttaaaaaaaaaaataaataaataaacactacaatgttatatccatagaagcaagattaataagagatagtgttaaaactttatagggaagaaaagattaaaaattgagaaatttataaagaaagcacttaaaattaagagatctttattattaataataataaattttactaaaatattaaaaaataaaaaatgagaaattatatacgatataagttaaattaccatatatataagttaaattttaattttattatgtaacatatatatcatttaaatttaaatatttcaaaaaatgacttattctacatcataaataatttgaagttatcgacaacggtaaagtcgtcgattataaaaaaaaaatgtttatatttctccaaattattgagaatattttgatgagtgagaaaaagattgagaatatatatatactagcaaaaaactacgtgtgaggcacgtatactaaattt

SEQ ID NO: 143703 - DNA, 972 bp, Cannabis sativa
  modified_base (392)..(418): a, c, t, g, unknown or other
aacatcattgagaaagatagtaatattaatgtatgttaatgaagtgaatgagtttaagtagtagaatttatatttgggatgtgaataagctcttgtgcggtaaattttaaaaacttttttgcattttcgccgaagaatgttgctattactgagcctgtgtggtgtgttagttgagcttgaaagcgacatttaatatattcaaatacaaattaatttatttaagtaacaaattatgagaataagatttgtgctaaattgagttaatataaaccttggaattgtctcaacagatgattcgttgcatatgtagcatttaaaacatgatgtttcattgtcaagatctgctttttgacggcatcttgtgtaagccatgtaccagaagggttgtcttnnnnnnnnnnnnnnnnnnnnnnnnnnnatccaaaaagtagtttgctaataaagcataatatagttattgacataaagtatataatattatgtaaagccaaaaataattataaacactgagaaaagaaactaaccagttaattaaaagttgttacctcttgtggaagattttgaatgccattaataataatgatattattatattgaaggtttcttagaacagtttgggttgggaagagtctcttctcactaataatggcagattggtattcttcattgttaatgctcctattaatttataggataaaattacaagatatataagaattatttatggataggtgtaataagaaataatatataaaaaagtaagtataaattagtttactattgacgaagctcatttatttgtggaatgttcgtaaagttgatgataaatgaactttgttgcttggatgataaagatataattattgaattattaaaaaaatatattataagatgacttttaataatactaaataattagttgaaataaatctaaccattgtgtgaaacaactttcaggcgtgttcctattat

SEQ ID NO: 143704 - DNA, 568 bp, Cannabis sativa
ttccataatactcttttcaaacctaaaaaaaagatggcataataaaataccaattgtgagaaattttttttaatctacaggaaggcttttaaagcttgcatatgttcaccattatcaacgaaaaatctttaggattgtttgtataccttctcctctaattcgctgttcggaaattatgaatgaattaaaacgagcaacaaataatagggttactataatagaatcttttataaagacaagtgagaatgtaaatcttctttgattcttagttcaaaatgaacttcttagcaatgaatttggtttatttctttatgtttctccatgttacctaatgaatattattggtgaaaaacctatgcttaattaatgttctccaccccattaggcaactttaccaaagataaatttcattgttctttaagaatttatttattcattcatggcatattgtaccacaatttgaattctgtgcattccataatttaatttgtgtctcaaattaatattgtagttagactcttattttacataatgtaatcactaaaaaatattaatcttattgttctaa

SEQ ID NO: 143705 - DNA, 699 bp, Cannabis sativa
atcttcttcttttttcttcatatctattttatattattctatattattttataatatataatgtattttaagttgagttgaatttttaattatttatcattttcttaaaaaaattatggctaatgtttcatgacttgaaattgtgtcaaatagacttaaaataaatttttatagttaaatttatttagttttcatcaatggataatatccattgagaagtctttcatacatatatacatacatacttacatatacacatacacatatatatacatacataaacatatatatatatatatattttaaatacatatatatatataaccacatatatatgatcaataatacacacacattaaaatatacacaaataaatataggataatttcacaaatacacaaaacaattaaaaaaaattataaaaataatacggtttcacgaaattttaaatattttttttacagattttttgattttatttacagaaaatacggtcttttatgttattttttgttattattttgttgttatttagatgttatttttgtgtagttttcttgttgttttcgtgttgtttttacgagaaaccgtaaaaatgtaaaaaaaatttcattaaacgtaaaaatgtaattatttttataaaaatagaaccttatgtaattattccaataaatatacatataaattctaactatacac

SEQ ID NO: 143706 - DNA, 720 bp, Cannabis sativa
  modified_base (35)..(51): a, c, t, g, unknown or other
gaaatgtggcccgaacccatctcagaatatttttnnnnnnnnnnnnnnnnnaattcgtactactaagatgtgaatattaagattggtttctcgtaaaaatttgttgaaatggccccctaattcaaaaacctaaaatattcttctttttagggtaaattttaacaagttttttccttactctcacacttgttagtgttctgttaaaatcttaccctttacatccccaaaaaatcgtgaaatttcacgagaacgaagccaagaccatattgcattacttttctatttgacatgttgagagaaaaagtagttttcatgcactaacaatcgttttaattgaaattgtgaaaatctcacatttttgatagtggtacccttttgttaaatgtggcccggacccatctcagaatattttttgctactagtcacaatgaattcgtactactatgacgtgaatatgaagattagttttacgttaaaatttgttgaaatagcccctaatttaaaaattaaaaatattcttctttttagggtaaattttaacaagttttttcattattcttacactcgtaagtgtttagttaaaatctcaccttacacatctccaaatatcatgtaattttacgaggatgaagccaataccgttgtgcatcacttttctattggacatgttgagagaaaaagtagttttcatgcactaacaatcattttaattgaaattgt

SEQ ID NO: 143707 - DNA, 849 bp, Cannabis sativa
gattttcattttgtaatgagctagttcctatacaaccaagccagcttataaattatttgtgcatgcacttaaagtgaatggtgaattggcttggatagaagattatctttctctaacaaacttatccttcccacctttctgccatacaagcttttcacagctcagccatgtagaagatattgaaagaagaaagaagaagaagaagaaagttgttattgttgttatagatctgaaaggtattacaatgaatatatacacatattgactatagcaagaaaggaataacagaatcagttacaatcacttactgtaagtaacacaaaccacactcctaactaactttagacaactccacttcttttcccttacaagccaatcatgttcaatcattcaagaacttcagcaattgattgcttcagtgttgatccattttcaaccatgttaattgaacattaaaaaaataataagaataagaacaaaaatatagccacaaacaagtctaagaaatacaacttctaaatttatccaatattacagacaagtatctatctattctattcttaacataccccaacccaactaactctgccactgaattttggtaagtatcccatcagtgtaggtggtgataagttttactaccaaaataaactaatcaaaggaacacttgagtaatgtccatttgactggattgatgcacacatgaactatttttggactcatacaccaaggggatcaaagtttcaagaaactaaagaataaaagtacaggaacctataaataacattggcattaatttcttaagagatatgaacaactattgcacaaaagggatcctaaataaagaaa

SEQ ID NO: 143708 - DNA, 520 bp, Cannabis sativa
ttaattttttttaatataattatttacgtggaccaataaaattgtgccacgtgtatattgtgtccacgtggacaagccaacttggtacttaacagctaaatttagagggaaattgtaaattgctaacagaatagtagttttgggggtaatttgggttgtgggggtttaatgaaaccaaaacgaaagtattgggggttttgccgccatttaccctactatataaggacgtttaatatggtcatttgtgaagacaagttttatattaaaaaaacactttgttagaaaactctaaagtttgataattctcaaagttaatttttagagaattcacatagtgcttagagataaaaaaaaacaaaaaattaattttttggacaaatataataatatcttattcaaatgaggtaatcctcacttctaatcttctttctttcttatataatatactagaagaaaattacgtgcaaggcacgtatacttaattttatattagatgttttataattaaattaaaatcata

SEQ ID NO: 143709 - DNA, 1302 bp, Cannabis sativa
  modified_base (1262)..(1262): a, c, t, g, unknown or other
aatcaatctccatgatacccatcttgatgcttgtaatcaataactattctgttgagtgaaccgtgaaggtctctccccaacttcaattgatggcgtcctcgacaacatgcccacatgcaaatgtctgaccgccccaactcttcatgcgcaccatctaaagtgcatcctgcaggatgttctcgagtcaactaactcatatagcacccctgttgatttccatatgcatgcattatctgcttaaccttctaactgattcacacttgcatcacgcccttctggctcccacgatgcactaagttccaatgatgtagccctctggccttcatgcaaactctagcacccttcttgacctttgcaggcaaacatgactactaagtctcactggcacggccctctggcctccacacaaactctggcgccatctcaacgcttgcgctcggtcttctcagccgtgctggctactttgatgcattcattgcacaactccgcatctctatcgttgcctttgtgtgacttacgccctctggggatttgacaagccaacacattccactcaaccgcctcagcgcttccatatggatcaaataaaaatcacatctaaacacctccaagtacaatcatcctctgacgattgcggcacctaaccgccttagtctccatgtgcgtccctcttgacacacaatgtagcaactgaagcattccatgtctatccctatttgaaccaactcggttatcaactctcgacctctgtcgttactaacaagaatctaaaggtccctgtcctacttcctcacacatgccaacaagcttccttttcaacaaaaacgccttctgcggcttacgatgtcactaaggcaaacttggcctagtttcccaagcatacaatacggattgtccccccaatcttgtatcatgcaaacaagtttcaaacatctgatgcgcctctccacaattgcatgttgtagttgtctttctagcatccttcctcacgcctacatcctctctaggataggccaactaggttcacctcccactgagatgaacttggctctgataccaattgtcacgggctcaccttttcaggcagcggaacacccgtgcggcaccttgacttctataagccaaggtcagccttccaaccatccgagtaacaatgggctcattttttgcgcgaccgtgtgccttgtgcacacttccgtctcttgaacgactcctgccgagtcctgctcgcaagcatccatgagtgcatctatgcatcgagnctctctagccaagatactcgcattgtccataggttcccac

SEQ ID NO: 143710 - DNA, 575 bp, Cannabis sativa
tgaattgctctccaaagaaaaatgcgaaccttagacggaatagaaagagcccagaattttttccatcacgacatggcagcagtattgctggtgttaggctgctgttcctccagttgtaaggctaaactataacctgacttcatagtgtaacagccattgttctcatgatgccaaagaagttgatcagtttggttaaaaaaggagagaggaatactcattattttctcaacatcagaggctagaaagagagattgtaaaagggttaaattccatctgccattgtctagaattaaatctgataccttcatatttagatctctgcctttgaatagcaaaggttttaaataagtgataccaggtatccacgggtcagtagcacatacaatggtttgaccattcccaactttccacctaagaccttcaattaagagctccttaccccacacaatgcctctccaagtaagagaagggtatagaccagttccagcatccaggaagtgagaatttttgaagtatcgtggcttgagaacacggtgaagaagagaagtaggatctgaaaaaatccgccatgcttg

SEQ ID NO: 143711 - DNA, 983 bp, Cannabis sativa
cctcagcagaacttttggacacagtggcttgtttctttgtcttccaagagataaggcagtcacctattaagatgcagaagccggtgatggatcgacgagttgtaggacaagttgcccagtctgaatcagagaagccacggaggtgtagagaagatgtagtggagtagaaaatgccttggcctggagatccttttaagtatcgaagtaagtgatgaagagcttgtaattgtgtggtccgagggcaagacataaattggctgagggtgttgactgcgaatgtaatatcgggccgtgagagagtgaggtatagaagacggccaatgagttgtcgatagtgggaagggttgtcaagaaggtctccttcaacatcatcaaatcgttgccttggatccattggagctttagccggtttgctgctggtgtacccagtatcatggagaagttggagggtatacttgcgttgagataaaaaaaaaggcctgttttggctcgagctatttcaaagccgaggaaatacttaagtggacccaaagttttgaggcgaaatctggactgtagtgagtcttgcaaagcatgaagtatgtgaatgttggggccggctatgatgatgtcgtctacgtatacgagaagagcaacaaaggtatcattggatccttttgtgaaaagtgtgtagtccgcttgagattgagtgaatccttcatgtaagagggcgtctgtgagttttttataccattggcgcgacgattgacgaagtccataaatggatttatggagcttgcaaacaaggttagtccctgtgacagtggatggaatttggaggcccggtgggatttgcatataaacctcctcctctaaatctccattcaaaaaggcgttgttgacgtcgagttgtaatgtgtgccattgtttgatagtgacaatggcaagaaggagcttgaacgtaaccatttttgcaaccggggagaaggtgtcaaaaaaatcta

SEQ ID NO: 143712 - DNA, 553 bp, Cannabis sativa
ggcatatttttatcattgccaatggttagtgcttcgaactgagtaatgagatcagcagacaccccctcactatgctcaacaaagggagtgtcttctaaagagtgttcagatgtgcaacacctctcttcttgaactttttgaacaaagtggtttcctaattcctgaacgggaattgtacgcatggcacgagctcttgattgagttacagggcccgtgtaggaggtaggcttaagagttgaagtgacccttgttggtcggtatccctggaagaacatacagtcaccatgttcttctcagaatgagttcgggcttgttttgggaacccttacattgtcacttctagccttctttgggaaggagaaaggtgtcctacacccctcatctaataaagggtgttcattgatctcagcagatgcccctattgacattggcaattgacagggactacgatcggaggcctaattggtgtgcctcctactaattccctcgtttcaagagggtttggtgaagttgaagtttttttccctttcttgccttttgttgccttcctacc

SEQ ID NO: 143713 - DNA, 527 bp, Cannabis sativa
tttaagttttaaaatcataactaatacaattaaaataacttcatgctttatgctttacattgattatactttttttttactatacacactattccacttaagtttattaatttactaagtttttatgattattttttcttttgaattctctttgagacatcattttttttttcaaaaatatatatgtaatgtttactcgatgggaatccttcccccgtcgggtaatccccgccccacccctgctttaatttaaataggtattggggcgggtatgggggtgaatttaagaagcgggtatggggtgggggagcaatccctgcacccgccccaccctgtttacatccctaacttgaaaggagtaccgagacgaagtatgacgaagtataatgaagtataatttagtataatttacaataatttacaagaatttacaaggatcatggacatacccagattgagtatttttctgatgtagattggctagctccaaggtagatagatgatccacttcaggatattgtgtattt

SEQ ID NO: 143714 - DNA, 552 bp, Cannabis sativa
aaaaagaaattataaataaataaagaagagtgctaaatagtgtttttgctaattataacttcttattatgattttttagttaatttttacatctgaaatcaaatgtcagaatatttattttcaaaaatttttatagtagtatttgttatagtttcattatcattcttataaatttttgaaaaattttgaatagtctacaatgctgctaaaaataaagttcctggtattattttagtttaccacgcgcgtttaaaaaatttcaaatgtattttcagtactgtaaactatttggaattttttaaaaaattatagggatgatgttgtaagcataacaaacgccatcatgaaaaaaatatttcgatatgtatttttgggcacagaggttgtaataggagattgatagtaacattcctctttgtaaaattagtctttatgaatttttttattagcaaaataatcttgtatagtcacagaaacgactataaattacactctgcaaccataactatgatggtcttaaaatgacatagagtaaattaagtgaggttattt

SEQ ID NO: 143715 - DNA, 649 bp, Cannabis sativa
attttttacctagagaactttctcagacgaactccctgtccaaaaatcctcgcccttactcatctctcggaaccaaaacttagccccctcttcttcgacttcatggttgtgtttctttgacgttcatcactttcccaaacaattaacttactgttggagcaaggcgcgaccatgtcaccaagtagtctacgaaatttcagatgacgatgaacaaccatcatctcctcctttcaatctgtccacaagtaagtattctcctactcaaactgctatttctggacttgtttgtgaaatacaatttcgagttcgtagaaatttgttgccttgcatgcgtaggattagactttaaaaattaaggcattttacaattttgtatagattattttaattaattataaaatatgtgcaaaaaaaaattattaccattttctcatacattcttatatacaattagaaactttttttttttaatttttttataatatatatagtaataattattgactgttttatatttctttttttagattccataattcttgttaaatttaaacataaatatacttaaaaaaatacataatttaaatataaatgtattcatactattgtatgtatatatgtgtttattttattttctattaattaaaca

SEQ ID NO: 143716 - DNA, 747 bp, Cannabis sativa
  modified_base (437)..(450): a, c, t, g, unknown or other
ttggcttcaagcttgctgaagtgctttcatcaaaactgctcgtttggcttgacgcaacttgaacacagacgcttgatttcttgagtaagttcttgatttcttttatgtttgctacggacatttactttctgattgcactttcgatttcgctgtaaaagatatgtaagaaaccctaagtttagaaactctgcaattttcctttatcacgtttcatgcgatttcatcgtccgtaatgcttatttgttaaactgcacaatgcctgtctttcatcctgcttattctaagcttcatgagattttttgccctaactcgtgaaaatttcaaacttcttgacttttgacttttcgttgaatattctcattcttcaatctgttgagtactcctggtcggcatatttgcttgttttaacgttcgatattccgaccaaacactcatcnnnnnnnnnnnnnnttgtagatgaacccaggtgagttttgtggaagcgaacaccaaattgaccaggatctacttcaactcttgcacgaggatcatccttttcttcgttctaatccaacttttttgagtaacagtcattcttcctaaaatcttttgtccagccatagaatgatggctcgtaccaaaaagacaatgcgtagggtcgacgcatccgaccctcaagtggctcggcacgccaccttacccagctccgaactagatccagccgtccaggaggagggggatcgtgagggggacgccgaggtccaggag

SEQ ID NO: 143717 - DNA, 797 bp, Cannabis sativa
gaattttgttggggtctttcaacacatgaatgttagtggataatacccttagatgcataaaaagattgcatatttagctctttagcattatcggatctaatggccttgataggcttagagtattgtgtacatgccatattatagaacatagggattatggtttgtacttcagctttagtttttagcatataagtccatgtaaatctagatttgtcatcaacaagtgtaagaaagtatttataaccttcaatacttataatgttgaatgggccccaaatatccatgtggataaggtcaaacatattttcaacaaagttgttgtttgatataaatgggagccgtttttgttttgcaagatggcaaatatgacaaaaatggttcttggaaacatgtgaatcaaaaacatgatctttattgaaattgttagagatgtacatagagggatgaccaaggcgtttatgccaatggtctccattatttgtagaaacaaaaatacaagtagaacttactattggaagggaatcttggagaagaacaaagagttgtccaagccttctagctgtcccaatcaccacactcggagaatgagcctgtaaaagacataaatcatggttgaaaaaaaccatattagtgggattttgaagaaatgttggaatggaaaacaaattgatgtgaaatgtacgaacaaataacacattatgaattattaattgggagtttatgtggacagtcccaactccttgaacagggatgttgctgccatttggaagtaatactttagatggaaaagtattgtt

SEQ ID NO: 143718 - DNA, 578 bp, Cannabis sativa
tcataatattaaccttataaagtacttaatacttttcttacctcagtccagaagtttagcgtgcatcccgcctaaatggaatcaaagcttgacaatccccggtcctatagcacgacaacgacactcaataaatactttaatcaaaatctccaaaataaacttaattcctaaaattggacaatccttatcttcaatagttctaagttaggatttacaacttctaaacattacaaattaaacactgaaaaccaccccgagccctaaaaccagcctggagaaaaaaattgaaaactctcccttgatagcaaccggtcgaccggttctgatacaccagagccaaccggtcgaccgattctgccagggcagcagcctagagttttctccccaaactcgagccaaattagaaccacacctgcccaacacctccagatcaatccaatatcaccaacacaacataatccaaccgtcaattcacagtaatttagccatttaatcaaaatagcataatcacttaatgtttaaacttaaaaaccctaaaattccattaactcaacactaacagctttgattctaaccaa

SEQ ID NO: 143719 - DNA, 723 bp, Cannabis sativa
  modified_base (509)..(514): a, c, t, g, unknown or other
gtattgctggagaaggtagtcacctcatcgcagctctaacttttccttgcccttacctacaccacatagcacctgtgagtcacgaggactcaccaagaagatcaataagaataatcatatagtttattattcgaatattatcatttatacacaagtagaataaaccatcacgcattgttcataatatgaaatctaaatcactactggcatctaccgtgaataagcattactatacagttatctggtaatataaaactattataccaataatatgaatcatattcatttgaaattataaattaaatatatgttacctcataaagtaaccatcgtcattacatcacattgcctaatcatgcaagtcgatactttagtctaataatcctatattgcattgcctaatcaggcaagcctgagtcatagcctagcaccatatatcgcataattgcatcacctaattatgtgagcccgtgccaaaaacttgtacccatatatcatataattgcatnnnnnnatcaggtgagcccatgccacaacctggcactaatatatcgcatcgcctaatcagacgagctcgtacctatgcctagtacataatgcatcacctatttaggtgagtcctgttgggttttgtgccctaaataaaactcatttcagtataatcaaatttactaattaataaaagatcataaattattctttgttgcatggttcacatgattt

SEQ ID NO: 143720 - DNA, 759 bp, Cannabis sativa
  modified_base (613)..(615): a, c, t, g, unknown or other
attcattttcatcaagcaaataattcaatgaacgagtgttggataagattttgaggttaggggatatagttagttaatgagttgagataatttttggaacttgatgaatattaaaaatagattttttgtattactaggcaatcaagctgttcagaatcgaacccagcgaagaaatccacccaggagcaacgagaagatgagtgaaagagagagatattaattaatttattaaattattatttatttttaaaatattattaaaaaataagtttacacaaataatcagatgcattccaaatattaattgttgttgtatacctattaatttatcatcattagatatattatctatggttataaaaatatctctatcatagtgacaaaaatagtgtacctaccataggcatgtcctatatatatatctacggcaagactatggtaggacctagcaaaagttccctaccggtagggaacttttttttactattgattttagatcatgtggttcttatgatgtaagctgtatactcttacgatatgattgtttatatacgattaaaattttatacatattataataatatttaataatatatttatttttttaaaaaannnatattaataattaaaaaaattattaatttttaagttgaattgttattattattttataaagttaatttaaattgtttttatataggtatttatttacaaaaaataattttatttacaaactttgatatcaatttttttatacta

SEQ ID NO: 143721 - DNA, 566 bp, Cannabis sativa
ggggagcctctccgagcctacattagcagattcatgacggaggcaactaaggtttcacaagtaactgaagatgaaaagttctccgcaatactggggggcattgaagtccctggtgagctttggaaggacataaggaagaacggtctggtagactcgatgagcgactttctcgaccgtgctgaaggcttcatcaaacttgaagaggctattcagtgagtagaaggtgagcaaaaacctagcaagcctaaagctccttccactagaacatccgcccaactcccccaatacccgagcaattcaagttcaaatggtaaatgttccagcaacaacaataggcaggggaatgggaagaagggaaagttaactggccaaacctaacaaacccctcgggagaatcaagccaagtacactgcatttaccatcttgactgtagatatagaaagtgtttacatgcccactcagtcattggccccgtacaagaagcctgcgcccatgaaaaaagatgtcagcaagagagacatgaccaagttttgtcgatttcatggagactatgaccacgacaccaa

SEQ ID NO: 143722 - DNA, 1415 bp, Cannabis sativa
atgatagacaaggataacaactcgaagttaagcaagatagcattaaccatctataaggataagaataaaaagcagttaagcagttatcaaatattatcccacatgcatttatatgaaacgtgagaattgtccacgtttcatgaacggttacattttaaattgatctcaagtgtaaataactaccaacctatattcctataaataggggaagattccacacaaaaagggatgaatgttttggagagaaaaagatcatcaattgttaattgtatctattattcagaaaaatatcataataagatagactcgtggagtatgcaaatttaactgcaaaatcacgtaaaatccctggagttctttaattgttatttactattattgcgatctatttatcacatagaggcttattatttttagttaacaaaaatctcgtaaactacaaccttatttcgaggaacatcccataaaagtcctaactgatcagccattaagacaagttttatcaaaacctaatgcttcaggatgattgataaaatggtcaatcgagttgggacaacctatcacctgagaatatcaatcaaaggccaagctttggctgattttctaattaaagggataatctcaaaagaagatccactcatcaagcgtgatattgaaatttgaaaattatatgtggatggagcttcgcatgagaatgactcggggcaggagtgataatgatgtcgcttgttaacttcaaattccaatgcacattaagattccaatttgatacttcaaataacgaagcataatatgaggctttgttagctggcttgagaatagctgaacccttaaaagttaagaatcttatatgttatagtgactcgcaattgattttgagtcaagttctagttgaataccaggtgaaaggattaaagatggcaaaatatttaaagaaggttcggaagaacttggaaaagtttgattatttcaagattgaacaaattccaagagaacataacttaaatgcccatgcattggcaaaattggcctcgcaaaatgaactcgataagttaaatctagtaccagttgaagttttgagtgacccacgtatatgcgaaaaggaagaagttgagatgatagacgcctcaccaacatggatgacacccatagtcaaatatctacttaacgggaaacttcctacagacaaacaaaactgaggcacgcaaactctagtattcaatacctcgctatacaatagtcgagggaaaattatataggagaggatattcaatgcctctcttacgatgtgtgttactagcagaagctactaaaataatcaaagaaatccacgaggtctttagtggagttcatgcaggttggcaaagtttatcgaagaagattatccatcaaggatactatcagtgaacgataaa

SEQ ID NO: 143723 - DNA, 665 bp, Cannabis sativa
aagctttaatctctttactcaaactacttgctgtcctacaactcagatcaaaaatacatttatttctgtttgcccaaactgtgtaaatggtagccaaaataacagtgttgataattcttttctgcaatgtgttagctgcctcgcaaaaccatctattgaagtcaactcgccagtcaaaatggccacaccaattagtaatctcgcagaccagggtacgggtaaagctgcagtgactgaacaagtgttggtgcgactcgttttcgctgcaacagaccaggcacaagggggaggagatcggcaaaaacttgctaaggttatctctggttagcagttggttgttcaccatttgccaacctatgaacctatgtttgggaaggaccattctactccaaatattcctggcatactcaaccggttgagcttggacataagagaaataaaaagatttggtactgaacttacttctcaccgtggcagctataagattagtctcattgacagttgaacgaagacgaaggagttttttaaaataccaactagcatcttgcttgaactcaattgtccaaaagctcatacctctcaagtagatcgcgtcaatccacttaacccaaaggttatcttgtttgttcgatatagcccaaatatatttcgccatgagggctatg

SEQ ID NO: 143724 - DNA, 700 bp, Cannabis sativa
aattaaaaagtaaaaacagttttatagaatatatttttaaaaaatattttcactttttcaattttaaaaacagaaaactaattaaaaaagtgttatcaaaggacaccatatttagtacattctaaccaactaataaataaaagattatctctccaattttctatcttaaacttcttcaatttgatgattttttttagttattaataaaattcttatatttaaaatattttttattcataaccctcttccccttttaaacgtagtttaaataattgaactagagtgaaacattaaaattacatttatacccccaagaacaaaagaatgaagaaaaaacaaaacctagtaaatatttaatatagagattaatgtaacctattcaaaagagaacaaagaagttgaaagaatagaccccaactttaatgtgtcatatgttaatttcaatttttaatgccttgtgagtcgtgactaagaaaaacacttaaatttgattcaggtaatgaagtagaataataataaaaaaaaattattcaattcttttgtcgatgttattttaaaatattataatgctacttttattctaattatatttttattctttcaaaccaaacaatatttattaaagactaattagtaattttttccccaaattttgacatataccaaatcgtgcccgtaaacttttttgaccgttaaaaat

SEQ ID NO: 143725 - DNA, 1085 bp, Cannabis sativa
  modified_base (643)..(643): a, c, t, g, unknown or other
tcttttatgaaattgaatgacacacatgactatattcctgacattctatcccgaaatgatataaatcctcgatcttaaaaatctcctacttgtatatgcttactaaaggcaacctaaatttagagttagagtagtagtggtggtccaagctagaataattactcatgtatatttggtataaatttaagtctttgagtttaaatttcagattctaaatagatttttttttggtttcatagaatacattaaacattacagtataactttcacaagttgttaatatctattttctgtcaatggatccaaactgtatgttaatgtatggaatatgagtttagtattgaccaaaactcacttggactattctaagaactctgtattgtaactagacctaagtcatcaaaagaccacaaccacattgtattatatatctagggcatttgtatcttgttcatagtggttttgacaagatgattctttggaagagaaaatatgcctatatccacttgaaagtatgatcatttaaatttgaacatatggatgtacattcaggagtcgatatgagttatcattaaattcctaaaatgaccactctagattttaccttaggcaaataaatttgaaatgtttgagaaatttcatnaatttctagcaatgttgaaaaatattaaggtaagtggttaaaaatctcgggaattgataggggtggagaaatatttggtggatatgcagttcaaagatcactaagttgaatttttgaattgtatccaaacttacctccctagaaattcagattacatattgatgatagtataaggtctatgattagttactaacatttgcctaagtccttctagggaatatcctagtgatagaaaaatttcagaatgatgggatggttgtgtacttagtgtaaaccattactagattcatggatgtcttgatcgtgactttaagaaaagctaaaactgttaacttaggtgttaacacagattttctgtaacaccctaactagcataggcgtgttagcgtgattttaaacatactgttcagctcgttgctaatcagcgaggttattgaaaatc

SEQ ID NO: 143726 - DNA, 672 bp, Cannabis sativa
gagtattctctagaaagttcatgaattagaattttgcacatggccattaacagtgcaagagcgagacatgcggtctcaagtgagaattagtgaaggtgtgtgtgtgttatcaccagtttgtagtaaaggaatagtggttcaatactacgacaactaaaatttcatcaaactttgtgaaaactacactaaggtaaaaattcaagtcaaaagatattttacctaatacacttaagcaagacttctttaaaagtgtgtatttattcaatcaaagtggggaaatgttatattttaatataatattttgattgattaaataaatgttacaagtgtgttgcaagtgtgtcacacattttaatctagtgtgggattgttatattattttataatataataagtatagattaaaatgtgataaacatattattatgtgaataatatatattaagtgtatggtaaatatatgtgtaacatatacttttgtaacatacatgttgtaacttggagagaagttacaatttgttgtcacttgtaactcttgtattggtcagacattattagtgtaacaaaaggattgttacacaatttgatgataggattcaaatgttatgaaatatagttgttacaaattatattaatactcatttatatgagaaaaatgaggtgtgtattttg

SEQ ID NO: 143727 - DNA, 1088 bp, Cannabis sativa
cagtccgaaactgcccctacaccctacaccccaacagtaaaaaaaccaggggtaaaaatgtctttctccctttgtgcggatcacaaaagaatattcccttgtaggaaattatgcagttcgaaagtgcccctacacccaacaccccaacagtcaaaaaccaggggtaaaaatgtctttctccctttgtacggatcacaagggaatattcccttttcaaaaccagatattccttttcaaagccctactgccttttatgacagtataaaagcctcccctttttttggtgatgaaaaccctagcaacaaaatcactcttcttcaaagctagaagccaaaaatacttcagcctccctctccatcttgttttcttctatcttagaaaccctagcagccgcccctcatctcctcctacttcaagctttgtattgcagtagcctccttcttttcttcctcctttcttcttcaagctacaacagtagcttcaatggccgacttcttgttttccttcaaacctgcaacacacatacaaaaccgagagacaaaatagtagcaacaaagatctaaaatgatcttcgttggttttagaagataaaagccgaaaaaacacaacaaaaaataaagaagaacactacagatttgatttcggagttccccttaaaatcaagggtacatctccgtcaagcttccctcaaagacgcttgaatctccactatgaatgtcaaagccggattacaagttcatggagattccatgctacaaaccagcaggtaatctcaacatttttcctctcctttcttcactttatttctcttggtttatcttacaatatctctcactaactctctatatttttctctcttgtctctgagggtgattacaaaagaaaacactgctgcctttttctctctacaggagccgaataccacacttgtgaaagtggaaggttgtacatcgatttacattgttgttgttggctgttattgtgcttgtttctgagctgagaaatagttgtaatctgttgttgatattttccttgtaaagctgaaagtttgttagagtcttgagatatttatttacttctttatattg

SEQ ID NO: 143728 - DNA, 547 bp, Cannabis sativa
  modified_base (437)..(462): a, c, t, g, unknown or other
  modified_base (510)..(512): a, c, t, g, unknown or other
attttaaaattaggttaagataaaataccctgataatcatttaaaaagttcttttaatcaaaaagtacttttgaaggggtaattgttatacccaaaattcgagtacacttcagaagttgacacatgtccaacagaaggatatgaatcaattctaaatgatatataatattatatcaataaatacatatttaataactcattattatttaataaagatttaatagataatattcaaaactcgttgactttatagtcaaaagtgagaaaatgataataactattgatatgaagttcgaaatatacatttaagaaggggatattcatccacccgagcagattgaatgtatcaacataaactacctcacattacatatagcgagaagatcacctcgcattatgaaagccacaaagagaatattgttgggaattattttacnnnnnnnnnnnnnnnnnnnnnnnnnntgtttattaacatcctaaatatgacctttctaaaacgataaattaaannnatataaagttaaagaaaccttacactgggtgcagc

SEQ ID NO: 143729 - DNA, 924 bp, Cannabis sativa
gggcataaaacccaacattatttatctcgttggtttcacaaaatggtagttattattcacgactcacccctatcttcagaaggacgagttagaatatttctatcaattatattatcagaggcgagtttattaaacgtaattattgctccataacacaagctagtttattttttagccttttaatacgtgtcatcactatatttctagctcgaaatatgggtataacatatagatgtttcaaaaataattacgatactaatattaaaataagcattgaaattagcacaaagtaatttgagattttttttttgaaaaaatattgacagtaatttttaaaaattattttaattttttttaatattgggatgtacttttcattttatggggtacaaatacaactctccttatgcatacgtgatagattttagtcagatatgttttatgaagttttaattttaagatttaaaacccagtctagaatactttattttatttttaaactttaaaacaattttttcggtatttttacaaacatcatatagcaactaacggagcaacctaaatcgcaacaaaaatccacataacaacccacatagaaactaccaaaacaacccaaaccgtaaatttgaaagaaaaaaaaaaagttagaaaatggtatatagagtaattctccaatatttttttatgatgaaatatctttaaataaaatcttaaatttaaataaaataaaataaaagtaacatgtaataataatttaaaaaccttttgaaaaaaattataatttaaaattagtcctcaatttatttagagaaattttgtttagtatggttaaatgtaaaatatgttgttttaatatactaccaaattagaaataatatatctatacttttaatattttttcctcccaaaaatacccttatattt

SEQ ID NO: 143730 - DNA, 1296 bp, Cannabis sativa
  modified_base (903)..(919): a, c, t, g, unknown or other
ctctttttttaaatattgtaccaattttattacggtcacttcaagatattctccatgtgactctcttatgtcagaacattttaggtacaatacatatgaaaagaagtatgctttaattaaatataaaattaaagatcaatttgatcaattgattaataaaaaaagtaagtagtatttttcaacttaccccataaataaatattaatttttttcgttaatttctgctataatacaattataaaagtttttataattatagtatcgcttgatatatatggagatctataacataaaacagcagtatctaataaatgggcatcttaattcatgtatcgtggcagtagacattaatagaagaatgaagaatttctccattatataaacatcgagctagttaacaataataaaataataataaaaaaccataataaaataaaaattgtgaatcatgctattattaaatagcataaattaataattttttttttttttgaaatctcataaattaataattactgcactgaaactattacttttctaaatagatctcatcatctataaaataagaattattttgactaattatagtttttaccccttaaattttaacatgtaccaaattatgttttttgaactttttttgccattaaaaatttcccctaaagtattgaaattatttaatttaaggacttttgtataattttattcaattttactatttcagtgattgtttatgtactaaatcatgcttctcagactttgatatctaccaaatcatgcccctcgaattttgacatgtactaaatcatgtctcctaaattgttgagattgtttgatttaaggagttttgtctaatttcatttaattttaatatttcagtcaaactttgatatgtactaaatnnnnnnnnnnnnnnnnncatccatgttagaattttttttacaataaaatttgacaaaagtccttaaattcaataatttcaataatttatggggtatttttaacgaccttaagagttcaaagagcatgatttttggtacatgtcaaagttcggaagaaaaaatcttagctaattatttattgtacggtgacatctcaatatatataccgtgtaataaaataattttttaaaacaaaataaaataaaaattaatgattagaaaaaactattgggtgattccacaatgcaccaccctaaaagagatgtactaatgcactctctacttgtttcggcatccagaaaaattttttaatctatttttttttcatattttcatgtacattataactatttaa

SEQ ID NO: 143731 - DNA, 719 bp, Cannabis sativa
tgtgtgttaaaatgtatcgataggatgtcgatagtgtgtcgatagaatgtcgacagatgttgagtgaaaatttttgaactgaattttagtgtttaaattcatttgtcgaccacatgtcgattgtatgtcgatacgttgtcgacacattgtaaattcattgtttgttatttgttgtcgaccacatgttgattgtatgtcgatacattgtcgatacaatgtaaattcatggtttttagttgttgtcgacagcatgtcgattgtatgtcgatatgttatcgaccttttatgctgttaatttctgtgtgatatatcgacctaatgtcgacatgttgtcgacattttgtcgatagtgtggattgcttagttcgagtggtcacttatttggaatatcgacttcttgtcgatagtttctcgatacattgtcgataattgttgttgttattgttgttgtatgccatatgtgtgttagtatcgaaaggttgtcgacaatatgtcgacgggttgtcgatgaaataatgtcgtgtttactgtttgacaatgtcgatatgatgtcgacagcatgtcgatatgatgtcgaccaatttttaattttttggcagtaatattgggttgttttttgttttttcagatggctctagactcgtacttccagcacccgagcatttcactggccgcgtgacatatagaggcaccgaaatttttgcaaaaatcaaagctcg

SEQ ID NO: 143732 - DNA, 535 bp, Cannabis sativa
ccattgattttacagctaaaggaacgcccttgcacttcttgacaatttttcttccaatttcttgcaactgctccaacaataccttctcgttacagtcaacattatcaaaggcatgctcttcaaataactgccaacatccatcatcagacatggttttaagctcataaatttgaacatttctcgtcttcatcttcattgcaatgtcttcattacgtgtggtcacaataaccttgcttccttttgcaccagattgaaaagagcttttcaaaagatcccacagctcgtatttctcattccacacatcatcgaagacaaaaagaaatttcttaccagccagagcatccttcaagtctttcagaagttgatgtagctcacctgtttcatttcttttgccagtgattttcccaaaaataatgttacttattttacaaacatcaaagtcatcagatatagttacccacactttcacagcaaagtgtttctcgacgttggtatcgtaatatacggtctgagcaagagtagttttaccaattcc

SEQ ID NO: 143733 - DNA, 600 bp, Cannabis sativa
tttcttctttaacatcaatctttcttaactgtgggcaggttcttttcagataacccactaccccacaataaaacaaaatttggctctatattggttcaattggcgccattttgcatcgtgaacactcaggataaggtaaccatttcttattctcaccttgaccactatcttgaccaccctaggacctttttgtcctctcccataattggtggttcatttagttttcgcttcctgatctactagtaagttggcttcatatattccaccacatttagtggtacaacaggaagtatcggtaatataagaatatactcaagatgagcctattgttctttcagatcttagatctgtttccccttgttgtctaatcatatcctgcatagcagaatttacatgtttccagtattatagcaataaaggattctcttccttaccgtttgccccgagcctgaagagctcgctaaccagactattccaatgccattattgtataacttattacacatttagtccacatcttctaaccatttaaaactcatacggatatcaatatcaatatgcatataccatacacatattcttatcacaatcatcactatg

SEQ ID NO: 143734 - DNA, 633 bp, Cannabis sativa
gaagtgttaaattgctaacagaacacgagtattgggggttttaccgcccaaatttgggttttgggggttaagtgaaaccaaaataaaagttttgggtattttggtggcgccatttaccccaaaaaaaaatataaaaaaaaatatgggagtatcaagatacctataaaatttttgtcaaaaagaaaatttttccaaaaaaaaaaaaaatcatatttttgtaagttttgcaaaaaaaaaatcataaaaatgaaaattcaccctagaaaaataggtggatctacaaaaacatgaaaaagaattagcataacttacaaaaaatatggtagaaaaaagtaatgtaacaaaatatgataattttagaagaaaaaaaaagagaacccaaaaaaaaagtactatcaataaacttaataagatttccatgaataattatccctgaaaaattcatcagagcgactattattagaggtgttcataagttggtctaattcaatccgcacaatccaatccaatctaatcctcaaagtacggatatctgtgcttgtgcggtttgggtcttgactgacatgtaaaagtaactgatccaattcaatccacatatatctataaaaaaaaaaaaattaaaatataatatat

SEQ ID NO: 143735 - DNA, 825 bp, Cannabis sativa
ttttttttttcatattttataatttgagatacattttggttacctctaaaatttatttagaacaccttaataatcaaagagttatttctaggttttattaatacgaatgagcatcttcaaatttatttttgcgtaaaaaaatattgttattattattgttctatcttttctaacaatatacgataaataccatcaatcaactaacatatactataaaccaataatatagcttcttcatcctgaattctatttttttttttttttacattttcaaaagtaataatttggttatttatagtgcccataaaaaaataactagttacttttacattaaaaaaaactttatttttatatcatataattttagatgcaatttggttacctctaaaacttatttgtaaatatcttataatcaaataattattttttaagttatattattgtataatatttaaaatatatttgggtaaccttaaagtttattttcgaaactaatagattattatgtattataataagctaccattattatgtaccaattgttttttttagataaatgtaccaattattttatatacttttttgttacattgaaaccaatgtatttatttttagattatattatattattttattgttttaaatacttttaggttactttttttttcttgtgtaacattatttatttacagtaggttacaataaacttaaaaaaaaagctcacataactaataaactaataaaatttataaataaactaataaattatgcaataaattacatacaataaactaataagttacaactttttctttaaaaaaaaaa

SEQ ID NO: 143736 - DNA, 2234 bp, Cannabis sativa
agaaaataaatttttaatctcaaagagatattttttttaattttattaggctgcccttagaattgttatttaatgaaataaattaattttttaatttttcaaaaatcagtaacgtgtactgtacttaaacgatgtcttcattattattaagaatttttatttaaaagtaaatgtgtagtgagtaattaacaattattgttaaatatattttggaactctaaataagaaatttattggaattcacacaaatctgtattggaaaggtaaatctatatccactttttttaatgtaattttttaaatgaaaataattatttatctcatatatatataaccgtgttcattatttttttattcataagctgagtatttaaagaatacgtgaatcaaggttgcttgtcatctatatatgcaaagtttattctatattgtcacactcatcttacaaaccaatcaataaaaaaaatggctgaaaatcggcagattgaagtggtgagcaacatcaaatcaataaaagtagaaatcgatcaagagaatccaatccatgatcgaaaaggtaagagaaaattggaagacaactcacaagaggaaaacgcaaatggccaaaaagaaatagttacggctgatgataatggtctaccttcttcttgaataaggtaattgatttagtacgggacgacacatctcgtaaggatgaagaaatatctataacagaaaagttctccaaaaagaggcaagaaattaatcaaagcttaagtgacctacgagttagaaggattaagcttaaccaactttttgaatcgcgatgcatcccaaagcgaaatttgaaagaagtgatcgacattcaaaaggaacaacatgtcaccattcaaaagcttctccatgcagtcgagaaggaggagcattactggcttgtaacacttattaagcttgttgacgaggagaaagaagagagaaaatcttcgcaaaatcaattatggaaggatactatttcgctataataaatatgtcctacaagcattaagcaaaaaaatgtcagtagagcttgtttataattaagcaaaaaaatgtcatttgagctcgtttataattatttttttttttatttccatttcatattttaaaatagtataaaataaatttcaatattttgagctcttttttatttatttttctaatatccatcaatctataatttatttgattaatatacttaattataacgataacttatcttcattactttaacattagttagaaaaatataataaatgaatcacatgtacgatcattttatttccttatgaaccacatcatttttattattgttctaaccattctatatttaattttatttgatagataaaataacttgaacttaacatattattattttgtacttacatacgatttacaaaaaaaaaaaaattatgttttttgttagcaactcaaatctttactgggggagtgtgttccttaactcttaatatatctaagcaactctatattttcaactctattgatgtcccctttttactatagaatagctaaaagaatagggagatcttatatttataatttttatattaattttataatattttattattttaatggtttactgttttattaaattatttttattttagtataatatatgtagagaaatactataaagtaacatacttagtattaaaattattaaataaaatatttaaaagaacaaatgttagataaagtcaagagtttggttagagtgacgtgtaaataaagaaacttatattttatagggtactgggcactgatattttatggggaactagcttcatttataagtacaataaaataatctacaaatgacagtaaaaatataatttaattaaacgtgtcattgttatcttcaaaaacttacacaaggctcaagaaatttacattggtaaaaaaaaagtagcattaattatattataccatgttggaatggtaattcgaaattttctatgttgatttctaagggttatctcgttttactcaatgtaatcattcaaaaatacacatgcctaatctaaacatttcaatggtataaatatgattgacatgtgtgattaggtcacccaaatatcaccattataacattttcttatagagaaagagatgatgatcaacaatagaaaattagagttgcagatgaagcataatatcatgcatgacaaagccacggttaggattgttaatca

SEQ ID NO: 143737 - DNA, 633 bp, Cannabis sativa
ttgactaaaaaattatttcgggtgctaaaaaatataagggtgtatcaatattaatatattaattttaaaggggtgcatggtagaatttcccattagattatttcgttaaaaagcataatacggagatttttttaaaaatatatatataaagagtgtttcccattatttttttgtttttgaaattgtgtttatgataataaaaaataatttttttttttgtagtttttcaaagtacaagacatgttttgctaatatttttagatatttttactaaaaaaaataattttaatattcttacatgaaactagtcttaccccctacccttgacacagactccgaatgttagcttgaacccggagcccaacctcgaatccgaacgttgtttttgaaattgggtctatattttttttaaaaaaaaaataaagagattttatagtaaatgaccacaaattataggattatgttagtatatgtcttcatttcaaaaaaaaaaaaaaaaaattatagtaaatggccctaaatcataggtttatgttagtaaatgtcctcatttcaaaacttgtagagaaatgatccttttaaattatttattatttatattgccttttgtcacataaaaaaattaataatttt

SEQ ID NO: 143738 - DNA, 631 bp, Cannabis sativa
taccatgagacaaaagattttctttctaaagagattctattcggaactattatatgtccaaggtccaatattgaaataatttcagaggttttccttgactttgtccgtgtcaacaaacaatttaaaatgcctcaacttttttagaatagaatattacgataatttaatttaatttttgtatattaaaatttaaactatttgtataaattactgcaagaaaaatgcataaatatttcatctaatttttcattaaaaaaattaaaattataaaatattaatttaaaaatatcattacattcatcatttataaatagtttttttaaaaaagaagaagaagaaaaagaaaaacacatataattaatgaactttgaatatacattaaactctaccaatatttcaaaaaaaaaaaaaaaaagaaataatttaactttcatatgtaaaagtttaaacaatatgtacaaaatattataggaaaaatacttaaattagttcattaaattattaatttttagaaaatagaaagaattaaaattacaaaataataattcaaaaatattaatattattcatcacttattaaatatactagatgaaagttacgtggcgagccacataaatattaattttattta

SEQ ID NO: 143739 - DNA, 597 bp, Cannabis sativa
ggggttccttgttagcctcctaatgcacctaggttaaaactaaacatagatgtgactctgaagttagtatcaaaagttcttgttgtgggtgtgattattcaaaatcatcaaggtcaggtagttgctggtcttttaaagtcagtttaaggatgtttcgttcgaatgaaatggaagctaatgctcttttccataacctaaattgggtgttgtagttgcaattgccaattactcgtattgatattgattctctgcgagtttctaatgctttgagttctatattagggatttatcatgctttacagatttaatttcagatgtttgttgtcttttattttatttttttcttagagttattagttctcatattaagagaaatactaatcaagctgcacatggtttaacaaaatatgttctggatctagacatagtgaaattttctattttatttttgctattgttgcgacaattttctcaaaagaagaaaaaaaaaatagaatttccctataaacattcctatgtaaaattatggaaaaactaattatttttgttaattgataataaataagtaattataaatatacatttatattgtatgag

SEQ ID NO: 143740 - DNA, 971 bp, Cannabis sativa
aatacaattaggaacgacaaggaatgtaacgccctatccaacagggacgccatgtgtgtgtgtgtgttttaataaaattcgtaatttatatacagtatagttatagtaaaagtgtgggaaataaaattttggtaattaaaattcaacatataaaactacttgatgatagataagtgatattaactacgggttccccctatttttaaaatatttacaaactggtttaatagtgtttttacaacgtaagttttgaaattccaaaatactataaaaaatgaagcatcatattcactgggccgtgccactgctgctgatatgtacattgctgctacgacctcgcactcatggttgctcaaccttagccttccctttacctacactataaaacacctgtgagtcacatagactcaacaagaaaagtgaaataaacaataacggacaataattattaaataaatctcatatcaacatgattacacatttacacaatatcataaacatacagtcctggtactttataaagtaccctattttaccactcgttaactacgagctgaatatgtcactatcgttgcccgatgaagcaaacaataagtaagaaacctaactgcggtttcaagagtaattactcataacggtattaaccgcttcctaccctaggtcataacctaggctgaacaacattaatcaaagtcttgataataatgaaggccataaccattcatcattaatatttagccacatatattacttaccacatttcttaccttagttcagaattcaaacgtacgggccgacctgagtggaaaaaaaagctacgcgatcccggtcctatgtcacgacaattaaaatcaatgaataccttaactcaaaatttccgaagtataaccctaatttaaaaccgattatacttagccctgaacaacttcaaaatagtccaaataactcaaaaacaatgaaagacaggtacc

SEQ ID NO: 143741 - DNA, 507 bp, Cannabis sativa
atttaaaatataatattttaaaaacatggacgggttaatgtgggggttatagctcccactaacaaaaatattaccttttaaaaaattaaatttaaatttattaatttgatagttatagattaaaatagtggaaaagccctcacaaaattaaataaatctattaagaataattataatgtatgtataaatattttttaataataaaaagcccccacaaagaaatagttatgggtccgtcactgtattaagaatataattaaccattttttcttaataaatataaaatgtagtatcttaaaatataaagtagatattcgctttagaagataattatatttttaataaaaatagtaaaaataaaaaatatggtgattttaaaaaataaatttggagtctttttgttaaaagattttttgaacctgcgtgggggaccttctgcgtgggccctgtattagaatattttatttatggaaattattttctaattaaggaaatgattttctattt

SEQ ID NO: 143742 - DNA, 990 bp, Cannabis sativa
tacttatatggtgaacggtgtgagatctatactgaccacaaaagtctcaagtactttttcactcagaaggatctgaatatgagacaaaggaggtggttaaagttagtgaaagactatgactatgaaatcatgtatcatcctggaaaggcgaatgttgtggcagatgccttgagtcggaaaggacatgatcagagtttcaatatggtaatgatttctccttagttagcttcggagatgtctagggccaatattaaatttgtgattaagagattgcataatttgacacttcagtcagacttgttagaaagaattaaagtggcacaactagaagatcctgaactgcttaagactcgagaagatgtcttggcaagcaaagctaaggacttttcgatctctgatagtggaatgttgttgtttaaaactcgggtgtgtgtccctgataacaatgagcttaagaaagaaattctggatgaagctcacactaccccttactctttgcatccgggaaccaccatgatgtatcaagatctgaagccatatttctggtggtatgggatgaaaagggatgtggtagattatgtcactaagtgcttaacctgtcaacaaattaaagtagaacatcagcgacctgcaggattacttcagccattatcacttccagaatggaagtgggaagacattgcgatggaatttgtggtaggtttgcccaggatcacgagaatgtaagactcagcttgggtcgtggtagatcgctttacaaagtcagcacatttcttgcctgttaaagtaacctatacagtagatcagtatgctgatttgtatgtgaaggagattgttcgccttcatggggtacccaagtcaattgtgtcagacagagaccctaaatttacttcaaaattctgggtgattttacaaagggccatgggtacgagtttgaagttcagtacgacctttcaccctcaaacaaatgggcaatctgagcgaactatt

SEQ ID NO: 143743 - DNA, 831 bp, Cannabis sativa
attattatgtctgcttttgctgatttgaacagaaagatggatactcttattaaggtatttttttttttgtttcctttttaatgtagttgtttggttgttttgtattgtttttatacaagttttctttctttttttctagtcttcgcgttctgcttatagccatcactcgagccaaacagaggatgtgcttcgctactcaaaaaatgatgatgatcttgttggtgatggtgaaagagaggatgatgaagaaattgattttgagaatgatgatgagcccggagatgataatgttaaaggtgatgatgatgttgatgataatgccaatgacaacactggtggtggtggtccagatgatgatgatgattgtggggtcggagatgatcgtggacaatctgtgtccgttgttgaaaaagtaaaaattgatgaggtgcatgttgctattgatggtggtgcaaagcctaatgaagatgtagtagatgcatctactgcacaagagtgcataaaaattgctgataaattggttgatacttcagggatttttggtgatttgaaagaggtttgtttttgagttgttttgttattgttttactggttttctcgtcctattttttttttgttttattgtaatttttttttgtttcattaatcaggatttattttctaatgatgataatgatttgattgatgctggtgcttctatggcttgtggtgttcacgctgttgagaatagggtattttttttcatgcattgtttattttaaagttgtttctattttttttaatttttatttttttttattattttgttatttttgacattagttttttttt

SEQ ID NO: 143744 - DNA, 642 bp, Cannabis sativa
ttgtttcaagaatacaacaaaaagaggagtaggttattactaactataaggggtcgaacctctataaatatggtgttttctttacgatatattatttacattttgttatttaattattctcaatcactttaatttaacttactatttactatcattggcttaaagcgaaaagcgagatccgagatcaatattttggtactttcattgagagaacagatataagtttttgtcttaagtcttttttaggacacatgatggttgtgcaaacacggaggggaaatcagactgatacaattgatctaatggtgatggattcgagcgtgcagaaacctgcaaacccaagagatctaaccaagacagaccctgccctggttaatccttagccaccaacaagtccacaaactgtaggttaaggagtgacaacccctctagctgggttcactccaagcatgcaagaaattggaaatgccagtactgcaacagagcagaccactcctggtataggaatcctgtccattacaaaatctcaaaggctagtcagagatgacaccaaattgcaaaatttgtgagctgcattggggctaatacaaggccacaataacactcttcactacgaacaacaagatattcgagcagctataa

SEQ ID NO: 143745 - DNA, 553 bp, Cannabis sativa
gggcctcgtcttccaccccgtattaattaagcgaactatcatccgtttttattactatcttttttttttctttttttttatatttacagtctcttttcccctttttcagacactttaatctttttctttaaggggagacagtttcaaggctcgtccccaggcccttagtgtttttttagagcctgctattgggtctgaacatctttacatttatgcttaagtacatattttactttaattttgttaaacttttggcctgttttacatttgtccatgtggtatgccttactacccccttgagtggcatgaaaaattgtttttaagacactcagcttcaccaatataaatttggaggttgcatatactttttggtacaaatttacttgacagagcctaagtttacattttttgactattggtaatactttcggaggtgatcagcgttccaggccctaggaaccacggttccgtccattattttgagcttgtaggtcccagagccgatttcgtcctcgatttcgtatggtccttcccaattaggcccaagtacccc

SEQ ID NO: 143746 - DNA, 678 bp, Cannabis sativa
agccaactagggcattcataacacagtcgttccgcccgctactaattttcaaacgaccattggagatgacattgagatctaaaactttcgtgctgctcttggaatcatgcaaggtcataccaacaccttacatcatgatcaggaggaactccgcgctgtagtgaatcttgcgtttgatgagcagaggtgcatgtttcccaaatggagggacaaagagattgaagcgttaagggttcatcatgcagagattgacaatcgtagttggaagccactgtggtaacacgaaaagcctatcaatctgttgggcggcaacccccaaatgtccctggtgaaatagacgaagatctaacgataaatacttttcagactataaatggttagccaccaaatctccggtcataggttccacatgtgggccaagtagtaggtgggcagaccttgtctagtaattcatcaggagaagtcatacccagcaattccaaccaggttaatggtgccggtcagcacattaaccaaaccaataattcactgagacagccaggcgcttctgtattcgataggttggggacgactcatgatctcagaaacaatctaaataggaggagaagagtagatgaccagcttgacacgccaaacgtgcagcccggaacccgtgctcaaattcccgctcagaaagat

SEQ ID NO: 143747 - DNA, 578 bp, Cannabis sativa
  modified_base (381)..(382): a, c, t, g, unknown or other
agggtttgaaaattgcaaaaaatcaaaattggggaataatccctcaaaattcgggtggctgcacaggaggctgcacgtgcagccaaaataggctgcaaacagccgagtcgcgcgcgcggagagggaaaatgcagggtccctgcgccttggtttctcggcgtgtgcagggtcctgttgggcgtgatgcagctgagcgaggcatgtgcgtgcacttcaaataggggactttcgtccctgtcatgcgcgcggaactgggtcttgtcttagtgcctagtgcactcgacacctaattcaacccgattttttaaaaccacacaactttcttaatttttatcggaatcgagttccataaaaagcaaagttgcttaatttttcacaagnnatccaaataaaatattttcagaacaaaaataaaattattttcatgaaatttttttgcaaatcacatgcaatcatcaataacacataaaccaacatgaacacatccaaatcaacacacaaaaaatattcatcgttttaaatccatatctcatgaaagtaaatcattaccatgtctctgaggccagttgttgggaatt

SEQ ID NO: 143748 - DNA, 615 bp, Cannabis sativa
  modified_base (583)..(590): a, c, t, g, unknown or other
tcttttaattgtagattttttttaattactgtagtagtaattaacttaatttcttttatatgtaagttataatcaataaaataataaaatttgaaattcataatttatttaagtaaagaacaaatttaaaatttagaatttatgacataccttagttttgatatcaatcttttgtattgtatgtagactgcctgacgagtggatgatctttaatgtcaattcaaaattataatcaattaataaattatatatatacacacactattttttgtatgcatataaataatagaataacaaaaaaaaattaatttcaatgtaaataccttttattgcagaatagtatcttgctgcaaaaattttgaattgctaaatgtgaaagggaattcaaaaaataacctaaagattaatctaactttttttgttgccaattttttgtttcttgtttgcctaatgaaaagataaaaatagtcgactttgaatataaatggtaatacttaaataaatataatattaaataataaatagttatttgaaaagaaaggaaaaaaaagtaattgttataaaataatataaagtagatgannnnnnnnaagaagaagatgaagagagaaagag

SEQ ID NO: 143749 - DNA, 746 bp, Cannabis sativa
  modified_base (236)..(237): a, c, t, g, unknown or other
  modified_base (498)..(499): a, c, t, g, unknown or other
taacttattaattcttcctcactcagctatagattcaaaattgtactcttaattatatagaatgctttatatgtttcaagatataaacacactattaactatccattattataatataaatagtaaaagatagtctatagatgatctacatcgaataaggataaatttaccgttctacccttaatgtaatttattcttagaacacttagccaattataaatgatatttcagtaaannaatataattattgaaatgaggccaatcattcatcacgttaagccaagctaaaaagaaatcattatttcacttttaaatacttaaagaagctatagattccatatctataattcgcgctcccactcaattatactaccatgttcttaagatgtaagtattgagccgatccaattggtcaactttaacgaacaactcaaaaaacacaaataatatatttgaattagaacctaaccatctcaggattaagatctattgacctannatcaactaagtgatattgacatagattgatataacagtaagtttatgatatcttatctaattgtcaatgtcgatcaagtccgatctatactctatacatccaatactagcatactttgccaataccctggaaagaacataacacttatccaagatgtaagtaaattttaccactgattatcatgtcagtataaatccagtgtacgacaaatcatgggatatacactttgaaacatataatcatgatt

SEQ ID NO: 143750 - DNA, 1129 bp, Cannabis sativa
actattttgttattctatttaaaaaatattatatattaatttattagtttctttataaaagtaatgttacatgagataatataaagataccatagcataattttaaaaaaactaattggttactaatttagaaatttaaattttttgctaataaattatataatttattttacttaattgtaacacatcaatttcttaaatagtacgaaaggtaacataaatattgttacacaaaaaaaaaatatatacaatataaaagtacatcttaatcaatgtaatataaactaaaaatgaacatgtagtttaaaataactaatctaaaaattaaagattatctacacgagatatttttatttaaagtgaatcattttatgaaaagaaccaattggtatattatcgaaatcataattaatttaaatattactataaagtacactcaataaactattccatatctatgctgatttgttatagtatatgaaaactatataatttttattgtaaacttaaaaggtaactaaaaatataactttaaaataactaaggagtaatttgaatgcttactaattatactaataagttatatgaatttttttttttttactttattgtaacttattagtttattaaattgacttgaaagtaacataagtattttaccaaaagtaaaataaaaactaagtaatgcaaaagtattttaaataacaaatttatttaatataatttaaaaataaacatgtaagtttcaaagttattatattatatgacaactcattagtttcaaaaataaactttaaggttacccaaatgtattttaaataataacataacacaatataacttaaaattagctaattgattattaagatatttacaagtaaggttttagaggtaaccaaattgtatctcaaattatataatttaaagataattttttttacgtaaaagtaactaattagttttctatcagcatcataagtaacaaaaaagtttctttttaaaatccaggaaaataataataaaaggaaatttcggattaattttgtttcatgtatattattttagaataaaggtatttttattgacgtagcaaggtattattgtaattgagatttattaaggtattttt

SEQ ID NO: 143751 - DNA, 527 bp, Cannabis sativa
ttattttaaattttttaatattttgtaggatgcattaaataataatagtgtgcacaactatgaaaaaagattgaactaaacttttcttagataccgaaataataagagatgcaacagtacatttttttgcagattattttagaaagtaattgaaagaaataaagatgaaaaaataaaataaatatatatactaaaaataaaaaaaatttaaaaatatcacataaaaaatattgacgcatagacaacaaaaaaaaagaaacacattaaattaaaataataaaatgatagtatatttttttaaaagcaatagctcagaaaaatatttgtagtataaggtattagaacagagtataaaaaagaaagagatctattttattgattgtgaaattgtatcttggttacaaagagtacatccccttatataggaaagggtacacagaagttataacaaacacaattggcttaaactaacataaccgactataactaacataactgacagaagggtagaataggaaatcctaata

SEQ ID NO: 143752 - DNA, 518 bp, Cannabis sativa
ccttttctcttatctcttatggacggcacaaaataaataataaaaattaaaatgaaattttttattatataattaccaatttatttgtttatctaattaataaattaaatatggaataataatattggtaataaaacatatattctatagctacagagcacaattatgtaactacatctaatagtatatatgtgttttctgtttttttcttgatgttatatgtatatagacaagtttgtatatagtagtatatttgtaggagaaattaagctatctagtagctagctaattaagctaataaggctaattaggatttttgccacctgaactttgacatgtatcaaattatgtccttgaacttttaagatcgtttaaaatgctacctgaactattgaaattgttggatttaaatttttttatcaaattctagcacaattgaataaaaaacaaagcacatcttagaaaatggcattcctatgacgttgttatgattattcaaattatcaaaacaaagcacc

SEQ ID NO: 143753 - DNA, 908 bp, Cannabis sativa
taccccatcttctagtgatacctcgtcttctagtgactatggtaaattccctaggcggaaaaattatgccccaactctccttttactcgtctttaattactgctaacacttttatcttgtcttgcaaaaatgcattttgagggtctcatgcagaggaaagggaagaagagggtgaccactttggaggctccttctgatgtcgaggtggagcccctcaaaaggcgaaggaaaaacactgctaacaagaagaaggcctcctagactgctaacctcgaggtccctgagactgaaactcaagatccaattcctcccctggtctctgcaagtaccaatgagcctgctccaaatgtgaacccagcttccgcctctttgagccaagccctcgagactcttcctatcgacgccaacagtcccgactccaaatttactgcagaatttggtgcagcctactgacgtcacttcaaatccttccttccccatgaatgggatttgatttataatgaggatttggagaacatgctcgagaggagtgttgctcatggcctctcggtaaactctgtttcctttctcctcttatttttcctttaactattttcaaatttgctaacacattcactatctgtccttagcaaactttcttcgcatttgtcacccaacagcgtggcatggacaagctgaagtacttggaaggcgaggttcaaaaattgataggtctgcaggaggttgtgtccaaacaatggaacgatgccaagttaaaaagcacccgcctcactaaggatgctgagaaggttaaaaagaaccttgaggccaagcttgaagctgctgaaaaggaggcaaaagacaagaccggggaatgcaagaagctcaaagaggaacttgatgctgccaaggtgacacttgatgggaaa

SEQ ID NO: 143754 - DNA, 598 bp, Cannabis sativa
  modified_base (572)..(572): a, c, t, g, unknown or other
tctttttgattggagttggccctcctgggattctttggatcatggcctccatgccttccagttttcgtgcaattatttgttcaatcaactcctcttgagtaggtccaacattcactcatgcattcacaatagaaggtgttaaatcaattattgcattgtttgctctagtaagggattgttggtttagagagcttccggggatagtcaggttggtcaagttaactgctggagggatggctgacgaattgactgctggagggatggctgacgaactgactgctggagggatggctgacgaactgactgctggagggatggctgacaaactgactgctggagggatggctgacgaattgactattggaggaatggttgacgaattgactactggaggaatggctgatgaattgactgttgaacccatattatgtaggaatgtcaatctgggctattttcgcgggtcgggtcgggcccccggcccaacggcctgactgtggcccgaattattcgggctcttatcgggcttctagcccagcccggcccggtgttaaaaattattttaccaggatctnagatttactcacaagtatgttgttta

SEQ ID NO: 143755 - DNA, 1201 bp, Cannabis sativa
  modified_base (79)..(80): a, c, t, g, unknown or other
  modified_base (200)..(203): a, c, t, g, unknown or other
agacccaaacttggacccgcacactggacccaaacatggacctagacccgaaccaagacccagatcggggtccagaccnngacacaaacccggacacagacttgcaccgaactcaaacaaccaaacatagaatcaaacccaaagctagacccggaccgggacccaaactcaaacccagaccaggattagaaccaaggacnnnnacccagaactgaatccagactcaaatcgggattggaacttgggactctgacccaacgtagactaagacccaggacgcgaacccacacccggagcctgatctggacatagactgaaatctagtaacgaacccaaactcagaccaagactcgaactcataatcgcaaatggaactagaaccgaaataggactaggaccaggaccaagacttaaaccgaaaacgaaccctgatcaaaaccaaaacagagacctaaactcgaacccagactaggactcgaacccaaacccacacaataatcgagacctggaccttgaatcaggatagggacctaggaaacagaaataggaccgggacatagtacccgaccaagacatgaacttgaacctaggacccaactcgtgacccgacacaagaaatcgaaccagactgggacccgagattgagatccggatctacacccaagggttggaaaaaacccgtagtcggtgtttggattttggacccagccctggactcgaaccgtgacaaggacccgaacctgaacccacttcccaacccaaaagttgacccgaacctgtatctgtgacccgaaattgaaaccaaaaccggaagttgacggggactggaactaggacttgggcttggaatcataattgaaatttgacctagatctagaaacgtaaccggaccacgacccggactccaaatcagacctagacctgaattgggagccgcacctggatcccaacccaatcctgcgctcgggacccgaacctgaaatcagaccccgaaatggaaccaaatgttgaaacacaactagggtcaggacctagaaccacacccttgtctcgatcccgaacccaaacttagaaatgggacctgggacctaaacctgaacaagacggagacccgtgacagtgatccagatcttgactcggaattctggtaacggggctaggaacagactagtaggcgttgtctagatctgggactcagact

SEQ ID NO: 143756 - DNA, 712 bp, Cannabis sativa
ctttattatattacactcgtatcaaactacttgttgcttacaaattagactcattgttgttggctaaaagcaaggtcaacattttggtgctttcattgagagcagaactcaagtagatcgagacctaggaacgcgaccggaacaaggacttggacctcgaaccataaccaaacatagacctagacctaaaacgtaaccggaccaggacgcggacttccaacccagacctaggcccgaacgcagatcccaacccacacttcgactcggtgccgaacctggacccgaactaagacctaaacatggaacctgactcgggacacagaattggggtcgggacctagaaccgcaccctagtctcggtcccgaagccaaactcaaaactgggtcccatgacctgaaccggaaccagacggggacaagtgacagggatccagatctaggactcagactagaacccgaacccggaccaggaccaaaagccggaccctgatctaaacctgagacccaaaactggaacctgaacaagaaccgccagacgaggaccctcgaacaagactaggaccgtgaagaggacccagacccattcctagaaacgaactcaaacctagccgcaaacccaaaccgagaccggaactcgagcccagacacggtcgtgtacccagaccgggaccgagacccgaactcggacctggacctagatttgggacacgat

SEQ ID NO: 143757 - DNA, 521 bp, Cannabis sativa
  modified_base (26)..(43): a, c, t, g, unknown or other
aatcactgaaatagtaaaattgaatnnnnnnnnnnnnnnnnnnttaaatctaacaatctcaatagtgtaggagactttgttaacgaccttaagagttcaagaaagcatgatttggtacatgtcaaagtttaagagacaaaaatcctaattagtcaatattttatttgtgtcgccttattacaatatcactaatataattaaattaattaatcataatttattatatattattagaaattagataggtggcgtttagtttggaggaatgaaaatataggaataaaaatgataatgggaattggaatagcaatggaatagaatggaataaaatttaaaatacataaaaacaattattaaaattttttaaatcttgcattgaaatagtttttccttctatttcaaaatgaaatagtcattctaccagaatggtggaaatgtcattctattggaatgatattccaatattttaaattgtaaccaaacaaatgaatggaataaaaattatttcctttccatttcat

SEQ ID NO: 143758 - DNA, 589 bp, Cannabis sativa
catgctttactgttcatttgcttttctgggttggatgttgaatgtctgggaatttctgttttgagtttctgtacaatgcgtttgattcctccttttttgcgttttaattacttattttcatcgtgttttctgtcgaggacccatctttatctcacgtatgacactcaagggtttagagcagacttcgtcttctcggttttatacttttttccttttttctttactttttcgtaatgtcactatctgtgggattcttacacccgactcttgtcaaggaaaaccctttgaggccttcttttttttgcaagtgtctggagggggcctctttcaagcggttaggggacccacattccctttttgaagaagaagggagagaagcgtttggccaccctaaccgcttgtggttctgcgtctgggtctaagtcttcgaagaagggagagaagcgtttggccaccctggaggaggtcatgaagggtcctgtggcccaagaagggcacaagtctcttgccaacggttgggaagcggctgagcttcgctccaccctgacctgccctcaccagttggaacagatcgtggtggtggcaggca

SEQ ID NO: 143759 - DNA, 1254 bp, Cannabis sativa
aacaatcttttctttaaagcaaatcgtgtagtgttttaattttttttaaaattaattatttgattttttattaataaaaaatttaattatacgttcaaatcactgatataatgtttgaatcccactttttttaaaggatcaacattacccctttttagggtagttagaataccacggtaaaagcattacatgactcataaaatttataacctcataacaaacagggtaatcattgagattacctttcctcttctcacattaactcattccaaacagcctcttagggttttgaaattattaacctaaataatttttcaattaaaaaaaatataaaaagaataaaatattaaaaagatctatctagaaagatagagaaacaatttccaacgtgcctttttaatttttaatttttatattttttattaaaaatacctatagtgacgtgcaatgcatgtggggatacattttcctagtcactcttgatgtgactctataagtcagtttttttaataaataaaaaatattagaaaattatagataatactttttggtgacacttcatatttttagtgacacgcaatatgagagactaacaccgaaaatttagagtctacttatgcgcgtcactaaaaattattcttaactatttagtaacgcgcacaaaagtgagagtcactatatagtgtcactaaaaggttaaattgtagtagtgataatttcagatccttttttagtagaactgattcattatttgtagaggatgttcaaaataggattcaaactcctcaagatgtcatcccactaatttagagaatcaactcatctttctaaaataaaggaaatataattaggattccctttgactgtgtattcattactacaaaatgggtttttagcttccctttttttcaatccattttataaaaagggaagctaaagggtctaaaaatacccgcttattgaaaatttacctttagaggcagtttttttgataaaaactgtaggcataaaattggattataccatttaccgtcagtgtggaatcaaacgacatagggtttgtttatgcaaccctatgccgatggttgttatagaataacagacggcatagtgttatataaacaatccctagctatgtcatcttcatcttcttcctcacgaccaaaccagagcccaccagcagccaaagagaacccaaaaccctcgccaaccaccacctccgccaccccctttctcccccatttctcaaccatt

SEQ ID NO: 143760 - DNA, 2691 bp, Cannabis sativa
  modified_base (499)..(500): a, c, t, g, unknown or other
aaaaagcaaggtcaacaggtctatattgctaccaagtcatgccatttggtctaaaaaacgctggagccacatactaagatcggtaaacaagatgtttaaagaccagatcagacgaaacatggaagtgtttgtggatgaaaggctcgtcaaatccaggaaggctagggggcacatagatgacttggacgaatgcttcaaagtcctcaggaagtacaacatgcaactaaatcgcttaaagttctcatttggagtcagctcgggaaagtttctgggctttattgtcaatgctgaggaattgaagccagtccagagaagattcatgccgtcttggatatgaagtcgccaacaagagccaaggaagtacaaagtttggctggtcagatcgctgcactcagcaaatttgtttcaaaatcaatagacaagtatgttccattttttcaacatcctgcgaggaaataagcaattcgagtggatagaggaatgtgaaaaagcttttcannagctaaaaatgcaactcgcaaagcctctcgtactcttaaaacctctggatggagaagaacttgggttatccttggctgtcacgaaacatgttgtgagtgtcgtgctgatcagagaagaaaacaacatacaacacccggtctattacatcaataagagactcattaaggccgaaggccagtatccgttgatagagaacctcgcttactgcctcattatagcaacaagaaagttaaggccctattttcaagctcatcctgttcgggtatacactgatcaacaattacgcaaaatattacaaaaaccggatgcttctgggcggttactcaagtgggcagtggagttgggtcagtacgaaattaccttccaatcccgaacaacaatcaaaggtcaggccctagcagactttgtggtagaatgcataggcaaagaagaaagcatatcgaaaggcgaccccgagccagtactaacacatcaaccaagtaatagtgaagacaagccgacttggaaactacatgtggacgggtcggctacagatcaactatctggtgcaggaatcgcccttgtcacacctgggggaaacacctgcacgctccagtcaaatttggattaaaggcatctaatattaaagccgagtatgaagctttgatcgctggcctaaaactagcccaggagatgaaagctcaacacatcgaaatttgtagtgattcacaactagtggtaaaacacgtatttggagaatacgagactcggggagaaaagatgatagcatatctgagtaaaatacatgacctgctcgcgcaattcaaaagctacggtctcagacaaattccaagggaagaaaacacaactgcaaatgtgttagctcgattggcaagcagtaatgcaagtgataaagcaaacttggttcctatccagttccttgaagaacctagcattacttgcacggaagagatcaaaatgattgatacttcccaaaactggatgacaccaatagcaggctacgtcaaaactagggaactccaagataatcgaaatgaagctcgaaaaatgagaaggaaggctgcacggtatatcatagtgagggaattatgtacagatgagggttctccatgccactgctcagatgtgttactcaagaagaagttgtacgaattttatttgaggtacacgatggattctgtggaaatcatgccaccgggcagagtttatctaagaaaattctaaggcaaggttaattctggccaacaatgattgaagattcaaaggcctatgttaagaaatgtgacaaatgctagagattttcgaaatacctcgagctccgcccagtgatttaaatcagatgcaaagtgcgtggccttttgccatttagggaatcaacctaatcggacaattacccaatggcaaaggaggagtgcagtatgcagtggttgcagttgattacttcaataagtggacggaagccaaacccatggcaaccattacatctaagaaatttcaagaatttgttgtgaagaacataatctgccaattcggattgccgtacaaaatagtttcggacaatggcgaacagtttgaaagccagtccttcatcgatttttgtgcgaaccatggtatcatcaaaagtttctctgtagtggcgcatcgccaagcgaatggtcaagttgaagcaatcaacaagaccctgaaggatacattaaagaaaagactcgaggatgctaaaggaaactggccggagaagctccctgaagttctatggtcgtatcgaacaactaaaaaaatggcaactagacagactccattcgccatggaatatggatatgaagctatgctacccgtagagctcgagccaccatcccacaaaagattgacgtacaaccaagaagcaaatcacgtactcttggccgaatcacttgatgaaattgaagagaagtgaaccacagcaaacttaaagttgatagcccatcaacaagaagtaactcgatatttcaataaacaaatgaaggctcagaaattctttgtgggagatgtggtcctaagaagagtatttctaaacaccaaagatagtacgacaggtgtactcggacctaacttggaacgaccatatcgggtggttgaagttctcgaatcaagagcatacaaattgggtaagtatgatgaaaatgcaacttgttctagtaccacggtattgga

SEQ ID NO: 143761 - DNA, 1087 bp, Cannabis sativa
  modified_base (1037)..(1037): a, c, t, g, unknown or other
cctaataaggaactaagaatcaaatccaagagaactatggttaaaactattcacatggagcaaccaaaagttttctattacaaggacaagaagggaagttctgataataagtctatttaatggatttaacaaaacttcatgatcttagtctcatagtttcgagattatctaaacctgtagcttgtggtatacctgttaatttacttactctagtgcaagtaacttactttagtaagatattgacgcatttttcaaatggctaactctaaaggaagtcttttggctcctagacatagagtttatttatctaagaaacagtttcatctattccagaaaaaagataaaagtgtcacaagaagaattccttaagcatcaacaatgagaggtctcatgtatgctctggcatgcattaacacctgatgtttagtgggagttatgagtaggtatcagtttaatccaggaaacgaatattgaaagacaatgaaataaatcttaagatcaaggaggacctatatgttagtctataagggtgatgtttttgaaaccctttaggctgcactcacttagatttcaagatttacattaatgctagaatgtctaaattttggatggtgattactctaggggtggagcagtgatttttggagaagtgttaaaacctattcggagtctctacctctaccagtgagactcaatgttaaagtggcccagaaggctaccagataattatttagcatatgggaagttctatatagtttttggaattattctactcatggattaactactagtgttactttctgataacacacatatagttgccaaaaaagtgaagaattcaataccataagaggactagacatatagataggaatttcacaatatcaaagattttgtgactaaggagatgtaatggtagagaaggttgaaagtcaaacaacctatcagatactattataatgataatactacataccgcacttgagctggacatcaaaattacaaaattaattgaaatacacttttagttttatatnagtgcaagtgggagtttgttaggattatatgccctaaataaaatccattt

SEQ ID NO: 143762 - DNA, 726 bp, Cannabis sativa
aacgagagtattcacatagcttatgtgacttttagattattgcttaatgcgaattgtatgttgttctatctcagagatgcagtagttgatatgcaatttaggatttttatgatctgaaaagagtttgggttaatttataatctttcatcacataggaggaagaagaatagttaactagtgttaacaattgaggaatcaaagcaattgaaatcatatccctaatttcacatctattgttaaacattttatttgtttattttatttaatttttcttagtttatttagttcaaaatttatttattcgatgtcaaatagaaacatgaaattaattgattggtacttaactacagtcctcgtaaaaacaatctcacttacttgagtattacgtgtttaaacgacacgtatacttgcgtgttggatttatcacagcaagtttttggcaccgttgctagggactgttttagttaatatcaatatagttgaattctattctactttggtttccttttatttaatttttctgatgttttactgaatatgtttcacctacaaggtaaatccaaatgctataccttgtgaatttcacccaacaacacaatgagcaattttattctgcttgggggagatttaaggagctcggagagagatgttatcccactttctcaagtgggtgttttacttggttcttttataacagacttgatgatgaaacaagaagctaggttg

SEQ ID NO: 143763 - DNA, 501 bp, Cannabis sativa
  modified_base (216)..(235): a, c, t, g, unknown or other
  modified_base (298)..(309): a, c, t, g, unknown or other
  modified_base (473)..(475): a, c, t, g, unknown or other
tacaaaattgtaaaatgcccttcttttatagtgtttcaattagggcttagggttgaattatatggattaaaaaagaataaaatattggaaaaaaattaacactaaggctgaccactaatatgatcaatctctagttacaatttttccgctttatttcaaccagttagtctttttaataatactatattttgcaattcaatcctataaatgccaaannnnnnnnnnnnnnnnnnnnaattaattattaaataaattttccatttatattatttataaattagaccatacaaagtctctnnnnnnnnnnnntgaccccaaaacctcttttcttctcaattaagcccttacttagtaaaaattcataaataagacatagtctaattctaaaattataatttaataattaaaatcaactaactgggtctgcaagcagtattatctcaactagtgaggggaccataggcctatataannnagctttcaataagtagatatagaatt

SEQ ID NO: 143764 - DNA, 504 bp, Cannabis sativa
ttagctcacttaaacttaattattaattaattaatttttagtatattttaaatattagttgcaatatcttgtaaatataatacacaaaaatattaactcttttcaataaataattaaaatatatataatgaaatttacaaaaatactacttttttttatgttttatttataattttacgacctaaaatttttatttataaaaatacactttcaaagttttaaaattaaaataaaaatacactttgctaaaaaaaagtaagaaaacaatcaaaaatcaacctcacgacaactataaatcaactacaaataaaatgtaaaacaaccagaaaaataacatcatgccaactataatacaactataaataaattataaaataacaaaaacaacagtttattatctttattgaagatgtatttttgtaaataaaaaaatttaaaaaataaaaatgaaaattttttcataatgaagtatttttataatttttttcaaatttttaatttatt

SEQ ID NO: 143765 - DNA, 770 bp, Cannabis sativa
tgtagtttgtaacagtaatattcacggcatgaaactatttcgcctttttttcgtttgtttaatactgccaaagtaaaacgtaagtaagttcttgttaattaaaaattaaaaattaatttgcattttaatattgttatctaacctctttcttctcttgcaattaattcatctgcattggttgattggtcagggtttacagattgatttatttcattatatgtagaattacagcctccagtattccttttaatatctttttgccatccaatatctccatagggaatcaacaatggatattgtagtggatcataacagctgaaatagtattgaactttatgacttaaaccaaaataattatatacaaatatgtcacggccaattagttcttcaccattatcattttctgtccatattgttgcaacttgtgaagactttggagcattgtaaatgcgttgatcaagtccaatatctgtttgtataattattttttagctttcaagatgttccaaatcacctagtgatctgaaaaatgaagaatatggattgatgtggagaatttctattagttcaacaacaactgatggaaccattatttttgaatctgaaagacgattttctaattcatgatctgtgtcatagaaatataattgttgcttagacgaatgactatttgacggaagcaaatcattgatgtagtgatagatttgtctttgacttctgaaagtgtagattcctttattccttcaacaaagatctttatcaactttaac

SEQ ID NO: 143766 - DNA, 697 bp, Cannabis sativa
ctcaaagccacaagaggagtatcagggaatatgtggaaagaggagacgtgctggtagagaatgttgacattgaagacaacctagctgatccattcaccaagacattgacagagactgcatttgagaagcacagaaagaatttaggattggttaaaatgtgcaagtgggagttttttgggtttattaccctaactaaaactatatttcaatgttatcttgaatttcattatcaataaaagaacagaagttattttattgcttatttagtgtaatgcatggttcacatgtttatttcttgatcatgtatttgatatataaattctattaaatcctgatcgcattattattcatgattatggtgttgtctacaccgtgaaatataatcatgattatgtgattaaactaattagtcccatgatttatcagtactctaaatttacactgatatgataatcaacaatgtggtttacttacacttgcataagtgaaatggcttttccaaggcattagcaaagtaaacttatatcggacgtattggttatacatcggattggaccgatattcacaatgaaaaaagatatcataaacttactgtaatatattttctaagtaaatatcaatttgttgatcttagatcaaagatctcaatcttgagatggttaggttctggcttaaatgtattacatgtgttctttga

SEQ ID NO: 143767 - DNA, 684 bp, Cannabis sativa
ccactgggagtcgtagaaattaactttaagagtcatgctttcccaaaatttatttctttcccaactgtagggagtcctgtagatggcaaacaaatcccatcttgtattcacttgaccatcccacacttcagctttaaaaataccattagccaaacctactatctccaagattatatcccaattccacataagacaaaagccacccaataataacaaatgtcttcatttcaaaacttgtagagaaatgatcattttaaactaattataatctatattgtcttttgccacataaaaaaattaataattttttttcatatgttttcttagaattaaaagcaaattagttaaaaattatggtatatctaaattagttttgtttaaatcttttttattttaaagttatgtcgatttttttgaattttttatgagttgttgtaggttgtttgtatataaattttgttgtacagtatatttttattttattgtatggtatatatatatattagtaatatgtatttttattattatcattgttagtatgtatattttgatgaatggtatatttattttttgttacacgatatatcattttttaaatataatatttaagttatattttctattgtacttttgttgacatgacatataattttattagcatgctatatatttttatttttattt

SEQ ID NO: 143768 - DNA, 598 bp, Cannabis sativa
gtgatgctcttggactcatgcagaattataatcatgatcaggacgaactgcgtgctgcagtaaatctcgcattggacgaacaaaggcgcatgttgccgaatggacggatcgagagatggaggcattaagggctcatcatgaagagatcgaaaaccgtagtcggtaggctaccgtgctgataagaaaagcctatcaaactgtcgctcagcagccgctgaatgccattcccttgggttgaacaggcgaagatccaacgatgaattctttccaaactacaaatggtcagtcgcccaatccccgctcacgagttccgctcgtgggcccagcagtaggcgagcagaccttgtctggtaattcatcaggagaagtcatacctgatggttccacccagattaatggtgccattccacccgtcaaccaagcgaatcaatcgctaaggcaaccaggcacttctgtgttcgaaaggttgggagcaacccatgacctaaggaataatctgaatagaatgaggggagtagacgaacagaatattacgacgatcatgcagcctggagcccgtactcaaattcccgctcagaaagatgctgacgtaattcaa

SEQ ID NO: 143769 - DNA, 586 bp, Cannabis sativa
  modified_base (27)..(50): a, c, t, g, unknown or other
aaaatttttacttttagtcacaacaannnnnnnnnnnnnnnnnnnnnnnnttgtgactaattataaattatcgttcttacgttgtgacaagtctgtggctaaaagttttagtcaccaaaatcacaatttgttgtgactaaatgtatttttattcacaatacttattgtgactaaaactaaattagtaacaattttttatctaaatactatattttagtcacacgtaatttttttgttttgactaatagtcacatttagtcacaaaaaattatattgtgactaaaatattatcactaaaggtggcttttgctatagttgaaccaggttattgaaaatatcttttcaatgcaattttaaccaggtatcatttggataaaaattgagagagttatgctcgttttactgtaacgtatagtttgtgttgtacttgcagtagttgcgagcactggccaagtggcagctctcggccatgcatgttctcgaacccctttggggtgtgttttgattttttatttatgtttagtcatattttaggagtctcggggacctaacaacctcatttcgacgtctgaaaccctaacgggag

SEQ ID NO: 143770 - DNA, 579 bp, Cannabis sativa
  modified_base (196)..(199): a, c, t, g, unknown or other
ttctctaatagctaagtacttaatgtcgatgtgcttgctttgacttccacttttgttgtgttcttagccatgaaaacagcaactgaattgtcacacaatacttttaacggctttgctatggaatcaacaactctaaggcctgaaatgaaactctttagcaatacactgtgatgtagcctcaaaacaagaaacgaannnngcctccatagtaaaagtagcagtcaaagttttttgttactcctctatgacacaccaacaaacataaacacgtaaccagataatgatttacttgaatcagtacaaccagcgaaatctgaatctgagtagccaactacttctagattgtcagttcgtttgaacatcagtttgtaatccttagtaccctgaagatacctcattaccttctttgcagctttctagtggtctatccctgagttactctgaaatcttcctaatactcttatagaataagcaatgtcgggtcttgtgcacacctaagcatacattaggctttcaacagtagaagcataaggaatgtaacgtctccgcttcaagcttccattgggcccttacacccac

SEQ ID NO: 143771 - DNA, 1474 bp, Cannabis sativa
aaattgtacaatgttaatttttttgtctcatgcggtgtgtaaaacctcaatatgaggtgaggtacttcataacactcctaaaaaatattacaaaacaatgctcaacatgaaaaataataaaagacatggtatgtaataatatagaacatttctaaatgaataatattcattgatggttattaaaaaaataacaataaatatcaattttagaaatttaaaattattaaattttgatcaaatgaccaataataaaagaaaaatttgaattgttgtgcttgaaatttaatttagctacttaattaaaaataaatatctctcattttatattatatcataaataaatttatgttaaaaatatctaactcaaattcaatattttttatccttctaagcccaaaataaattaatatgttcaaaatatttaaagtcttaagattatacactagagttgcacatactaactaattaatagaaatctacttatattagcaagtgttatgttctttccaaaatattggtagatagtaggagaatttttatttggtacacgcctatttgtttcgaaatttaagtgagttttttttttatttatatttacttttataatcgtgtctattctaattatttaagactatcggtacattctacttttataatcgtgtacatcttatgtgtttcgacatttaagaaattatttttatttatttatttaattatataattatgtacatcctgattatttgagattaaagtaaattttgaaaaaaaatcacgtagtttatatttttaaaagtaagattaaaatatgttttataattatttttttatatgcatattaattataattattattttgaatttattttcagcactatatgtatgtataatttaaaattcttaaatttgatagtagccttttttttttattaaaagtgtgcataaataaaaaatgtttatgttgagtaaattccacttataaccaagtccctttacaatacaaatatccacatcagcacatttgcaacatatataaaacaaaggactcagccctaggtgtctttgcctctactggatcaagaaatatgagttagttacaactgttattgtaactaactcctaaatttgtgatcaccccactctatacaagtatataaacatgaaattaaagcaaatacaacaagtacacacaaatcagaaaagagagagaagagttagacgagtaaaccctagtttgagacttcagctccaagatccagagaagagaaaggaattctcgtggcgaggagccagaaggaaggatgtacatgcacaacaacagaaagcagagttagatcgagaacaaaatagagaaaaacaaaacttaaaagtgtaaaaaagagaatcgagccttacctgatcgtttttctgtgacaggaagctctaaaacattgtaaatcgacattgttgatagtggatatctgttggaaattatttt

SEQ ID NO: 143772 - DNA, 741 bp, Cannabis sativa
aacgtccgctcctatttttaatattttgttgtagtgatgtacttctctctctatcactctcccgaagtctttctctctcttacaaggttcaactcaaaactgaacaatattacaggtatatatatagtttttatatttcaatatttagaaatctagggttcattaggatttatgagatgtacatgaagttctgttatttctattgtaagtgaggttgagagtttgttattgttgtaaatctgtagttactgtttcatttagtcttgtaactgtttgtgtcgaattcataatgagatttaacttgagagtaacttttacaaaatacaacacagtttttggtcattgcttcaagttttacactagtaaattaagaaaaatttagtctttatagtacgatgacagtctgacccacatgcattaaggcggataaggttgcaagaaataattgtacgatacatagtcatctatttgtgcgtatcccatttttcagcacgttcatcacggatttatattattttgaatttagcaccatagaatggttctgtacattcacccattttttacttattatttatcaatgataaagacctagatccttaaatatattatgtactatttttgtactgttctcctcgatggattactatatataacttctgttcatgaccgtaataacaattactctttttggaaggaaagactcgccttcctacctattacttattcttttttttttttttt

SEQ ID NO: 143773 - DNA, 554 bp, Cannabis sativa
aagaggttttagggtttatttgttgattaagagacttaatatgttaaatgacaattttatttgataataaattttaattattaaataaatactttcgacatttaaaggatttaaatgggagaatatagcatttatgaaagaaaggataaattgttgaataaaatggcaaaattgtaacgagtggggcccacattgtattgccgaccacttaagaaaaaaattagccatttatttatcattttttaatgccatataatttaaatttaaccctaggagaaatcctatttgaggaataacatggttctcattctcatccgacctaacattctagttttcattctttgtgagacaactagaaacatgagaacctccttttatataatttgaatctccttctctttctcttcatattttcgggccctatagtgaaagagtacatggccacccataacaagtcaagtactcaatcatagtttgtaagactgtgtagaatccagctgaaggagaatcgggctcagatcttaataatactctgtgatagaaaggaacaaggg

SEQ ID NO: 143774 - DNA, 1169 bp, Cannabis sativa
  modified_base (311)..(320): a, c, t, g, unknown or other
tctttatagtaaacggtaagtttgataaagacaactttatttatatcagtctttgtcatatataatttctattatatacaacaccttcacttagatatcatcgtacatcagtaatctgaaccgagattacttgcaccgaagaacgggcatcagtgaaccgtgctaacaaccattgattaaatgttcctaaactttcatatgttactgctattttattcatggctaagtgatcttagttctctgcacagctacaagtcacaacctcatatatgaataaggaatattccaatatttatatataaattattcannnnnnnnnnttaataatttaacattcatgcatatatcaaaatattcaactattatttaataattaagaatatatttacaagcttttcagggcataaaccctaacaatctcccacttgcccttaaagcaaattgggcatctccctaaattccatattagtcatatgacccataaaagatttcgttggtagagtctttgtgaatgaatctaccaggttatgttccggcgtagtctttaagatcgtcacatcacctctctctactatatttcttagtagatgatactttctctcaatgtgcttgcctctcttgttgcttcttgagtccttggagttggtcaccgctccactattgtcacagtagagtaccagtggtttttctacttctggaactacttcctaatcaatgtaaaatttcttcaaccaaaccacttccttagttgcttcacaagcggctatatattcggcttccatggttgaatctgcaatactggtttgctttcttccagactattagctccctccaccaagagtaaataatgacctagatgtcgactttcgactatctttgtctgattcaaaattaggatcagtatatccagtttgatttaactgtccactagaatatacaagcatgagatctcttgttctccaaagatacttgagaatgtgctttacagctatccagtgttccaaacttggattagattggtaacgactaacaatccctacaacgtagcatatgttaggccttgtacacaatatttcatacatcaagccaactgttaatgcataagggtactttctcatgtcctccatctcatgaggagtctttggatattgatccttacatagagtaat

SEQ ID NO: 143775 - DNA, 928 bp, Cannabis sativa
gtgattttataaactagtttaatactaataaattaattaattattaaaaaccgtgataagattaaaaatttgactaaaataaaagactaaaaaggggcattataagggcataaaaagcgtgttctgggaatctctattataaaaagttttataaatgaactatatacgacgatgcctcaaaaatataaaccaaaatacacaatagatccagcccaaaacaactcctagaaacctggcctataggccggcgaggtgaatatgtacagtgctggagaagactgtgacctcatcatggttgatctaggttttttttgccattacctgcaccacatagcacccgtgagtcacaaggactgagcaagaaaagtaataataataatcatatagtttataattcgaatactgtcatttatacacaatcagaattaaacatccacgaattgttcataagatgaaatctaaatcactactggcatcttccacgaataaacatcagtatacaaatatttggtaataaaaaactattatatcaataatagaattcatattcatttaatcatataaataatatatatgtgttacctcataaagtaaccatttcgttacatcatgttgcctaatcaggcaagttgatactttaatctgataatcctgtattgcattgcttaatcaggcaagtctgtgccatagcctatcacctaaatatcgcataactacagcacctaatcaggtgagctcgtgctaataacttgcacccatttatcacataactgcgtcacataatcaggtgagctcgtgccacaacttgacaccaatatatggcatcgtctaatcagacgagctcgtaccaatacctggtacttatcatatataactgacgctcgtacctacgctcgatacatcgccagaaagaaacccaacaacggtt

SEQ ID NO: 143776 - DNA, 914 bp, Cannabis sativa
tcttgtttccgtttcttccccctagatctagtttatttaatttattttgtatatgtatgtgtattatttagtaataaaattatgcttatttaaatagttatttttatagttgattcttacatacctaggatcaaataaaatataatccaattcaatctgattctaatttatattttcctcaatacagtttatagttaaatctagtctgccaacaaaactcttgaatataaaaaaattaaggaaaacttactaaaatttggaatttgggttaacttttataaaaatactgtcacgcggaagcagaataactcaaaacaactgtagaacactaataaaacaccagtaaaaatttaatacaatatactgaagtatgaaaattataaaaaaatacagtaaaaatataaaaaataccgcctagcagtatttttgtaaaaaaataaaaaaaagttaatataccatctaaatttcctattttaatcaatatatctgtcatttctagtaagtaacagtgatttagcttacggaaatgcatggtgattaagacttttctcatcaaaacttatgagttaggaataatatcgtagggaagaacgacaaataaaaatgtattcaattgaatattataaattatatattacaataatgttaatagaataaagacttacatacaatttctttaaagtagattcacttcttttatattaacggtggtcctggaagaaacacgagcaaccacttttcaaaataatacaaaagtttttgagtacacaaaagcactgtaatacctcctttcaagaaaaaaaaaaaaaagcattgtaataccgtaatgtctattctgccggtgtttattggatcacaatcaatatttttaagcctatccagatctgatccaattatatattggatgttagatt

SEQ ID NO: 143777 - DNA, 768 bp, Cannabis sativa
cttcagttacagctatgtattcagcttctgtagtagacaaagcaacacacttctgtaacctcgattgccatgaaacagctccccctgcaaatgtcattaagaatcttgaagtggataaccgaatcacaatcaccagccatgtctacatctgtgtacccatcaagcataagttcactactgccaaagcataagcacagcctggaagtacctcgtagatatctcaatatctatttcactgctttccagtgatccttaccaaagattatagaggaatcaactaacaactccaactgcataagcaatatctggcctcatacaaaccatagcatcatcaaactgtcaactgcaaatgagtaaggtattgataccatttcttgtttatctttctcacttgtaggacattatttggagcttagcttgaaatggcccgcaagtggagaactaactgctttagctttgctcatgttaaatctttcaagaactttttcaacataagcttcttgagataactaaagtttcccattcttcctgtcacgggaaatcctcattccaagtatttgtttcactgattttaagtctttcatagcaaaagacttgcttaactcttcctttagcttctcaatctttctgacatcatggccaacaatgaacatatcatcagcatacagcaggagaataatgaaatcatcatcagaaaacttctttgtaaacacacaatgatcagaagtagttctggtatatccatggctcgacatgaaggaatcaaac

SEQ ID NO: 143778 - DNA, 683 bp, Cannabis sativa
ttgtgaacgtgcctctattaatttttttttttttctttaataaattatgaaattttattaattgcaatgaactaaaataatagcttaatctaatatggacattttctctattagagacacaactagaattaaaatttaaaaaataagtcaaataaacagtcgcttaataattctcatgatacaaaaaaagaaaaattaaaataaaattagatgaaaaagattatagtatatatcacaattaactttaagaatacttatattttgtttcatccaccgctgagaagatataacagtagaaactgttgtagtagggttcattcaacctcatagcttgagtactcaattactattggtacgtgtaacgacactactaataattccttcagtcagagagaacttgatattaccaatcactctaacaataatttgatggcgagcaatcgaaaaacaaagaagaaccaacaatgaaacacaacaaaattacgttgtaaagacaagattaaaatatttaaaactatatcacaaagagaaaactaaaatacagtcccgaccaagccacacctaagtccaataaaagccgacaggctgactagagaaaaaaaacaatcgctaataattataaatttagaaacgagaaaccttaatatttttccttaacgtaagtgttgagaatcatggggttc

SEQ ID NO: 143779 - DNA, 1386 bp, Cannabis sativa
tgtgttgttttgattatatgttgttttgattatatttatgatttgtattatttatgatttgtattttttttttttttttgtatttgtgtgtgtgtgtgtttattttttctatttgattgtctgataaaactggtttcagttaactttattattaacatttcatattttgttatgattttttatagcgtcgaaactggtttcacaggttttaactattcagtaacggggttgttctatttttatgatattattgtatattttttagtttgtataaaaccagattattgtatgatatttgaacaataatttttattttattttaaataatcaatttctgacacacatattattttattttttcataactggtttttttaagtaactagttttttttattattattattgttgttcattgtacaaagtgaaataaactgaataacataattttcgattagaaaaatatctaaatacacatatttaatgaaataaataaaacacactaaggataaaaaagacaaactatcactgaatctagatatcatcataatctaagataccaatacgagcagtgtgttcatgaaagattttgggtggcaaaatcttagtaagggggtctgcaatcatggagtttgtacctaagtgttatatgtaaatcaatccatttttcccctttcttttacaacaaggaacttgatgtcaatatattttgacttcatcgagctcctgttgttgttggaatacaatatagttgatttattgtcacaatacaacttaagtggtctttcaattccatccacaatgtgcaacctagtgacaaagttcctcagccgtataccatgattggatgcctcataacttgtaacaaattttgctgtcaaagtggatgaagttatgagtgtttgttttgcactcctccacgatatagttccaccacctaacagatatatgtagcccgaagtggatctcctactatcttgacatccctcaaagtcggagatagaatatccaatgatctcaaagtgatatgacctcctatatgtgagcatgtaatctcctgttctcttcaaatatctcataacttttttggttgctttttagtgattaattcctggattgcttaagtatctacccaacactaacaatgtacgctatatctaaacgcatacaaatttgagcatacattagactcctaacagctaaagcatagggaatcttttgcatttcttgaatttcaaggcttcttttagggcattgcttaagaaaaaatttgtctcttttaacgacaagggtatcacatggtctacagtcttgcatgccaaactgtttgagtactttatcgatatagctcttttgtgataatctaaaaatgttgggttttatgccc

SEQ ID NO: 143780 - DNA, 654 bp, Cannabis sativa
agcttgagccgcctttttatacaccaagtctagtgacaagaaagccaaagattgggaaatctaacggctggacaaaatatgaaaaggcgattcataatgacactcgaaaccttacaaccgccagaatcaaaggacgcattttccaagaagggattttgacgaaaatgccctctgtaattattaaaaagcactttttactaaaataaactttttaagaggaaattgttatactcaaaatttggttaccatctcagtggaagacacgtgtcaagataaagaagggaatatgaatcaatgtaatcacttttttatggaataactcattaattaggtaagcatcagagtatatttgaaacctgttgattgtaatgtcttaggcaaggaatatacaaactagcacttattatattagtgagaaaccatatgtcgctggaagcgaatagcgagggatcaaggacagtacacataggaagacgaaagcgacatgtatcaattgtgaaagcccttagtgtacaaactaagtgtaacggttgatcggctcgagaccaaataatcgaggtgcccgtctcgctatgggaatgcatcctataacttcatcttgtcaacgctagcgaggctcacaaccctgggatgattttagggatgattgttgta

SEQ ID NO: 143781 - DNA, 1025 bp, Cannabis sativa
tcattccaccaaaatgttggaaaggtcattccattagaatgacattccaatactttaatatgcaaccaaacaaaagaataaaatgaaaattgtttcataacaactataacataatacaaaaaaaaaacttaaattttattatctaacattcacaaacaaaaaaaattacaatgtggaaacatgatatgcaaaaagtaagagaggataaaaaccaaatataaagaaaaaatgaaaaactaaaaaatttcatcttctacaaagtatatcataaaataaactaaaataaagatacaaaatacaacaattaaatcaagattaatcatttttagatgagattttttttcgtatagtaagaagaagaatgaagagttgattttataaaattttgagtgagtatttatagaaaaacaaatgtagccgttgatgaatagtaaaatagaggttggagaaaacatagttgttggtaagtagtgtaatggcagtttagagagaaaatatagccgttaataaatagtaagaataagaagaacaaaaaatggtgatcatgctcttgattttatgaaataacaattgaaaatgaaatagtagtaataatgacaaatataagtaagcataggagatatagtttttatatttatttatatatatgtataaaaatattaggaggtattacttttctattcacagtaaaattagaatataataaagagtaataataatatattagaggttagattaataataataataataatttgttagaagttatgctagttataataataataattatgttagaagttaatttagttataataataattatgttagaaattaattaaattaacaatatatatatattttatattataataatagatattgtgttagatgtttaaattagtataagataaagtatttatatgagtatgataagataaagtgatggtgctgataacgtgttataaatttagacagatatgagtaataaattttgtatttttttttctgctcttcactttgct

SEQ ID NO: 143782 - DNA, 1498 bp, Cannabis sativa
  modified_base (454)..(458): a, c, t, g, unknown or other
ttttttctttttcttattcttctttttttttttttacttctattttctcagaattcatgagtatgaattaagagtaaatatatattgttacctagtttttctatgtaagacatgttacagtcacgtactttgtatataactagatttgatgtcttgacctaaaaaaatacactaattagtttgttatttcataggcatacataatgataggttgtgtttgaaacaagaacataaattgttgttccaatatacaaaaaataaactaataagtttattggcgtatatcattatgtttaattgtactttactctgtattgaaaaaaataaaatattgttccaacaaacagaattagtacgtttattgacatatataatggttggctatatgaaataaaatgaattgttgttccaatatacaaaaagaaaaataaaaatttatttcaatatgccaaannnnnctaatagatttattagtatatatgatgataggctatacgaaaaggttgttatgtaaataaataataaaattttgtttcaatatgccaaaataaactaataagtttatttgagatatatgtcaaataaacttatgagcaatgcatttcatgtgagcaagacattttatcatattcaaatatttgacaagtgcatagattgttatccaggttgactatgtaaaacatgttacagtcatgtattttgtatacaaacagatttgaagtctcgaactaaaaaaaattgactaattaagttgttattttataggcactcattgtgtttgaaataaaaaataaattgttgtttcaatatatgaaaaatagactaataagtttattggcgtatgtttgattatagtttactatgtattgaaaaaaataaaatgttgttccaacaaatagaatctagtaagtttatttatatatttaatggaaggctatatgaaataaaatgaatttttattccaatatacgaaaagaaaaataaaaatttatttcaatatgctaaaattaatagatttagtagcatatacgaggataggctactatgtaaacaaaaaataaaaatttgtttcaatatgtcaaaataaactaataagtttatttgacatatatgactttaggtgaacatgcaaaataaacttatgagcaagacatttaatgtgagcaagaaatttcatcatatttaaatttttgacaagtgcatctattgttatccaagtttactatacaagacttgttacagttatgtactttgtattagggctgaacatttatacccacaaatccgaaaacccgaccacccgccccgacccgctactgaaaaaagccgaaaattttgaaacccgtgtggtcgggtcgggtctaacccgaaaatacacaacacgggtgtcgggttcggttttaaaacaatgcatttatttagtcgggttgtaacccgatacccgaccagtacgaaacaagcatctgttattcttattcatacatatgtttttgttgtt

SEQ ID NO: 143783 - DNA, 579 bp, Cannabis sativa
  modified_base (109)..(114): a, c, t, g, unknown or other
  modified_base (369)..(370): a, c, t, g, unknown or other
attcttattacgacatatcgtttatcgcttattaaaagactcattgtcgttggctaaaagcgaagtcaacagtgttcattttgtaagagctgactactctattcaactnnnnnnatctttgactcttgcctaccgggacattgtatttcattatgttgaaaaccttggaaaataataaatatgtttagtttttggtatttttgcaaatatatttgctatacttgctattttctgaattagtgtatgaatttattgaaccaaatgatttacttatgtttattgatatttgtagtgacaaaatgaaccacccacaccccaatcctcatctagaatatgcctttaggaatgaactacaaagtgtgaagatgnntcctagtcagagtatcactccacacttgctcatgatgaataagaaattccagaaagcagctaagcagggaattgttttatctgatggcagagagttcattgctccgacaatactactactttaagctccgatgagaagaatagagaaagtgattccacttcctcaaattatccttcacaatagattgaaccagcaataagaacaatcca

SEQ ID NO: 143784 - DNA, 942 bp, Cannabis sativa
  modified_base (409)..(416): a, c, t, g, unknown or other
  modified_base (885)..(888): a, c, t, g, unknown or other
cgtctaaggttcttttgaaatgattaccccttttcattgtttgcctataaataccagtgagcatttgtccacaaactctttttcaccaaccttccttgttaagtaagttttgagcgaaaaagagagttttttggcttcaagtttgttgaagtgctttcatcaaaactgctcgtttggcttggcgtaccctaaatccagacattcgatccttgagtaagttctcgatttcttttatgtttgctttgcacatttactttatgaatgcaccttcgactttactgtagaagatacgtaggaaaccctaagtttataaactctgcgattttcctttgttacgattcgtgcaatttcatcgttcgtaatgcttgctttttgaactgcataatgtctgtctttcatcttgcttatnnnnnnnntcatgaaattttttgccctaactcccaaaaattccgaacttcctaagttttaacttttcgttaaatattctcattctttaatctgttgagtacccctggtcggcatatttgcttgttttaattttcgatatcccgaccaaacactcatcttttgtgttgtcttttgtagatgaacccaggtgagttttggggaagcgaacaccaaatcgaccaggatctgcttcaactcttgcacgaagatcatcctcgtcttcgttctagtccaaatcttgaacaccaaatcgacacgtattctagcttaagttttctgtccagccataggatgatggctcacacaaaaaagacaatgcgtagagtcgacgcatctgaccctcaagtggcccggcatgccaccttacccagtgtcgaacaggattcgtccgtccaggaggaagaagatcatgaaggggacgttgaggtctaggagatnnnngagcaggacgatgtccgtcctagccgtccctccgaggcggaggaagaggaggag

SEQ ID NO: 143785 - DNA, 577 bp, Cannabis sativa
ctacagaggcaagacaagtcccagcatggtccctgatcaaagctccataacccaacctatacaatctgaactaaacatcccaacaatgacattcagtttcattctgtaaagtcctttttcagcaagttagatggcaaaatatttttcttttatggtaaggttgatttccatgcatacccgattgtcttaccttgtatattcggttttaattgctcttttttatgttaggaaagatgcatttttacagctgaacttttcttgtatggaaactccttgtaagagaagcaattctcttatagaaagttggtttttaaaggaaactttgattattgcctttttcttattgaattcgattgtatcttgatacaatcagattacataatttgtttatggcaggaatcaagtcttagtagaagattggacccgattatagcaatttttgctttttctggtcagatttgttgcatcaccttttgattctgatgctgcagatcgtgtttactttaggaaacttttgtacagttgtagattcaatcttgtggttgtctctagtatttttatgttctataaatagagc

SEQ ID NO: 143786 - DNA, 529 bp, Cannabis sativa
gatcggttctagtcaactatagtgcatccactagtagtctcgccgagatgatcggggatgactaacagattgcacgtgccttcctaaaattcccctagtcattatggaaatagacttgcaacaacaattgacacccaatagtgatgatttgtaacctacgagtaactttgaccaagatcgattctagtcaacaatagtgattccactagtagtcacaacatgatgaccgaggatgaataacaaatcgcacgtgccttcctaaaatgcccccagtcattatggaaacagacttgcaacgaagattgatacctgatagtgatgatttgtaatcaatgagtactttgaccaagatcggttctagtcaactatagtgaatccactagtagtcacactgggatgatcggagatgaataatggattgcacgtgccttcctaaaacacccttaatcattatggaaatggacgttcaacgacaattgataaccgatagtgatgatttgtaaccaacgagtaactttgaccaagatcg

SEQ ID NO: 143787 - DNA, 502 bp, Cannabis sativa
ttattgtatttagacgtgtgagcacaacacgtaggtctgcgttacgtagacataaataggcatgtgagtgtaacatgtaagtatgtgtcatacatgcatatgagaatgaaattattgtttatataatgtggtaaatatgtttatcaatattttatactgttttgctgggcttggcgctcacgggtgctctactgtacaggaaagggtaaatctgtttcagatcaaccatgagtatgggagctgcatggcgtatgtacatgttcggaccacactagattaagcgggttgggatctaccagtgatgtattttgtgactctattttgccgcctaggtcggctaatgaaaatgaacttgtaatattattttgtaaaatatttttgggatcacgatacatgaaccttttagtttataaagtttaaattattacaagttttgtaacgccctaacatttaggcacgctacccaagatgattaagaaaccctaatcctccaaacgggatt

SEQ ID NO: 143788 - DNA, 1079 bp, Cannabis sativa
atggttttatttcgttttaagtttcaaaataattggattcatataggggttttgtgaattagaatagttatgaaggttctgaccttataggattgttctcgggtaacatgtgaccagtttcaatgttttcttgctgaaattgaggtgattttgggttaggaatcgagtttggaactttttaaagcttagttcgaacgttaatggagtttttcacttaagggctcgattgtaatttctgttacgtaagaatggtaatatttattgtatttatgtgccctgtgaagtttggagtgatttggttaagctttggtagtttttcggtgagtgcaaaaattaatattttcgtatttcatagtttttagaaattcctaggagatcagaaatcgtatttttatcaaaacttttgacttgggtgtctgttttggacattctatataccgtttcgaagcttgcaatgagctctacaatatggtgtatgatttagagtcaaaatataagttttattttagtgtatttatattgcgagatttggtagaaaaccctaaattatcttatgtgaatattaagcagtgttttgggataaacacttattggtttactgttgctatggcatagggccgagatcatcagggatagttctccacttgggttggccgaaatgtatgaacctggattaagagtaaaaaaaagtatattgtactacatagtacgttgtgtaatacaattagaattgttatgaatttattaatattatatagttaatatcgttatataatgaaaatattggttggttgagtattaataatgtgatgatattatgcatctgatatatgggttcacctgattaggtggtggaataccagtcgtaggtacgggcgtcagtgatatatgatgagtattgagcgtaggtacgggctcacctgattaggtgatgtgattttcctagtgacgtatcgagcgtaggtacgggcgtcagtgatatgaaaaacccttattaaggcatagatcaaaaccattgttttgtttcttcctggtgacgtatcaagcgtaggtacgggcgttagtgacatatgataagt

SEQ ID NO: 143789 - DNA, 758 bp, Cannabis sativa
  modified_base (49)..(75): a, c, t, g, unknown or other
tttatttcatcgttttggaaagtttatatttagggtgttaataaacatnnnnnnnnnnnnnnnnnnnnnnnnnnnaaaataaattccaacacttgtatgttcataggtatatgaagaaatgtgtgaatctctgggtagtgtgtccaacatactacgttgcatatcacgaggtccttcgtgtgatgtactcaagtacccatcgtactatataaatagtactcaattttacacccaatctcgtgataaatctagaaaaacacaatatagtggtgtaataattattactaagactttccaaatatctagttcaaaagacaaaaaataatattgaatgtgacatgtccttttctagtgtaattaaagaaatttgagaattagattacagtagtttttgaaaccctgtttttctttatgattgggctaggagttataatggggttaaagacggtgaatttggattcaagttggtggacttgaatcgaatcagacacaagtccaataggtttataatggtgtcccaagtcagtcaagtgttttacatgagggatcctttagatgcatgctggtcagttgtcttgacgacgcaaccaaaagattatgataatcaagagtctaatggcgatgatctcatgcttagtgaccaaattcatcaaatcacccaacaacctattgatgtcactgttggggatgatatcatatcatctcgtgatgatggtgaaggattatggttgaacgaatctatcaacacatgattcata

SEQ ID NO: 143790 - DNA, 1270 bp, Cannabis sativa
  modified_base (28)..(64): a, c, t, g, unknown or other
ttcatatcattttagaagttcatatttnnnnnnnnnnnnnnnnnnnnnnnnnnnnnnnnnnnnnctggtaaaataattccaacacccggaggcatgagtcatgttggggggaggcttgttggtgcttgcggtgaccggaggaggagtttgatcctaaatctcagtctcaggaacctcaaggtcaataggctgagaggttttcttctttttatgagcagtggctttcctttgccttttaagaggctccacctcgatatctaaaggagcgaccgaattggtcgctctcttcttccctttcctctgcataacatcctcgaagtgcatgtctgctagttaagaaaaaagtgttagcactaattataaataagtaaaaggggagtttagggtataattttctgcctaaggaatttaccatagtcactagaagacgaggtatgactagaagatggggtagaaggaccataatatccactaaaatccctacaacttgtgatcttgaatatattaaaggaatcaagtggttctaaatcccagctcgcatctaagtgacttgccctatccatcatggtaccatattgctcggctataccatagtacgaatcattacaattaatctggacatggaatctggggtaccagttgtcaaacctatgggttatacgatctacaaggagtgggttccaaatataaaaattaaagcgactatcacaaaatgtaactagagtggtacgctcagccctaagcagtgtgggtgaccaaccacattgattaccttgggatgctccttcaccagcttcccgaggggcagtgtttagaaggtacagtgcctgagccacgtgatcccgagctttctcctcgtcaaggataggaacctgctgccaagaagaatacttgggacacttgtaatcacaagtaaactccttgtcagtcaggaggtccaaggaccttagattgacttcgcttagaagaaaatagcatgacctaagaccgtagggaagaattagcaaaagcctgtgtcgctcggccatctcaggagtggggacaggtgggtcaatggttttcttctctgttcgaaccaggctccgtcgatttcatggatgtggttctatttacgagagggtgggaggtacttcgattcaaggctctttctctgtgtttggcgtcggtgggcccctatttaaggcttcgtggaggtgggaggcacttcgtaagagaggggacagtggagatgggtggactacgaagggaagagacaagagagagagagaga

SEQ ID NO: 143791 - DNA, 641 bp, Cannabis sativa
aataaatcatgtgaaccttgcaacgttaaatgttatttcagatctttattaataagtaaatctgcttatattgaaatgagttttatttagggcacaaaacccaacaccagaaacctgaaactgtcacgaattgtaaagctaaaatttatgggaaacctgttgcagaaacgagttactcggttttctacagaaaacccaaaaatttacaaagcttcaccaaatcgattccaaacttaaccaaaccttccagacctgcatgttatacccatataaacataacccaagcaatagaacaacataacatcctcaaaatcaaatttcaccattagagaccaaagtttgagttctaaaactcaaaccttgtctaaacaccaaattaacccatcaattaacctcaaatcagctcaaacaaccataaaaaatctttataatacaaaatccaactactcaaacaactcagaacccaacatctcaaaagtcatgcaagagaagctatctaaactaaagaaaccatagaaaatgaactaggaagcttacccaagcttgaaacctcaaccatgatgctaaataatctctgaattgctaaagaaaatccatggttccttgctagtttctagggttcacgagagagagagagagag

SEQ ID NO: 143792 - DNA, 739 bp, Cannabis sativa
caaatttaagtcccagacgttcccggcgtattcactgcgagtgaagctatcctggtgctcctttagaacctttttcagggcctccacctcagcattcccctttgtgtactccgttgtggcataattgtgcttggcgatctggagctgggttctttcctcatcagtaggaatgggggttaggacgatacccagaggaacagtatactcgtccacctcggacgaaatccttgagtcaaagcaaggagctggagggtctactcagcttagcttcttagcaacctcagtctccaccatctttcctttgccctttcggtccaagggagggagaatctcgccttcttcttccccttcttcctcatcgatcagaacgacttgggggatgctagaagaagaccttccaggagtcactgttgggtcgcgagtttgaggcacgccgacctcaggactgtatgttagggcgagcgcatccaagagctcatccatcggctgggctacttaaagaaataaacaagtaaagacattagagcattatcaaaaagtgatacattcaggaataatgtaatgaaactaatcctaccctggcgatctaattcttccctagcaaaagtatgtattaaaaggctggtgtcgtcgccccctagaaacatgtccgaggggaggaaccaattggaagataaataggtagaatgatccaaagggataggtgcgggaggaccggaccccatccgggaccggccta

SEQ ID NO: 143793 - DNA, 800 bp, Cannabis sativa
attgggaatgtcgggagtggtcaggaattttgagtttcccaaaataccctttagtacccttgtatgttattttagtgtggaggggaaaaatggtcattttgcccccatggttaatttgtccttttgtggacttattgtgatttgattatgtgactatgtggcatttgttttggcagaaataataagaaattaagtttatttcatttttattcaaagtttcaaaagtgagaaaaatcaaagttaaaatataaatctttttctctcaaactctctctctctctattttcggcctccttgagcagcaaggattcttgacttttctcttgaatttcaagctaattttagcaagatttagtgatctcaagttgttggtatgatttctatagctctcttttaagtttcttggaatttttggaagaaaatgaagatttgcatgcttgatttggttgtgttgttgctgttaatttttgatgatgtttgcagaagtttattcttgattatttgagtagattagagctgcttgtgatgcatgttagtggtgttgtttaaagttgtgaattttagttcaaaagctatggttttcaagaggaaatgtgaagtagttgctatgtttgttaatggtgcttgagtttgttttctggggttattatatgcatatttaggaagatttgagttggtttgaatgcatgttattgatatttaaccaagtttgagttttgaactcaaagcttgatgctttaatggtgatttttgattgtatgcatgaagctcggttttgatgctttagaaatgttccttag

SEQ ID NO: 143794 - DNA, 749 bp, Cannabis sativa
  modified_base (687)..(714): a, c, t, g, unknown or other
atgggtgttacttaggcacaaaacccaacataataactgtgaaagcacttagcgtataatatacaaactaaataaaacagtcggtcgaacccaaacaactaatagtgaggcgcttatctcgctataggaaggcactcttctgatactttcaccaatcaacttcagacatcttttaatgagactcagtcttgacgagttagttctctcaaacagaagctgacattcaaattatgctaactgctgaagtactcttcgttagtaagaactgcgattgtcaaaatgaagcgttatgccttcaagcgaagaagcaacgaggtgtacatcatcaacctcgaaaagataggggaaaagctccagctcattatcaaggtcattggtactgagttcctgtcgagacatcccagaatgttatgatttaaaatgtgtttaatacacgatcattttgacccagtaaaagcggattaatcaaagctgtgtgattttcaaatattaaccgcatttatactacgtgatatgtaatcaaaccccataatttcgggggataaacgctgtaaagattacaatcaactctgtaattaactgcctactatgtgattataaatagaggcaagttagattaaaaaagggacgaaaaaaatcataatagaaaagcccctaaaaaaccatcaaaaatctaataagattgannnnnnnnnnnnnnnnnnnnnnnnnnnnaaaaccacgtaaaaaatcctttgtgttcatacttt

SEQ ID NO: 143795 - DNA, 655 bp, Cannabis sativa
  modified_base (511)..(511): a, c, t, g, unknown or other
  modified_base (614)..(620): a, c, t, g, unknown or other
tagtgataccactactctttctgacgttcttttatacgttaccccggtaacgtccacacttcatgggaaaatttcctaaatgaaatcaccccaaattaaggacagtcaaccatggtgttccctcatggtaagctatcaaaacatgatgcttcttgctaacataggtagtcccacacctacataatctcaaaattactacacaatcgtcgccttcaattcacctagtattctaaacaatactcataaattgtcccacctttgctaatgctatatcacttttaaacaaaagattttgttatttgaatcagttaaatcaatgcctccattaactagtcatgttctatattccacttgggaatatcaacaacttacctcatattgtcatccttctaatctgtctaccctgttaaatgggttaccactaaataacatacatgcacagtccattcagatttcttgatgtctctaactaaatgtacaatgtttaatatcaatagcaattataatattncccataaattctaacttgagtcgggcaaaggaccgatatccgggtcccattgaatcataactggcacttgggcaggattcgtacacttttcttctttaacatnnnnnnntcttaactgtgggcaggttcttttcagatgaccca

SEQ ID NO: 143796 - DNA, 742 bp, Cannabis sativa
tcagttgtttattttaatggggtgaacccctatttatacaaaaatataactaaaagaatgagaaactaaatcaatataataaaggaaaatacaatcatttattaatggtgataattaatttggtgatttaaacatccataaataatatttcataacactcccccttggatgtccataaaaactgtctcattaaaaaccttgctgaaaaacttggtcaaaagaaaggagtgcagtgtaaattagctcccccttattgaggcattcgtggagattttctaatcgacgaattctaatcttgtgagctattttctcaaatgttgatgttggtaacgactttgtgaataagtctgcaagattgacacttgattgaatttgttgaataccaatgtgcattttcttaaaatgtataaagaagaattcggtgaaatgtattttaattctatctccttcaatgtactctcattttagttgagtgatgcaagtagtattatcttcatagagtattgcttgtgttgatacttctttatagagtgtaatccatatatttttcgaatatgctatgccaatgatctcactcccacacattctctccttacttcataaagtacaagtatttaacatgatttaaagttgcctctttaaaaacctacttctcaggaaaacccagtgggacaaaacgtgagttaaagaaaaagagtgcaatatatatttcatgttcataactatttgcaagttgcctcgt

SEQ ID NO: 143797 - DNA, 667 bp, Cannabis sativa
  modified_base (175)..(189): a, c, t, g, unknown or other
gccatgagtcagaggtctcccagagatgtacataccaaccctggtgtctcaatttctaggggacaggatcaatctttttagttgttgagaatattttaccagcatctagatttactaacaagtatgttgaattaacttcctaaatatgaatatctaaaacaatgaaattaaacannnnnnnnnnnnnnnaaccttacattgattgcatcgaaatctaatgactcttttcgctcagatctctaacccttgttcctttttgtcgcagagtattatcaagatttgagcctgaatctctttctctacttcaagtttggttaccgccatcttactcgctatgattaagtacttgacttgctatgtgtgggtatggtactctttcattaaggatcgaattggatgaagaataatgaaggagggtttgaatcactatagaatgtgtctctcatctactagttgtctgacagagttagaaactagatttggcaggttgaaaatcaagtggatgagatgagagcattatgttccttttttattgtttcaactagggcttatgcctgaattatatggattaaaacagaataaaatattgggcaaaaatacacttcaaggccgaccataaagggaccactttctagttacaattttgccactttatttcaaccactta

SEQ ID NO: 143798 - DNA, 756 bp, Cannabis sativa
  modified_base (697)..(701): a, c, t, g, unknown or other
tgcagagcaccccatcaatatgttttaaaatgacggtagataaacaactaagaagtcttgcattaatgttgtagataatgatggctcacctattgttaatgagagttcaatgatgccataacttgcaacactatcaccggtaaataggcataagctcaccatacaaggttctaactttgcattgtgtagccccattttctttaacgtatctttgtgtaggatgtttactgagcttcgattatccaccaacactctttttaccctcttgttggcgagttgaactataatgacaagaggttcgacgtgtggatacctcacttgtttcgtatcttcctctgagaatacaattggaggttctcatgttttggctttctttagtggttatggagcaaacaccaattactcattcttgatttcattgacctatctcttgtaacaccctaactaatttaggcgtgttagcgtgatttttaacatactgtgtagctcgttcctaatcaacgagactaatgaaaaatgtgattaattaaaattttcttatttcattagaaatataaagtaatacctttatagaatcccgggatcctattacaatatacatttacaaaagtttccaattcataaacaaaagttttgtcgcatagcgactacacagcaaaaggacttgatgtcccaaagatcatacgctccaggcctnnnnnccctgacatgtacaatcttcatctgctcgtcctcacggctgttcagccttagcct

SEQ ID NO: 143799 - DNA, 711 bp, Cannabis sativa
  modified_base (295)..(296): a, c, t, g, unknown or other
aaaagggacttagtacaaaatgagatatagttctttattgctcaacgagaccccttcccattgatagcgtcgataaccactcttgagtcattctccacaataacgtacttagagccgatttccaaggcaacagacacagctaaagagcaggccgccgcttcaccataaagaacatccgagaaatcctcccgaactgtctgaactctaatcactctgccaaaatggttccttaccacaacaacaatgcacatactatccaaacccactttaacatcacaattcagcttaatccaannctgaggaggaggggaccaaacttcttttaaagctggggtaggactttggagcaaggaatcatagatatctgcataagaagtacaaatattatcaatgcatttgttaatatcaacaggacagttattatggaccttctcattgtgcaccctccaaatagtatccacaataatagaagcatataagaatatatcatcgacacaagcccctttatattttagatcccagatgaacttgacccaatcccagacatggatgcctgtatcacacaccggatagataccccaaggagaagaacgccagaaatgaagtgccacatcacaagatagaaacatgtgtccaacgttaatcataggtagggctgttcatccgatccaatccgcactaagtgcggatttcattttttggatccaatcc

SEQ ID NO: 143800 - DNA, 589 bp, Cannabis sativa
aatcatgaataaatatatgttctgaacttgatagaatttatatattaaatatataatcataaaataaactatgtgaaccatgcaacataaaataatttttgatcttttattaactagtaaatctgattatattgaaatgagttttatatagggcataatccaacataactttttgtcaccttttagttttaccttcagctttaaacttattattttttttgttttgttttctttttaaaaaaggtgatccttaatcattattgttctttgtgttcctatattgttgaaattgttcctcatgcccttttacagtgttctaaggccaaatctatctaggagggagacatgttttagagatttttattataataataaaaatgtgatgttaaagaatatatgcttgatggttttgatgctgtaagtaagataatttgtttgtttggttctaatgatacaaatgttgagttgtgaataagctcttatttgcaggataaagcaaatgaacagggtaaaagaattgagaactgcaattgtaatacccggaattaagaaaaaggattagtaaaaccctaactagataattatgtat

SEQ ID NO: 143801 - DNA, 1040 bp, Cannabis sativa
gtttaagtggtaaatctaaataataaccaagcgagtgaatattagaataatttattttttaagaatagaattaattaatttatttaagataaatgaatattttatatttattgaatcttaacgtaatcaactggttgatattgtatatatggtcaaattacgatttataaaatatttgatttcctgatttaatttcttgaattaattgtcaaaatatatgacaattaattgtggcagaaactttgatggaaggtcttacctatataaagatagggtctcggtctttgagcttagagagagcttggaagcacgattgcccacaataattagttttcttttcttttgcagatccaaaactcgtgtggaattaaagctcaaagaatcaatagcttaagatattttgattctttagttatattgtgtatatgttcatttaattccacatttcatatacacacacatatttcatatcatacatataaatgtctaacaccaagcacataagaaatgaatgaatgcaattcaagggcaaactcacattaaggctacgtggggcagttgcccccaaaaaaaatagagaaaaaaaatatatatgtattttagttagtctgaacatatatttttaattaaaagtgatatttttaaacatgaaacaagatttagcattagggttaagttatatgacatacataatggaggttatggattcaaatcccaataagagcatatttactttttagtattttaatttttttctttttttgaatctctatcaataagatttgtatttactacttcaatcattgaagtcaacctttttattgttattttttatttacttaaaccatatttaatactataaaaatacaagtttgcattaatttttaatatgttatatcatgtagaaaaaatagtatgcccctcacttacaaaaaaaagtccaccctcaacataaattcgaggtccaccactaatgcaatgcgtttcattatgattgaaagagtaggtgtacacatatttatatgaacccaaaatagaaa

SEQ ID NO: 143802 - DNA, 799 bp, Cannabis sativa
tttttaatcattttttatttgtttgtgtttttagtgggtgtggtaactgtttttgccacattgtggcagtttttttgttttttgttgtgtgtttgtgatgtgggttggctgttacattttcattggtcatatatgtttattgttagtcttttatgtgcacttattcacttgtttatctttctctatactttgtgttgtttaggtttaatatcatggataagaaagttgataatattgtgtatgttaaaaaaaagaaagagggctgaagaaataaatgtatttatttaaatttttatgttctttattttttttatttttatttttttgtatcatagttgttgtttatgttcttgtgttggttattttctgatcaatgttttcaagatattgttccttatgttaatcctgttattcaactccaggatgttcctcaagcatttagtgtgtccgaaaatataaatgatcatgtatataattagtttccttatttatttcttgttattttttggtgttaattcctgttctttttttaaaaatacttttattttaatcttgtcttttttataactgttttataaccagttttaatcttgtctttgttgttgttaaaaggttgattccgataagcgtgttaatgttccttcggtatgtggtgattctggaaccaattctgaggttccagatgatgattctaagaaagcagagttaaaaaaatctcgtgcaaagaaaaagaaggtgagtatctttcttctattttattcttatttttagtattataactggtttttttttttttttt

SEQ ID NO: 143803 - DNA, 506 bp, Cannabis sativa
atacatactttatgatataacttagaaaatatagttaaataatttattgtcatatataatgtattaaatgattatattgaaatatactatggtcgcacatagtcgcatagaccaacattaagatatattttgaaatatattatggtcgtacatagtcgcacatggtcgcacaaggttgcatagactaatattaggaaaattactatggtcgtacatagtcacacatggtcgcacaaggtcgcatagaccaatattaggaaatatattatggtcgtacatagtcacacatggtcgcacaaggtcggatagaccaatattaggaaatatgctatggtcgtacatagtcgcacatggtcgcacaaggtcgcatagaccaatattaggatatattttgaaatatactatggccacacatagtcgcacatggtcgcacagggtcgcatagaccaatattaggatatattttgaaatatattatggtcgcatatagtcgcacatggtcgcat

SEQ ID NO: 143804 - DNA, 1563 bp, Cannabis sativa
aaataccgggtaagctgtgcaatcccacaccgcctggggaaggtcaagtgggatgattcggagactgtaggtatcactattacaaaaattggcttcagtgacccattcaaagagactctaaaaggttttagtgacacttcaatgcgtgtcactaatgtagatgtcactaaaagtactttttagagtttcaaaatgcgtgtcactatatcatttttgtatttcatgtatatactgtctataaaaagctgacactatatctttatatatacttttttttatattctttttaattatgggcactactaaatattactatattaattttttttttaaaaaaattaatataataaaattaattaagtaatattttttattaatcattttgccaataattttttttaccaatactaatattttatcatatacacaatcaaattgtactaattatatcatcacatcaaacccagaaaataagaaatatacaattttaaaccacccaaataaaattaatactaattatatagcaatacaacccagttacaaaatacatttctgaaaaaaaaagttcttttgccattgaacatgagcagtcgatattgactaccagaccacaaaccaagaacggctgagattgaccagaagaccacaaacccagaacagtcgaaggcctacaacaatgacgagcttttcccgtccacctacacacatacacaaactgacaacatatttgagcttgaggaacttaaatataatgggtgtttttgccgccaccacctctcgcaggaggatacttgggctctgacgagagaaagaaatggagaggcgagagagaggaccatcgacgaggagacctgtggttgtctctgtccgggttcaagactgtggaggtagcccgtacgtcgaaccaagcaaaaacgagagagagagacgagcgagaaagagggttagggtgtgggggatttggggttctcggactggagagtaatggatccgtaatccgttaggggtgatggtcgccagagatggtggctccgacgtgcgaaacaaagagggagaaagaggtctcttccctggcggctgagaaggggctgagaagggattatgttagaagaagtttagggtttttattttaagtcagagaaatatagagagagggaaaaaagggctggaattaaaaaattaaacaaaaaataaaagctgtaattatggtggctcacgttcattattttttgttttattttttttattgaacttagcatttttttagataaccgaaccatttcattaattaacttatagtgacgcgcgaatagcgattgggtaaatatataccaacatattttgcgtgtcactatatcttaattttaattttaattattttaaataaatttagagttatgatatagtgacgcgccatgcatgtcgggacatacttttgaagtctgtcacggcgtgactcgatagatcaacatttttaattagaaaaaaattaaaaaaagtatgggtattattttttagtgactcttcatatttttagtgactcacattatgggaggctaacac

SEQ ID NO: 143805 - DNA, 540 bp, Cannabis sativa
  modified_base (176)..(178): a, c, t, g, unknown or other
aacaaaattcgtgactaaaagtaaaaaaaattacgactaattataaatcaacattcttatattgtaacgaaaagttctgtgactaaatatattagtcacaaaaattatagtttattgtgactaaatgtatttttagtcataatactcattatgattaaaattaaattagtgacaannngtatctaaatattatattttagttataagtaattttttgttgtaactaaaagtcacatttagtcgcccatagtattaagaactgtcgcctataccctatcataggcgacggttttaaaccgttagaaatgaaaaaatggtcaattttttctattttgcgacatcgtataggcgacagttatgaaaatcgacgggaatactttacctgacagtttaaagccatccaaaaaaattatttttttagtagtggcgtgaaggttgactaaaaaattataattaacgctccttaaaatatgatggggacttctatttgcacccgttagacttataaatataccccattattaaaaaaaatataaactt

SEQ ID NO: 143806 - DNA, 726 bp, Cannabis sativa
tcacactaaaccaaactccttttaatgaacgataccgatatctaatgggatttaatcctaccaaaatctggatttgtgtttcaacaaattaatttcatcaaatcaactctacgtatgtggctgaaattgaaaaatagtaaaggaaattcgtgtctcattaaatgcagaatttgaatattatcgaaaatattactgaaggagaagattattgtattgatcttcttgattgatttgatgccaaagttttcttttgtgaggggttcaagagcagtcgtctaagggtggttcggttcggctcaacgacatttttcgtttcaaatttttgttttcatttattaatttaatattattagtttaattccaattaatgtttttatggggttagaattataaatagttgattccttaattaattttaatgttgtgatcgtgcttatgtgttgaaactaatttagtttttccattagtcttgacttttgacatggttctttagtttgtctttggacatggttttttagtctttttcctttagttttttctggttcgagtcttgtcttttggcatgggttgtgtagttcagaatcatcatgatgctatggtagacacattcaagaataggaagattggatgtgttcaacccaaaattgctgagataataggcattaaagaagcattgagttggattgcaactcattcgtgggattgagtcatgttggaaatagatag

SEQ ID NO: 143807 - DNA, 617 bp, Cannabis sativa
  modified_base (50)..(54): a, c, t, g, unknown or other
atggtcgttctacgctcgatctggtttcattctggttgcgtagccgactnnnnngatggaggttccttcatcgtctccgttcgtgacgttgggctgaaggtatagggcaggtggtgtttttgtaatatattcaatgtgggctgtataaatgtttattgggccggcccacagtatttatcttttttaataaatctcatttattgaaattttataattcttgaattatttgtttattataaggaataataattgttttaatcaagcactttaattttcttttccatcataaatatttatattttattcaatcatattttagtgagtagaatacccttactaaaatatttaataaatctttatttatcttcaaataactcttattattgtattgtacggatacccactacaaaaaaatttatttttagtcacaacaaaatttaagactaaaaagataaaaaatagttgtgactaattataaattattatttttatgttgggactaaaagtttcgtggttaaaagtattagtcacataaattacaatttgttgtgactaaatgtatttttagccacaatacttgttgtgactagaactaaattagtgacaatttgtgtcta

SEQ ID NO: 143808 - DNA, 836 bp, Cannabis sativa
  modified_base (257)..(260): a, c, t, g, unknown or other
ctatcaaaacatgctcaaatcaaccaatttaaacataattaaacttcaaaaaacaaaactaaacaccagcagtaacaaaaactcaaaaacatgcatagtccatcttcttcaaaatcaagaaactaaagagggagctacaaaaggcttacatagagcttaagatcccttaatacctgctgaaaccaacttgaaaatgcagataaccacccaaccctagctggttctaggtggatttcgaagagagagagagagagagnnnnagagagagagagagagagacactttttccaaattttttcctaatttttcaaaaatgaaataatgaaagaagatggttttgttttaatttactttcagccaaagaataacaaataaatcagatttttaactttaattaaaaaccacaaaagataaaacataaatgggtaaaatgaccattttgcccttcccacacaaaaagtcataaaaaaggcaggggtaattgggaaattctataatcccgaaaaatcttgacattgccaaagtctaactttattgtcatgctatactaaaaattctaagatgtgattctaatagccatacaccgcgttctaatgttgccggacacaaaatatgcaaaattataaaatttctatatgtgacataaaaatgcattctgaatttaaataaatcattataaataattaattcagtactaataaatgattttcataattaaaccctaatatctgctaatttccaaattaagactaggcggcctttacaaaatatatatattttatttattttcttcaaaattttctaacttttattatattttttcaaaaaattaataa

SEQ ID NO: 143809 - DNA, 678 bp, Cannabis sativa
agtttaataaaatctctgaaattgagaaattataactctaatactcatttctaatagtggggtccacaaataattaaattcttaaataattatgaaaataacagaaaataatgctaatttcctttactaatccaaattactaaagtggtcattacaccttgagtcataacaaacacttttgagcaggacccgtacacttttctcctttgacgtcagtctttcttaactacgggtaggttctttttagatgacccactaccccacaataaaacaagatctggatctacattggttcaaattgtacctttttgcatcttgaacactcaggataaggtcaccatttcttattctcaccttgaccgctatcctgaccaccctagaacctttttgtcatgtcccataattggttgttcatttagttttggcttcctgatctactagtaagttggcttcataaattccaccacatctagtggtacaataggaagtgtcggtagtacaagaacagacacaagatgagcctattgttctttcagatctcaaatttattttccctttttgtttaatcatatcctacatagcagaatttacatattcccaacattatggcaataaagaattctcttccttaccattttccccgagcccagataactcgctaatcaaactatttgattg

SEQ ID NO: 143810 - DNA, 881 bp, Cannabis sativa
tcatcaagcatcttgatagcattaaagagccctcattccctttacaaaagataactaaatcatctgggaaacaaatatttgtgagtttcatttttttgcataagggatggtacctgaaatctttttctctagctgcttgttggatccttcgggaaagatactccatgacaagaacaaagagaaggggagagatgggatccccttgtcttagcccttactctcctttaaaagacccctgaatttgaccatttagcagtaaagaataagacgtatttctcacacaattcatgatccacttgacaaacttagcagggaagcaataggccaccagaagctttttaagaaagtcccaattaaccgtatcataagctttactgatatcaattttgatagtgcatctgggggagcaattcttccttcggtagttcttcaaaatgtcctaaagaataagaatattgtaagcaatggattggccttgacaaaagctccctggtcttgactcactaaagcaagaagcacattagcaagccgggaacaaattagtttagaaacaccattgtataatgtagtgcagcaggcaatgggccgataatcaatagctttagaaggaccatcaatctttgggataagagagagagtcgttctatggagctcttctgggaactgattagtgtcaaaaaaatgagttatagccctatggatatcctttcccacctcaggccaaactgacataagaaaccccgaaccaaatctatcagggccaggagatttagtatttaggatactaaacatcgcagctctgacttctttgagagagaaaggttttaagagatggacctgctgatcgagggtgagtttggagcccatggctatgcaatcag

SEQ ID NO: 143811 - DNA, 749 bp, Cannabis sativa
tgtttataaataaaataaagtttaaaaatatttattaagaataatataatttttttaagtaaaattaatatttttgtcaggtttttaaaataatttttattgttttttcaaattaatagaatattataatttttaaaattagtttttaaataaaagaggcaaaatttcatattaatcaaagtttagggagtaaaaatgctaatttttaacggtaaagataacaaaacctaacagaaggggcataattatgtaaattttatattttagggagaatttttaacaagccgtatattttaaggggcaaaactaagtagtgccgaaagttcaggaggaaaatatgctaattattcttttttaaatatatataagataaatcatcatagacaagaaggaatatcataaaaaactttaaaaaattgtatataagttttactcctatataatcaaaatcaatttcctgatgaagaaactaattttttgatgtatgatctttggtgagttttgctctgaccgatcgtcgccgaataggtaaaaagcttaaaaactcgtattgaattttatttctatataatcaaaaccagtttcctaataaagaaactaatttcttaataaaaaactagtttcttgataaatgatttttagtaagcaatttatctaaagattaaatatgagttttgaaaattaaatttatataggagaattattccatatactattttttaaacttcttttttttcaaatttacgatt

SEQ ID NO: 143812 - DNA, 803 bp, Cannabis sativa
  modified_base (426)..(441): a, c, t, g, unknown or other
ctcaactttctttctgagttcaatcaattcgtgatcattctgttggccaatcgttattctttccagtaaatcagactgtattgtaatatttgccaacttcccgactacaaactcaatctcagccttggccatatcctcagccaatcttggagagatttccttcacttcataaacctgccttgggcctttccggctaagtgcatctgccactacgtttgctttgccgggatggtagaggatttcaaagtcgtaatccttgactaactctagccatcgtcgttccctcatattcagatccttttgagtgaaaaagtatttcaaacttttgtggtcggtgtaaatctcacacttttcaccatataaatagtgacaccaaaccttcagggcaaaaaccacagctgctagttctagatcatgagtggggtnnnnnnnnnnnnnnnnttcaactgcctagatgcataggcaatgacattccttgattgcattaacacacaacctgaaccttgtcttgaggcatcacaatatgtcacaaacttttcatcactgactggcaggcttagaattggtgcagtaatcaatctcttctttgattattgaaagctattcttgcatttatcagtccacacaaacttataactctttcgggtcagctcggtcaaaggagtagcaatcttggcaaaaccttctacaaatcacctatagtagccagccaatcctaagaaacttctaacttcagttgctgccttaggtcgtggccaatctcgaagagcttcaatcttcactggatctaccagaatcccatc

SEQ ID NO: 143813 - DNA, 789 bp, Cannabis sativa
aattaattgttatcacgtttgagaataatgccattcttctatggaaggtacttgaattcaattttctgaagtaagacttttgccctttgataccataaaaaactcaagaatgaatcttaattagtataaaaaaagtacgtcgaccaagaaaaaataaactattgacctattatccctctatagctaactacatgagcactctaattaatcaaataaaccttgactactttacaaatatcactacatgagcactctagttaataaaaattttgtactactcaattgaaaacgacgttgtgtttgattgtgatgataagttgagggaaagagttacgtcgggctttaatgattgtaatgaacgtaatgaactcattattagaactacgtgttaattaatcaaggagagcttaattcagtttatgtgaacataagtggagatgattatttatttatataatctatttacgattgtggtaaaggaaatatcgttgtgatcagatcttaaaattggttttttgctcttgaattatgtgagagttctagatgaaagagtacaaagaatatgttcgcgttaatgataataataagaattatatggattcatataatatcttgctactttgactttttttttttttggctttcttcgttaaatattcaccgttttagttgttgtagatgttttagctaagatttctctctttttatcttagtttttttggccttattagtttgatttcttcaaatatcagttcaaatattaatgagatttattttattattatttta

SEQ ID NO: 143814 - DNA, 522 bp, Cannabis sativa
  modified_base (26)..(27): a, c, t, g, unknown or other
  modified_base (477)..(477): a, c, t, g, unknown or other
cttgatttttttataacaaattagannttattcttgaatagagtattcttgaatagaggttctactgtatatatatatataattgtgaagatggagtctcacctacactcaaggatgttagacgaggagaaagtggtttgagtattaattaactctctagagccagtaatcatgtaaagatctataatgttaaggggattttagctcaataatcgtttgagttatattgatcagcgataccataatacgagctgatacttgttatttgaacataaaatttggggtactaattgtcaaatctatggacaataagatcaacacagttctagatataaaatttatattgactatccttaaatttaataaggcaagttagttctaccctaaggacggtaggtgaccatccatagaagtgatcgacgttacctcggggatccctttcaagagtgttggcgactgttgggttttgtgccctanataaaacccatttcaatataatcggatttacttattaataaagat

SEQ ID NO: 143815 - DNA, 987 bp, Cannabis sativa
tcttaccatattataaatcatattaattcacataaattgaactatataataatataattcctcactactcataattatctaattaggattttgctaatctatctcttaacctagggtattacataacaattttgtttattttgtattaccttgtaccaaaataaacctactagtttattattgtatgtagaaaatgatacatcttataaaaaactctacaatatgtttacaaggtagtttacaaaaagcacaaatgcatgcattcttgaactaaaatatatgcacataatcatttagcataatgatatcttaaactataaagtaacaacctattatcttaccttataaccatttgtgcaacataatctataaatgaacctactagtttattactgtatgcatatcataataaaccttataaaatatacaatgcacgcattcttaaaatagcatatatctacataataatatagtatactaacattttattgttttataaactaccttgtaaacatatatgcatatattttatttaatcaacttattggtttattgatgcatatcgacaaataatacattaatgcatgcgagtatacatgttaatataatctaaaaaataattaaaaaaaatcattgctcatttataacttcaactaaaatatttatttttcaggtagaaacatcaaacctgcttgtatacaaaatacatgattgtaccgactcatacatagtaaacctagataacaaaacttgcaactgttagaaatttgaatatgatgaaatgccttgctcatatgcaatgtttgtataaagctcaacacacatcttcttcccagtaaactctgaaccagactcatatccattaaacttcttcctcataccatggacaaaaagctcaacacacatcttcttccgaacaacattcatattcaaagatttggggacatggttgatcatttcatgtataaagtattcagcatactttat

SEQ ID NO: 143816 - DNA, 868 bp, Cannabis sativa
  modified_base (304)..(304): a, c, t, g, unknown or other
tttttttttacatttaccaatgtgtccttcttaaaaacataataaacaaaacactcccctaactaataagaatgaaaatgctaaatgtatgagcgatatgcctaacaccttttatgtgttattattgttattagtctaattaagtgtcggattacatatagtttaatataataattttaggtagtatcgctaacttattgcaagaagacatgtttaggggtgatagacaccattggtgcttaataaagaaaagagaaatgctaaagggcacccgtagtggctagcaccctcctatgtgtcaatncgttatcggtccaactaagtatcgggtgtcatatagtttaatataataatttttagggagtatcactagccaatcacaacgcgacatgtcgagaatgtgttatgcaccaccagtacctaatagcaatgctctaaagaaaacaatatttcaaaaattaaggtgacacacgtttttaataagtttttttttttttaattagaacagttaaaatgcttttcagttttttttttattaaggtgacacacttttttaataagttttttttttaattaaaagtaatggattaactcatatatcaagaagaaaatattagtaacaaaatcaggactactcattaatataaaagaacaataatatcccaacagttatgtaatcaccaaataaatagatttaataagtcaataaaatacccaaaataatacctagcatccatcattccttattctaactagtacaccatagtccacacactaactgggataatattattttttagtctcaattaattggctttaattaatcaattagaattctaaatacgactatgtcttgtttgtaaatttt

SEQ ID NO: 143817 - DNA, 1299 bp, Cannabis sativa
atctcggtcccagctcttgagtctcgatcctattcctagtccagtttctagtcctagttctggttcacgtctttgtcctagtcctggtctaggtcccataccttatatcggtctaggtctgggtctcgggttcgagtccgagttctagtacgagtacgagtctgggtttgcggtcagattctgggtccaagtttcagtccttgtatgggtccgggtcttggtctgggtatgggtctgggtccgagttctggtataggtctgggttctggaccttgtcccaggttatgggtcctgggttacgggatctgggtcgcaggtcctggcgcaagtctgggcttgggttcgggtctcttaggttcaagtcattattcggttctgcgcctagatctagttttgggcccatgtccaattcctgttccacggtccttattccagttcttattcctatttcgggtctcggatgcgagtttgggtttgggtcctagtctagaaatgtttccaggttcggatcttggtacgattcccatatctagacccccactaggggttgggtccaagccccatgtcgtgggtcaagatctggataccaatattcggtccgattcggatcttgggtccctgtccgtgtccatgtcctggtgaaggtttgggaccgagaccggggttcgggcttgggtcactctcccagtactgggtcttgattcttgttctaatttttagtttgggaccccaatctaggtctgggtcctgggtccaagtctgagtctccaatccaggtccaggtcctaggtccaggtcttggtccaagcccatgtctgggtttgggttcgtgtcccgagtcctgattcaagttgtaatttgggtccgcatctcgtccgactctagttctgggtcctagtcagattctagttcctagactcaaacccagtcttggactcgaacccaagtctggggtccgggtgtgggttttgatcagggtctgagtccgggtctgggtttgagtccgggtatgggtcctaaatccaaagactgactacgggtcagttctaagccatgaggttatggtccttgtctagttcgactttgggtctcaggtcctggtccgggtcctaggttagggtccgaatttgaggtccggtctcggtcccaatttttatgcccgtgtcacgggtctaggttccccatccatgtctgagtcctaggtcccggtccgagttcgggatccagtcggggttcaagtcctggtccgagtctgggtttgggttccgatctcggtatgtatccagatctgggtttgat

SEQ ID NO: 143818 - DNA, 841 bp, Cannabis sativa
ttctataactcaaccaaatcaaccacagttcgaaccaaactttctagacctgttttatgcaacctagagaacataacccaagcaatataacaattacagaacctcaaaatcaaatttcaccattgatgagccaagcttgagttcaaaaaactcaaagcttgctcaaacaacaaaccagcaaacagaacaagcttaaaacatcatatctaagcttaattcatccactgaaaacaataacaaacactagcagcaactacaacaactaaaatccctaaaacatgcataatagcatagcttaaaacccaagaaatcaaaaagaagattcctaaggactataccttggcttggatcacctaagacttgctggaaagagcttaaattgctgaagaataatcccaaaccctagttggctctagggatttcgagagagagagaaggagagagttgagtttgagagagaaaatgagatttttgggtaattttctattatttgccaaataatgagataatattgatttacaccaactaattcagcttattatcaactaaaaaatatgatttaatacctcccacaaaaggacaaaatacaattaataaattgaccatttttccccttaaacactaaaacgcactaaaaagtcactaaggggtaatttgggaaattctaaaatcctgactattctcgacattcctaatgtctaactatatcgccccgctatactgaaatgctaacatgtgattcaactaaaccatacaccgcgttccaaagttgtcggacactgaacatgcaaaattatgaaatttctatatatgacatataaaatgcattcagaattcaaat

SEQ ID NO: 143819 - DNA, 655 bp, Cannabis sativa
  modified_base (54)..(54): a, c, t, g, unknown or other
  modified_base (451)..(464): a, c, t, g, unknown or other
  modified_base (612)..(619): a, c, t, g, unknown or other
tgtttgaaagctgtctgaaccgacttcactgtgggagtgatgtattgctgacantcatttgaaatcatccagtgtcattaccctctgataggatttcggcgtgtgttcccgttgggttaatgaggatgtttgaaagccatcttgaccgacgtcattgtcagaaggatgggggacacttttctaaaatcatggggcatcaaaaatatagactgggtagttacgttagtcgattgaggatgtttgaaagctttctgaaccgacttcactaacggtgtgatgtattgctaacactcatttgaaataatccgtgtcaccaccctctgatggaatttcggcgggcgttcacgttgggtgatttaggtgtttgaaagccatcttgaccggcttcattgttagaaagatgggggacagtcatctaaaatcatccagcgttacaaccatcaactgggtnnnnnnnnnnnnnnattgaggatgtttgaaaggtgtctgaaccgacttcactatcggattgatgtattgttgatactcatttgatattatccggtttaaccaccctctagtatgatttcggcgggcgttcacgttgtgtgattgaggatgttttaaagccannnnnnnngacttcattgttagaaggataggggacactcgtcta

SEQ ID NO: 143820 - DNA, 575 bp, Cannabis sativa
ttgtgttgcaattaaaagagcattagacatctatcatcgtgcctcaggacagttgcttaacgaagacaaatcggttatgtccttctctactaatactcctgaccatgttcaacactatttcagtaacattcttggtatgccaattagtgaatgtcatgaaaaatatttaggcctcccagcctactccaagcaagataaaaaacattttgcggatattaaggatagaatctggaatttattgcatgcttggaatgacaagttactttcaattggtgggaaagaagttctcttgaaagctgtcgttcaacccattcccacatatgctatgagttgctttaagctttcaaagagtttatgtaatcaacttgacacgatgatggcacagttttggtggggttcttctgctgataagaaaaaaacatattggaaacaatagaaattcctttgcaaaactaagatggaagggggtatgggttttcgttcttatgttcattttgaccaaactttactagcaaagcaagcttggcagatattccaaaacccaacctcattgctgtccagaatcttgaaggctc

SEQ ID NO: 143821 - DNA, 684 bp, Cannabis sativa
  modified_base (182)..(182): a, c, t, g, unknown or other
ttgtaataatattttgtaaatgtttttgggatcccaacttttgtaacttttagtttataaagtttaaaatattacaagtctatttccattcctagtattattaaagtttaaattatgtgctaattttattagtaatctcgtttaggggattagggtttcataagtatcttgggtagcgtgcntaattatttagggcgttacaaccatcttcctcttacaatcaatactggctgagtacttggacaagaaatctattcccagtataatatcaaaatctgctaaattcatttctattaagtcagcacttaactctctatcctctattctaatcggcatagacctaatctaccttttggagatgactaattctttgcgaggcagtagggttccaaaccctgttccgtaattatcatgtggtctatccaatttactaaaaattctggctgccacatacgaatgagtggccccagagtcaaacaacccagagaaataagagttgttgaccgagagctgacctgttaccactgaggggctggcttctgcatcagcctgagttatcgcgaacacccttgctgaagtgggtttggctgcaatctttggtgcttcagtcttgagttggggacaatcccttttgtaatgccataccacactgaaagcacccctgccctttacactccccgagat

SEQ ID NO: 143822 - DNA, 687 bp, Cannabis sativa
atttacatgttactttgctccctagtcccaccccagatctaaaggaagcttggtcccctcctcctccggattggattaagctgaattgtgatgtcaaggtgagatataatagtatgtgtattgctattgtagcaagggatcatgttggcagagtcattagagttcagacggctcgggaagatttctcggatgttctttgtggagaagctgcggcctgctgtttggcgatctccgtagccttagagattggttctaaatttgtgattgtggagaatgactcgagtgtggtaatcaatgctctcaatgggaaggtttctcgctgggctcttgaaaattacatctcattttgtactaagaattctcccttctttattagttgtaattttgtttatgttagtagatcttgtaatttcgccgctcataatgtggctagatgggcgttcgctcatcaggtatttgggtgtatcccggtttcggacttaccaaacaatacgttgtgtaacgaccgcgaggtctaactatttgaattaatgttataaacgctttttctcaaaaaaaaaaaaaaaacaaaaataaataaatatattgatcatttaaatatatacagcaaaattagatatatcgtagtactgaaaattaatataccgtagtaataaaattatatagcacaaagaaattataacaata

SEQ ID NO: 143823 - DNA, 1055 bp, Cannabis sativa
ttcttaacttccttaacatatctcttttgggcattgttactttctccagcaggatgtggccctcttgagataagcaaaattcctccccttcaatagggggaggttgtaatccttggttgctcgggttattgggcagatttggctggttttgtccattgccttgtcgtttcacatattgtcggaactaaccacacaagatgatgccttctatctcgtctttcaattgacgacattcttttgtcgtatgccgtatacccttatggaatttacaaaatttcgttgcatcctttttgtgtctcgcatgcctcatgggcttaggtttgcagaatgcgaccctatgctcatgtgcgagatagatattttctcaagtttcattaagctcggtataaatagtgtagattggcacatacttgtcgtgcttcttctattttttcttatctttggttgattccttagagtcgtctttcctctttgtactatagcctcctagattgttagcctttttcgagacggtgcttgtcgagatagtactgggtttacttcccaagctagtctttaacaatttcatctctttacttgcttctttttttcgaacaaacacctgagctcttttattgaacttgttgatgtttttcactgtatgagcctgcaaatcatcccatagttcgcctccaaccgtcgagagatcagttgtgatccctgcttgaagagtagtaagctggatgttgttgttcaagtttctaaccctcgcagcatctgtattgaaaggacttaagtaggccttaagcgtcactctcgaatgctgctttatgttattaagggaagacgcttcaagtcgcctgtctcttgctgcctggaactgtctcttgaagtctttagacagctgttcccaagaggtcatcgagtgtgggtgaatttgttgaaccagctgcttgctgcccaactagtgatgtgaggaataaaatacagcgtaagttattcgtaacattgctaactcacatgatggtattaaaattatttaggtgagcgaccagatccgtagtcccatcgtatga

SEQ ID NO: 143824 - DNA, 1725 bp, Cannabis sativa
  modified_base (1469)..(1477): a, c, t, g, unknown or other
aacatgtctcacatcagttagtgtcctcacaacaccatcaaacattttcaccttaatagttcatattccaacaactttagagctagaatcatttcccatcaaaacagtacaacaaacatatgccttataagtgtcaaagtactccttatacggggacatgtggaacgaacaaccagaattcaaaatccaagagttagaaaagtttgcactagctatgatagagagaacatcagagtcactttcaaagccttcgccaacaacattagtggaatttgatgtgtctttgcattcttgattcctcattgcttcaagatgcttggtcaactcttcacaatttcatctaacatgtccctttttgtgacaatagtagcactccatttcctttgaagagcatgaatgagcgcgattgtctcttctgtcatcatatcttcctctcgatgtactcctaccacgacttgattctaaccttgtcataagagcttgatcagtatgggacacaccacttggtttcttgatattatctgtctccaaaagagcagttgacacctcatctacagttaaagtagtctttccaaccaaaagtgtggtcactaatgtctcatatgattttggtaaagatgccaacaaaataatagcttgatcctcttcatcaattttaacctctacacttaacaattgagttatgcacttattaaatctatttatatgatccctaacatcttctccttcaactatttctaactcatataattgcttcttcaaatataatctatttgttagggattttgacatataaagtttttctaactttttccataactcagacggacatatttcatttaatacactatactttaattcaggagccaaacttaaatgaatagtgcttaccctttcgtcgcaattcctcctaatcttcatcagttatactcccaggcttctttccttgcattgcctttagcagcccttgttgtaccaacacatctttcaccgtgctcctccataaactgaaattattcttcccctcaaaaagttcgatctcaaattttgtagaaaacacaatctttgacattttcagtgtagatctaaaccttggctctgataccacttgttgggaaaaatgataaacttcaagcgcagtaaaataacaaagaaacgaagcaaagtaatttacatcttcatttagtttgcatgaaatacatctaatagatagaactgatccgattcagtatctaatggatatgagatcgattggatgactgaaattaatcagatttgatcgtaaaagttaatatccaatatataattgacacatccatatatctattctatataatgtgtggctatgtaacaaaattcttagtttaacggagtgttttggttttctacgttaactttaacagaatattccaattactcaacataatattctttataaattttgtaatattattatatatatttaaaannnnnnnnnatatagatattttatataaaaaaacattaacttaattatatatatatttaaaaataaatattacatctaaatataatcacatctatatataaatatatatatatttaaatcttaatttcacgataattttttattttaaaattaattaatgatatatatatacgcttttaataatttatacattttattaaagccacactctcttaactagaaattgttagagatattattacaatggaagaaaatca

SEQ ID NO: 143825 - DNA, 690 bp, Cannabis sativa
tagcagggaattaaccaaccagaaacctgaaactaacacgaatcgacaacctgaatttgttgggaatcccacctgcaaaaaccggttactcggttttccctcgaaaatccaaacaagttcaaagttcaaacaaaccgactccaaaccttaccaaaccttccagacctgcatattataccccaataaatattttccaagcaatagaacaactacccgatctcagaatctaaaatcaccattaaagctccaagtttgagttctaaaactcaaaaggtttgttaaatctattaacagccatcaaaacaagcttatttcaatatttctaaacataatttatcctctgaaaacaataataaacaccaccagcaactacaacaaccaaaatctcaaatcatgcaaaatttcactttcttaaaaattaacaaactaaagaggtggtcgctagaaactttaccttggcttggattacactaaaagctgctggaaaacacagcaattgatgaaaaaaattaaagaaccctagctggttctatcgggttttcgaaaagagaggaaagaaagagagagagagagagaggaagctttttatgattttttctaatttttgtaaaaatgaaataaaacttgttttattataaattaatctcagccaacacattaataaaaattagattaattaattaaaaacaa

SEQ ID NO: 143826 - DNA, 546 bp, Cannabis sativa
  modified_base (45)..(55): a, c, t, g, unknown or other
tttctttattgatatttaaaagataaagattacattgaaatggannnnnnnnnnnggcataaaacccaacagttagttgtcgggaaatatgtaactattaaaagatgacataaagagaagaagtgaaatgaatgaataatgctctctattgccttttctttatgagttacaaataatgaacttccgacccccactcacatctcaaatggaggtatttataggcactagtggacaagggtacaacatggtcaaaggttatcaacacatcgcattcgaactgtgggttgcaggtgcctggagtggccttgcacctcgtattcttgtctagtgtcaggtggtccccgattgtaggcctgcagtcctgggtggcatatgcgtggtccccaactattggagggtgatcccgagctgcaggtgtgtggtcgtgaattgcagacgcgtggttttgagctgcaggagcgtggtccacagttttaggtttgggagtctccacatgcaagccttaggtgagtcgtcatggtgtaccttgttggaaattattttacc

SEQ ID NO: 143827 - DNA, 780 bp, Cannabis sativa
aaagtatagtctttagcaatcttttttttttttttttgatttcttgggtgttaagttttggtattatgcatgttttgggctttttagttgctgtagttgctgcttgggtttgttgttgttttcagtggatgaattatgcttagatatgttgttttaagcttatggtgttggctggtttgttgtttaagcaagcttggagtttttgaactcaagcttggctcattaatggtggattttggttctgagcgtgggtggttgttttgttgctttagatatgttgtgtatggtctaaataacaggtgtggaaggttttttttaagtttggggttgaattggtgaagttatgaaacatttggtcgttcctgcagtgaaccgaaattccggttcagagggccctgcaggaaccagaattcgggttggcttccaggaattcccccagaactggaatttcggttggggaactggtctactagttggggcaattttaggaaccctagtttttcccattttgtgttgtttagggtattgtcatgttatttatcgatagggaaacttttagtttcaagtttatgtccccgggaagtgatttagcgtgtcactcacctatgttatgattgatgtaatttaggagcgtgtaattcgccgagcagctgttccactcaggttggccggcacacctgaattcgaaatcaaggtaagattagtatagtgtcaggcatatgcttatacatgtttagcgtacatgttagttgtgttaactcaaacttttagatctccttg

SEQ ID NO: 143828 - DNA, 753 bp, Cannabis sativa
aaataatttccaacaattatttggttgatgagatttattaaataatctagtttattggaggttaaaattattggttcatggtccccagatcgctaccttaaaatattttcaagggttgggataaaagttgcatatgcaaatttagaaaaatctattttgaattttcaaaatagtaattatttattttgtaataaatatttttatttcaaattaattaaataggaaaagacaaaagttgtcaggaaaaaggtacattccttatcttagccaagatagaggaggtgccacttacactatgttcagacacagtgtaggcaccactattatagggtgtccctattgctttcgtctttttggattaattaattcaatagataaatatttaaatttaaaaagtaattgagatattctctcaagttgttgagagatttcctcaatctgttataagatataaatatctataaataaattcggttatattatttattcaaacaattaaataagaattatttaaataattaattaaataaaacttttattgggtttatttaatataccgcttaaactaaattacatatagtttttgaatctatagaatttgtacgtaaattttcagaaagcctaaaaatgattaatcagtaaaatttttttttctctccatcactaaagaaataattcttgctcatgtgttgagatttaatcaagaacttcatatacactattattctacttccccacactagtccttttgta

SEQ ID NO: 143829 - DNA, 596 bp, Cannabis sativa
  modified_base (432)..(444): a, c, t, g, unknown or other
atgaatcatgtgaaccatgcaacataaaatgtaatttctgatctttattaataagtaaatctgattattgaaaatgggttttatttagggcacaaaacccaacagtaagagattgcaattttttctatgtgcatgcccaattgttcacaattgattctcaagaagaaattatcgcatttacttttctcgtttttttttctttcttcttctgttttttttttttcaatagaggaacaacacataacaactttattattttttccaatctctcactgcaaaatttattcccccacttacaacaatttatccccccaaacttgcttaaaggcttatggcataataaagtatgtttagggtgaaagtagttaaggataacgaattcagcttacttaagaggagaaaattttttagaataggctaaggctcaacttnnnnnnnnnnnnnataaaacgttttcggtaggcttgaaaggctcaatcgatccaaagaaaacttgtctaaatcattttccaaacaaaaagcggtaaggattttgcttcaagagagtatgtcaaacaaattctattccatgtcaagtcaatcattccacaatccaa

SEQ ID NO: 143830 - DNA, 920 bp, Cannabis sativa
  modified_base (51)..(51): a, c, t, g, unknown or other
tctgaggctaactgaggagaaatcattaccatattgaaagtctgatcaggncctttccgactcaaggcatctgccacaacatttgccttcccaagatgatgcaggatctcgcaatcatagtctttcaccaactctaaccaccgcctttgtctcatgttcagatttctctgagtgaaaaagtactagagacttttgtggctagtatagatctcacaccgttcaccatataagtagtgtcgccaaatctttgaggcaaacaccactgcttcaagttccaggtcatgagttggatagtgctgctcataatctttcaattgtcatgaagcataagctatgactttctccgcttgcattagcacacaatccaaaccctgtctagatgcaccacaatacaccacaaatttctcttgatcagatggcaaggctaaaattggagttgtaatcagcctttgtttcaactcttggaaactcttctcatatttatctgaccatacgaatcgttgattctttctagtcaactcagataatggcatttcaatcttagaaaatccttccacacaacgccgatagtaacccgctaaactgaggaaacttcaaacttcaatagttgttttgagtctaggccagctcttcactgcttcaatctttcctaggtccaccataattccatctttcccaacaatatgtcccagaaaagatacctgtgacagcctaaactcacactttttgaacttcacatagagtttatgatctctaagtcgttgcaaaaccatatgaggatgctgctcatgttcaatttccgactgacagtatatgagaatgtcgtcaataaatacaattacaaaattatcgagaaaatccttgaaaaccttattcatgagatccataaaggttgtcgaagcatttgtcaatccgaatga

SEQ ID NO: 143831 - DNA, 570 bp, Cannabis sativa
  modified_base (26)..(26): a, c, t, g, unknown or other
  modified_base (52)..(52): a, c, t, g, unknown or other
  modified_base (78)..(78): a, c, t, g, unknown or other
  modified_base (104)..(104): a, c, t, g, unknown or other
  modified_base (131)..(131): a, c, t, g, unknown or other
  modified_base (159)..(159): a, c, t, g, unknown or other
  modified_base (187)..(187): a, c, t, g, unknown or other
  modified_base (515)..(519): a, c, t, g, unknown or other
tctaaccaacgcctctgtctcatatngcctctgtctcatattcaaatatttntgtctcatattcaaatatttctgagntattcaaatatttctgagtaaagaanttcaaatatttctgagtaaagaaatancaaatatttctgagtaaagaaatatttnatatttctgagtaaagaaatatttgagnctcttatggtcagtataaatttcacatttctctctgtagagataatgtcatcgaattttcaaagcaaacactactgtagtgtaacaccctaactagtataggcatgttagcgtgatttttaacgttctgtgcagctcgttgctaatcaacgagattattagaaaaaagtgaataattaaaattttgcttttaaataaacataacatattatacttataaaattctgggatcccgtttacaaaataaaattacaaaagtttgttattcatttacaaaagatttttcacccagtgactaaacaacagaagccctgatgtcccgaggatcnnnnnctccaggcctaacctccccgacatgtagaatcttcacctgctcgctctcac

SEQ ID NO: 143832 - DNA, 930 bp, Cannabis sativa
ataatataaaaataagaaatttttctaattaaatagaaaaattaatcataaaaactcaaatttttttaatattacccatttagaggtaataccaattaagagtgcactcatatatatatatatatatatatatatttacatgtataatagtatacatttacgtgtcgaaggatctgtcaaaaagaaaaaagtgtccaaggatcttctcattagtttacgatgatttttggaattttgacataaaatgtcatttttttctgtttttaaacatttatacggttccatagtttcatttttcaattttaccattttgtttaaacttttatacggtttctttaaaactttttacatcgtatacgattttgattacatcatccaactgcctacacgtttccctccaaactttcaattttcaatcacctctcttgtcagctacactactctaacccactccctcgttaatatcaatgtattttgaatttcccattcttcatcattttcattttgctcttcttcttcattctgttcatcgagttcctccttttttttctctgttttgttttctgattattgtttatgcgttttttctttgtttttgagtaatggctgttacttgatctcgttcgagttctttgtccccttctcctaagaaacccaaaaaaaaaagactattaaacaatctaaacccaaattagttgctcaaactacttcaaaacctcttaatcagaaatccaaagttgtggttcatgtgggtgatgatgctagaaaagctaaaaggaagagaaacgataatgaggatgattttgttgttgttcgtcctagaaaggtatgtttgatttatttttatttttttgtatttttttttttgatctgttcttgtcatgtttttgttcattgtttatgactggtatttttttttgtttttttttt

SEQ ID NO: 143833 - DNA, 1363 bp, Cannabis sativa
agatcgaagaaaattattttagtactgaacgtgtaattaaaattttgttataatataaagtatttttcagctgttcttttaaattttcttaataatcttagctttttctatgtaattttgttcaaatgagtaatttattgataatgtaattggttaatttatttttttagttctatacattgtaatacataaggggagcagggacgaccctaaaaatttataggcctaaggcaaattggattttatagcccttcaaaatatatataattttcttttttaaaaaaaaagtgttatagaattcaaactcatggtattgtataatctgacatacaccttaaccaactacgctatgaatatttattgtttacaatacagttaattttacttaaataaaagcctaataattttttttatttttttatattgggcccctgaaatatgtgggccctaggcccgcctatgcctagggtcggccctgtatatatatcaagtagatatgagaaaatcttatttatttgatcatgtacgtagaacgcaaagtatgaagttttcatcaccatatgatccttgttataattttaacaatgtacaaaaaccaacagaagaaatgaaaaaatgaacactaaaagaactaaggggaacaataaataaaatgctaataagtctctttaagggtaaaaaaagagtaagaggaaataacattttgagaagcctggtccaaatctagaggcggtggatgagtctacgagtgacgattatccctcgaatcatttttctaatgatcctatttatgatgtagcattatatgaagcaaaagattaccctaattttgaatttactcttaaaaaaatgtcattctcagttggtgatctagacaaccaagatggtgatctagataacctagattgaagaaattcattttggtactgaacgtgtaattaaaattttgttataatttatagtatttttcagctgttcttttaaattttcttaatagtcttagctttttttttttatgtaaattttttcaaattagtaatttattgataatttaattagttaatttatattttttagttctataattgtaataaagggagtagggctgaccctgaaaaatttatgagcctaaggcaaatttgattttgggacccttcaaaatatatataaatattttttttaaaaaaagaatgttataggattcgaattcatgacattgcataatgtgtcatacaccttaaccaactaagctatgaatatttattgtttataatacacttaattttacttcaataaaagtctaatattttttttattttttattttgggcccccgaaaggtgtgggccctaggcacgggccta

SEQ ID NO: 143834 - DNA, 665 bp, Cannabis sativa
tgctaatataattcaatttttatgttagtttcttctttagaaccaaaatcagtgaaagaagccttgatggatgaagattggttcctagcaatgcaggatgagctacatcaggttgttcgaaagaaggcaagggtggttgcccaaggatacactcaggttgagggtattgactctgatgaaacttttgctccagtagcgagattggaatttatcaggctacttctctccatagcatgcatttttggttttaaactgtatcaaatggatgttaaatttgcattcttgaatggctttttgaaggaagaagtgtatgttgaacaacccaaagggtttgaggatcctcattttcctgatcatgtttatagattagacaaaactttgtatgatttgaaacaagcaccacgtgcttggtatgagcatctaactgagttcttgctctctcatcattgcaggagggaaaatgttgaataaaacacttttcatcaaaaatattaatactgatcttattgttgctcaaatatatgttgatgatattgtgtttggtttatcttctaactttgatgtgtaggtttttgtttctcaaatgcaacaagactttgaaatgagcatggtaggtgaactcacctattttctaggtctcaaagtgaaacaatctgatgagggta

SEQ ID NO: 143835 - DNA, 576 bp, Cannabis sativa
catattaaaattcattcaaatctaaccacttttataagttttataccaaatatacccttactttacatatcctaacagattgtccctatcctaacctaaacccatgcacacaagctccgcctcctgtgccatcacctgcgtccttccgcctcctccaccggcgaaatcaacactacacctatgcaatcacaatcgcaccccctaacctccaacctccttcgatatttgaatgtaagtattgcttgggacttttttattaaaatccaattatgaaatcaatgtctaattatgcttgtctacaagagcaggtattcgatgaaagttcaggtatattatagactcaccttgataaactttaagctttttatcatcttttggtttaaattaatgcatatttaatttatatgtatcgttaatttgtttttattttaatagtcactgtactccataagaagaaagcttctatattttgctaagaatttttttatatcatatcggaatgtaattatcgcaagaggaggagcggaggtgatcatcatatttggactctggaaaagtaattgatttttttttttt

SEQ ID NO: 143836 - DNA, 1005 bp, Cannabis sativa
atgaatatataccttcagaattatcataaggactagttttccttatcttgttgggccgagagtctgaatcttctttagaatcatcaatatcaacattatgatcctgaaaatgattattaggaataaaaggataatcaaataccataacattaaactcagagtttatttaaagaataatagcattaattaattgtgttgtgcaaatttattccaaccctttttgtattaattcatacctttccatcactagttttggcctcctctgttgatccacatggaagtttagaaaatacttgatttgataaggactcacaatatttcatccaaaatgcctttgaaatttgctgcacaagacaacaccactaaagttaagctaccagaaaacatataattacacattacattactgtaacctatataaatacatgtattgcatacatatattctaatcatcatacaaatcaaagaagcacctttttcaagttgcagagattacgattagggatatacaaaggaatcgaaaattgaacatatcacaagagacttactttaacatgccatcctctaattttggcacattgacaatatttccaaagtaaacaaattagacaaacttagggtaaaattacaaaatcacaaaatcagggctatctataaatatatgaatacataataaatttggacgaatctaaccacaaaatcaaggctatcaagctgtaatatctggtgtgcatagataataaaataaatcatcgaaaaataatgaattgaagttgatgcagagagagagtagtaacaatgtatgcttaccaacttggtgttgggaggagtttgttcaataataatactgaaaatatgatgagcaggaaactgtgtctcaatctgggcaacatgactataagaatcagaagaagccattgttgaacaattatttcgtttaattttgctgtgaaacaaatgattcaaacactattaagtaaacaaaaaagagggaaatatataagg

SEQ ID NO: 143837 - DNA, 599 bp, Cannabis sativa
aaaccctttgattcgaatcaaaatcccccattttccctcattttccttaacttccttattccctctctttcagagactccaacggagactttcatagtttgcctagattttcgcctttctttgtgaaattttctcaatctcaagtgttgtcgggagcaatcgcaggaacaaatcatcagaactaaaggttagttttcaaagttcactgcatttttgttttctgtttgggagaaaatgctattttttgggttttaacatctatgagggggtttaggaatatatgtttgtaagaaatacgtatgaggctatgctttttaggtaagaaactgggtaatttcaaggaaaatgacttaaaatgtgcataaccgtggactttagaaataatgtttgaatagacgccactttatattttgaatacacgcgggtattcggatgaacatctcgaatactcgcatgtctgctcttcttaggcttcacagagacttgatcacttctggctgttacttagaactttaggattttgtactctgtaaattttgttgtgggaacattggttaagtctttcaaatggtgggtgtatcacagtattctaatgttca

SEQ ID NO: 143838 - DNA, 945 bp, Cannabis sativa
  modified_base (435)..(435): a, c, t, g, unknown or other
  modified_base (873)..(876): a, c, t, g, unknown or other
ttttcaaattaaactaagcggtctttacacataccatcctcgaacttccatcaagagtcaagctttagctgacatcctgatagaaggtataactttagaagaaatcccatctgatcagcgagatgcgaaaacctggaagttatatgtggatggcgcatccaacgaacgaggttcaggagtaggggtgatattattattgttggaaggctttaagtttcactatgctctaagattccaatttgacgcatcaaatatcgaggctgagtatgaagccttgattgccagcttaaaaatagcagaggccttgaaagtgaaaaatctcatttgtcatagtgatacgcagctgatggtgaaccaggtcctgggagaaatacctggccaaaggcttgaaaatggcgtcgtatttagagaaagttcggaagaacttagaaagantcgattactttaaaatcgaacaaattctaagagaacaaaactccaacaccgatgtcttagcaaaactgccctcgcagaatgatttggatgtactaaatctggtttcggtagaaatgctaagcgagcaaagtatatgtgaaactgaagacgtcgagatgataaatagctctccaatgtggatgacgcctattatccactatttactcggcgggcaacttctgaatgacaaaaacgaggcacgaaaaacttttgtatatagtacctcgctacacaatgattgaaggcaaactatatagaagagggtattcaatgcccttacttcgctgtgctcctcccgcagaagcaaatgaaatcattaaataaattcatgaaggcttctatggggatcatgcgagtttgaaaagtctatctagaaagatcattagacaaggatattannnnccaacgatcaataaggacacacatgagtttgtcaagaaatgtgataaatgtcagagattttcacatata

SEQ ID NO: 143839 - DNA, 629 bp, Cannabis sativa
aaaaaaaaaagatttttacaccactgcaattttcaatttttttttactgggggacagaatttttttaaaaaatattgtatattttttatattttgtactgtattaagttttcactgttgttcaacagttgcttattaattgtttcactattgttttaattgttctattttactgttttacggttgttttataaaaagataatatttttgtaaaaaattatttgtaacagtaaaattataaatttttatctaaaatctaatatttttgtaagtaccctgaaaaatggaattttttttatataatatttaataattttatgtggtttttttttttttattacatttctatgagatttttttctcatttgttaagtttttataccatatgtatagtttttttaacttcaagaaactagtttttttttttaggggtaagttgaaaaatgcctcttttattaatcaattaaccaaatttacttctaaattttttctaattaaaacatacctcattttatatgcattgtactcaaaatgccctgacataaaggagtcacatggagagtatcttaaagtgacaagggcaaaattagtacaatatttaaaaagagaggtaaaagtaatagactttaa

SEQ ID NO: 143840 - DNA, 834 bp, Cannabis sativa
ttggagatactcttagaccttgcattgaagatagtctaacatgatttaatttttatatcacaataagcatcacttttttatttactattttgccactcattaatgcaacttttttatattttatttatatatttaataaatatcaaatttagcccgcattttgtcattgatcattaataatacaatatacattttttaattataatatttttattttctatttttttaaatatttaatttatgaataatcattgatgttattttactttttgtcttataatttacgagtatctccaatagagtgttataaatgtggtgcatatgtattttttagcccatgcttataaaattaaaatctaatagtggtttataagactatctctaatagatgatgtatattttttattaaatttgacctaaaacataccataaaattatgtttaatccaatttttgtatttgggctctaataaacaaggtgcaaattagctatataaaagtcaatattaccattaatgttcattaaaaatatacaaagtaattacttttatttatgttattttaacatcttataaatatatcttattgaaagtcaatgaatagtattaataagtgacaaaaagataattaaaaatatagtatttattgtggattaaaatttggcccatgcaatcttttgagctaaatgtgacattatttttagcttggaccaaatttgacacacattttacatcactattaaagttaaattttagcaaaaaattcaaaaaaaaaaaaaaaaatggcatatacctctaatcattttgccagtggcaaaggcaaagggaatcaccaa

SEQ ID NO: 143841 - DNA, 530 bp, Cannabis sativa
tagttctttattagcgagccattgagtcgagcaaatttgtaaactccaactccaactactgattcaactacatatggaccctcccagtctaggttgaacactcttgcggatgcatcccttgtgtttgcaaacactcgccttagcaccaagtctccaacattgaatagtcttttttggactctcttattgaagtatcttgtaactcattgttgatacgatgcgttggtgatttgtgactcagttcgtttttcatcaagcagatccaaggaaaatttaaaagttcttggttttcttcttgattataaaaatctcgtctgtgagtcgatatgttctcttcaacaggcggcattgctttcaagccaaatgctagcgagaaaagagtgtgtcctgttgttgatttctcagtagttttgtgagcctagagtacttgaggaaactcgtcgacccacctgcctttggcatcgtctaacttcttcttgatagtatcctttaaggttttattaacaacttccacttgtccattcgcttga

SEQ ID NO: 143842 - DNA, 815 bp, Cannabis sativa
  modified_base (461)..(461): a, c, t, g, unknown or other
  modified_base (532)..(538): a, c, t, g, unknown or other
ctgaaatttatgaggaaatctctctactttaaaatatctttaaccacttttcaaattcaaatatctatctaattaaattaattaactcaaaaagacaaaactgaaagggacaccctacactaagggtgggcgtctaccttgtttattatcctcatctcaacaaatattgtccttcttcctatttaattaatttaaaaaattatttatttattccaaaaataaataattactattttaccaattcacaaaatagatttttttgaacaagattatacaactctttatcccttcccttgacagtgtttcaaggtggcgatttggagaccatgagcctataattctaaactccaataaactagattatttattaagtctcttcaaccaaataatcttgtttattgatttcatgattactttactataaatatggaattaatataaatatggaattgaactcttantaattatagaattatatttactacattttactgcaatatccattgatataatcaatttaagtgattagccnnnnnnntgttggttcgtaattagttttggtaaaagtactatcttacccttctaattacttctttatcctttagtaccattaattctataatttagatcctatctaaatttgtgcacaatttttcagttttataattaacacttaaagggaaccaatatttgatttgttaggaaagttaagattttatacaatcatgttcccagtcatccacattattagattcctaaaatagaagttgtaagaatcatattctctaataaactttgacgagtgaatcaaagaa

SEQ ID NO: 143843 - DNA, 1135 bp, Cannabis sativa
  modified_base (1096)..(1102): a, c, t, g, unknown or other
acgtcccacctatttgggggtgtccaaataggcggcccgtgacacccgacaacattggaacgcggtgtatggctcagtagaatcacatcttgatattttatatagcgtggcggtattgttagacattgggaatgtcaagattagccgagaatttagagttttcccaaaataccctaagtgatttgtatgactctttagtataggtaagggcattatggtctttttgcctattcagttttgtctttagtgggggtttaatatttagttttaaatctgatttataaagcttagtttggctgaagtaatgtaattaattaaggaaaatcattcatttactgattttatgaaatattagaaagttagaaaaaatcactttttcactctcaagtctctctctctttcggcccccccttagagcagctagggttgggtgattttctgtggatttcaagctgttttctcaaggatttagtgatctcaagttcttggtaagcttattgtagctttttgttaatttctttagttgtaaggaaaagaaagttttgcatgaattgttgttttgcttgctgtacttgttgctgttgttggtttatattttaagtagctatattatgttgctttatggtgatttgagcaggttttattagctagttagttggatgagcaagctttgactttttgaactcaagcttgactcatcaatggaaaattttgattttgtgtttgggtggttgttttgttggcttgaatatgttctataggttgtatagaacaggtttggaaagtttggattgaattgtggttgttttggttgagttatgaaattttaagtaattcccgtactgaaccggaattctggttcagagaggactgtaggatacggaattccggttggcttccaggaatttttcccaaaatcggaattttgattgggtaaccggtctaccggttggggcagttttgggaaccctagtttttcccatttttgtgatatttagggtatttccatttcatcgataggaaaacttttagtttcaagtttaagtcctccggaagtgatttagcgtggttcttatcagtgttgtgattgatgtgnnnnnnnagcctgtaattcgccgagcagattgttccactc

SEQ ID NO: 143844 - DNA, 750 bp, Cannabis sativa
tataaattttaattgctaaaaaaatcttgttaaatatttatttaattacttaaagtatagttaattataattaattaattctaaaaataaaatttttacatattcgtaacctgttattataggtcataaaaaaatataaccatatagtcacaataaaaatgtaaccattaaatagtcaccccattagattaaacttagtgttgcactaacactaaatatagtgttgttgctctatttttctctcaatatacgtgacaccttttgagtgtgacatgtggctgacatagacacgtcacccagagatgagttgtagatttaacaaaatcaccttaagaaacaatgagtatgattcaaagggctagctcccggacatgagcaaaaatgcccatcttcccctccgggagttaaagcacggatattgacttctctaggccagtaaggctggagttgaacactcactttgcattaaatgtgacatggggaaaacgtctgggaacgcccataagggcgtgttagacgtcataaaccagatttagggcgattacccgataatcaaggaagctagtgacggcttcattatatgaagaatcacatcaatcaagaagggatgaagtctaatctcacttaacacctaagcagtctactacataggtaatgcatgctctattttgtactttctggaaacttgtgcatgcccatagttggcaattaaagacaagttactctttttcttcttcccaccaatcgcta

SEQ ID NO: 143845 - DNA, 883 bp, Cannabis sativa
  modified_base (46)..(48): a, c, t, g, unknown or other
attttctatcttctaaacactaagctagaaaatattgagaggcttnnntattcccaaaagcatttccattctattccctaagtgttttttatccggggaaataagctttttggacaaaggtgtttaaaccttgttcaagcctttggtgatcccccttttcttacttgagttcttcttcatcttctttttcatattagtgttctgcctcttcttctctttattatatcactactacaatattcactattcacgtcagtcaacgcgactgttcatcgcgttgaccgacgtgaatagtaccatattcaatatattcgtcatttgtaaaatatcacaaaaaatagataaattgcatcggttatataccctcactaattacccaaccgacggtaaaagtcaaaaaaataaaaaaattcgttcattattagcgtcgttttaaaagcctcatgaatgctttgtgtggcgttttaaaaccaacggtaaagattttgtgagtgtgagaaaacgatgcaaatcctcctattgttcacttacccccaaatatgacgaacaggtctcccaactttttccctctcttttattttcattttcgaacagctagcgcctctctttccctctctttctctgaaggtctgaaggtctcccaacagggatgcgatttccctctcgtcctcagctctgaaggtctcgtccacctctgtaaatctctctctttccctctctttccctctctttctctcttgcattctctcttgtgctataatagttggtatatatgctttatttttatcatgaatggataatttctcattaacagttggtatgttaattttttcgaaatgggggttttcgattcgaatgttagaaatttagattgagagattta

SEQ ID NO: 143846 - DNA, 554 bp, Cannabis sativa
gattacagctcttaatacgagaagcaaaactcccaaaagaatcttttccccactgaagtaactcacgggcacattcttcaattttttcatcaatgtcgtggccatgcattctttcccagcaattacaaataatttcctcacacccttgatgcgtcgtccactaattctcaaacttaaaccggtactcatgtgtagaagccgaacccacttgaagttccaagagtaacggagaatgatctgaaggagatatctctagattagtgagttttgccaaaggaaaaaaacttaaccaatcattattcaccaaagctctatcaagtctagcttcaatccaattaggagagtctctactcttttcccaagtaaaaggatgcccatgcatttccatatctctcaaaccacacaatcggatggcctcttgaaatccttcgataagccacatcggataaggttgaccgccaattttttcagattgattaaggacattattgaaatctcccatgagacaccaaggcaaagttgaccgagtaaggagagttgttaaaagctcccat

SEQ ID NO: 143847 - DNA, 1024 bp, Cannabis sativa
aattttccacttattcagtgtccaggttaacgtcatatgtcaacctgggcactggctgtcaacttgggcgctgggtcatgtactgccttcagttagttattgatgtcaatcacaattctaatgttatcgttctcaaatttcaccctcaagggagttataaaaataagctttgggttacccggagcgagtctcgccagactccaaaacatgactatcaccttcagaagttgtttttcaccattagatcattatctacggttagaaatattcaatttatattttttttattattttcttcttatttttgtgggcctccttcacctataaaagaagagctcccttaaatcatttttcacattcagaaaactacccacaaggtcagagcatctctctgtagtttctttttttttttagaaaccagagcttaaacacttacccttttatagtaattaccatctcgtgagaaataaatgtagacgtaactccattaccatcgttacatgggaaatgaactactatagattgtctctctaaattttttacttagatttattattcatcttgccaatctaacgaactggtgttggtcactttttagcttcaacaactgttcacagtgttgtaaatttccttctgtcaagtttatcacacatgacaaacaaaatgatgatatggctgcttagccagtttctacgtcagtgtcatgtcaataccatgtgtgtatttagtttgaaaaaaaaaataattttttgtaatttagttttacggacttttcttaatcattagttaaattttagtttaatggtgttttaaaaatacctaatttttttaatgttaaatttatacatgtagtgctcatgtagtaattgactaagcagtcatatcatcattttatttgccatgtgtaataaaacttgacaaaatgactaatttataatattgtaaatagttcaggaactatttatatcaggctgaaaagttaagaggcacaataatacatatatcatagttcaataagtaaaaa

SEQ ID NO: 143848 - DNA, 1249 bp, Cannabis sativa
  modified_base (246)..(246): a, c, t, g, unknown or other
  modified_base (1044)..(1050): a, c, t, g, unknown or other
aaaagcttgcatctaggattgatggtatggtgagggacttctggtggggctgtgaacaaggtaatagaggcatctatcttaaagcctgggaccagttgtgccttcctaagtcccgtggggggcttggatttagaaagactgtggagatgaaccaggcattgctcgccaagtggggttgggctctgctgactgaggaagagtcgctgtgctgtaatgttctcagatctaagtaccttaagggtaaanagttttttgactgtgaggttaagagctccgattcttggttttggaaaaatgtggtgcgatcaaaagagattttaagaaaaggggcgtgcaagctaatatccgatgggcgagagacaagtatttgggacgacccttgggttatccacggtacggatttttaccctaagtctaattatcgtcaacaacggggcttggagaaagtgtcggatttactgctacctgacgggaattgggacacacccaagctccacaacctttttgaccaggaaactgttagtaacatcttaagaggcggtattccgagtggtcagggaagggatagatgggtctggacaaaagaatcaaatggtctgttttcaaccaagtctgcatatcttattcaagcccttgatcgggctcctatgtgcaacattgctccggcactatggaacaaactttggaactcaaagattttggagcggcataaggtccattggtggagtatcctttccaatgcgctacccttacgagcccctcttgctaagagaatgggttttgaggaggtttcctgccctatttgtggagaggctgaggagaccacagagcacttgttcctgtattgcaactttgccttccacctttggcgatcctctccttggggggttatgcctgtgctcgattcaggagcccgaatgtgggactgggttacttttctatggaatcttaaatcaagaggagttgatactgataagctgttcctctacgcctcaattgtggtagatacgatttggagggcccgcaacgacaaggtacataatnnnnnnntgggtaacattaaacactatattgactctattttgtcttgttacacagactatggctcctgccttctttcccctccagagtttgttgagactcaggcttggtctccgcctccggaagattggattaaaatcaactgcgatgtcaaagtcggaggtgagactatgtgtgcagtggcgattgcgagagaccataatgaatc

SEQ ID NO: 143849 - DNA, 606 bp, Cannabis sativa
  modified_base (58)..(60): a, c, t, g, unknown or other
  modified_base (103)..(117): a, c, t, g, unknown or other
ttactaaaattagacaaaagttattaaatctaacaatctcaatagttcagggggaatnnntaacggccaaaaaaatttagagggcatgatttggtacatgtcnnnnnnnnnnnnnnnaaattactaattagcctattaattactagtgataatattaatatgtacaactctaatgtttcagatgtttcgtgataattttttttatattatataatactttatatcaaattgagcaatttataatatatatgacattgttatatatacatactctatatataattttttttaattaaactttagagttgtagtaatcctatagagtccagttatatatataagatgaaatattaaatttttatattcgtatttcgagtaattaatgaatgggtttagtcgtatgtattggaaaaaataataaacttcaagcaaaaaagaaaattaatcggtttgataaaattaccaaacccagatagacaaatatatttcacttataactcaaatttacaccgtcactatcttaatcactcaacccaaatctcaatacaccatttgtttcttccttactctcacatgttgggtcccgttcttataccttgttgggtc

SEQ ID NO: 143850 - DNA, 892 bp, Cannabis sativa
agtatcactcttaaagtgatttctctcaatgtgagacatttttttgtaattattcactatgttgagttttattcttggacatactcaattgtgtactactgactactcaatcaattaaaatccatatgattcattcattttcgagctaagtttttcttgtctaattcaattaagttctgattttgattttgtgattggtttttagtgttgtttgtgcattcttgaatattgttactgttgtaacaacctattttgagggtgagcattcaccataaatggtatcagaactcagggtttagagttcaagaatcatatacaaccaatcaagattcatcttcaacatttcaagaatcaaactcgaactttcaagaaccagattcaagcaattaagaacctggtttgaatggctacaataaggtttgaggttgacaagttcactggctccaatgatttcagcctatggagaatcaaaatgaagacttttctagttcaccaagggatatatgaagcacttgatgctgaagtcatcgaattgattaaagacattaagaggaaacttgaaattgaagccaaggcacatagtgccatcctcctcagtcttagggataaggttttaagggaagtttcaaatgaagataaggcattgggtctctgaaataagttggcttcaatctacataaagaaatctcttacaaccaagttgtacacacttcgaatggatgagtcaaaggaattaagaaagcatctagatgattatgacataatcattcttgagctaaataatcttggggtaaaatttgacgatgaagaccaggctataatcctattgagttcacttcccaagatgtatgagcactttgttgatacaatcttgtatggcaaaaaaactctg

SEQ ID NO: 143851 - DNA, 567 bp, Cannabis sativa
aatgtaattggattagatcggtttttaattggattttcaaattgacatctaataatcgatctaatacaattagaatccaacttttagcatttaatccaatccaattgtaattggatatccaattttttgtaattagattggattaaattagatattaaattgagttatatatcatattattatataatattatattaaatttaatttatactaaaatattatatattcataaaaaataatatcacatataattttacataacaatattttataaaatataatttaatataatatcatacaaatacaataaggtacagtacaacttatcaagcctcaagaccattagagtacctctccttgatgttcagtaaattgagttgacaatcacaagaatcaaattcagctctttaactagagtggcgtttggtaacacttttttaatcagttttctgtttttaaaaatagaaaagtgaaaaaaaaatttcaaaaatttgttctataaaactgtttttacttttcaatttttataattagaaatcaaaattttaaaaacaaaaaaaattactt

SEQ ID NO: 143852 - DNA, 549 bp, Cannabis sativa
tggcccagacccatctcggaatattttttgccactagtcacaatgaattctcactactaagtcatgaatataaagattggattcgcattaaattattttaaaatatccccctcattaaaaaaattgaatatatccttctttttaaagtttttctttactcttgcactcgttagttaaatctcaccctacacatctcaaaaaatcataaaatttcacaagctcaaagccaagaccatagtgcatcacttttctgttagttatattaagagaaaaagtaaatttcatgcagtaattgccattctaattgaaatagttaaaattttacatttctaatagtggtacccgtttctgaaatgtggcccgaacccatctcgaaatatttttccccactagtcacaatgaattcgtactactaacacgtgaatatgaagattggtttaaagataaatttggttgaaatgactcctatttcaaaaattgaaatattcttttgtttaggataaatttcaacaagttttttccttcctcttacattcgttagttatctgt

SEQ ID NO: 143853 - DNA, 508 bp, Cannabis sativa
  modified_base (48)..(53): a, c, t, g, unknown or other
ggataattaatagcgtatctatgttgtggaacatatagagcgttctannnnnntgagagtgcaattccaagttatatgagtggatgcaatgccgaattaataacttagtggattcactttgtaaattctagatcagcttattggatggtaccaattataaattgggcatttatatagtattaaatgagggattttgaggagttttggaatgttagaaagactcacaaacgttcacaaacgtgtgcaagtatatgctgaaaaaaaatagtaactagttacttgttactattttttcagttttggcccattcttctccaaagtgttccaaatcattcccacttgattttgaaccatttatacaccttataaatgaataaatgaagtctccaacaaccatattttaaatagctatcattcattcacattcataaacaattagtaacatcttttactaatttaagagtgaaaaagagatgagagttacatattcaagtgatcatcaatttaa

SEQ ID NO: 143854 - DNA, 634 bp, Cannabis sativa
  modified_base (310)..(311): a, c, t, g, unknown or other
ttaaataaaatttataaatgacaaggcacatatggcaaaatgacctttttgccctcacacaataaaatgacataaaagagtactaagggatattttgggaaaacgataaattcccgacttatcccgacattcccaatgtctaaataaaccgtcccactatactgaaataataaattgtgattttactgagccatacaccgcgttccttgttgccgggcaccgaaaatacaaaattatgaagtttcactatatgacataaaaatacattcagaattcaaatataaatgcataaataattatttaaatatcnntaaataattttcataattaattctcaattaattgttaattttcaaattaaactaagcggtatttacactcaaattgatcatttgtgatgaatcttaaccatgaagaatattaaaattttgactatgaaaactttaagtattttgaaaatatttacattcttgagatgtttgatattgttggagaactcttttttacataattattttttttacttattttgaatatggtcgcgtataatacaataggatcattatagaactttaataagattttttttaaaagaaaatgtagtgttgaattaattgatttaataaatattata

SEQ ID NO: 143855 - DNA, 904 bp, Cannabis sativa
gtagaaaaagcccccataaaattaaataaatctagtaagaatgattataatataggtataaatatttttgaatgttaaataagttcccacagagtaaaaattctgggtccgtcactgtctatgtggacataccacgtggcaaaaattaaagtagagtaactatcttacttaatctctctatctcaaaatgatacttttattgtgtttcaatttataattgcaaaatttaatattaattaatatttttattacaaatataaacaataataactttattatttattttagtaattttatgctatagctaaatataatattaaaataatcaaaatagcaaaaatataaacagaaataatacatattacttatgataatacaaattttgcatcaagaaaatgatataccaaatttgcattaatttatagaagtatatatataaattttcttctaaattttattttagttttacatcatcacatctcgattagagatgctctaaaaggagtagagattagccactagaaaatatctcacaaaataactaaaaaatctcaccttaaagttaattagttaagtggccaaacatgaaaaagactcaacattacccaaaccattataacaaatgtagtatttttaaaaattacgctaaaatagtgtgtcctgaaaataacactgaaactggactaatgtgagtgcataagggcccatctaagatccatcatccattttgctgaaactccctaattggagttttgcatttgcaaacataagagcatgtttggtattgttttttgttttttgtttcaaaaaactgtttttaaaaatgagaacaaaaaataatttttgaagtttttaaaacacaagtcacgtttggttattgtttttaaaaacaatattgaccaaa

SEQ ID NO: 143856 - DNA, 599 bp, Cannabis sativa
tgacttcatcctcaaagggaaaaagtctcaaagaacatcctccttccgtttcatcattgaattctaaactagaagaggtgactaaggatgttgatcaagaatcagagggtgagtctgattccaatgaagaatttgttcctaaagaacaaccatctgctgatgattctgggtctgaaagtgaagtgcttgaaggttatcctatcagtgcaaaacaagttactgtccctgctaagaagacaaaggaaaaagacccatggttactccaagacctattttgtctcagaaaaggaaaatgccctatggtaatactcttgaaaacttcaagccccattctcattatttttgttacaatgataatgctagagatatgaaattttatgagaataaaaattttactgtacggaaaatttcaatgtcattgctcataagccttctaggttatataatttgttgaaagaaaaacaatgggtggagacattgatcgttttgatggctatgtggatcgaattgtcaaggagttttatgctaatatcattgatgagttcctcgatgaggactcttttatgtttggaaaagtctttgtcaggggacacatgtat

SEQ ID NO: 143857 - DNA, 836 bp, Cannabis sativa
  modified_base (303)..(315): a, c, t, g, unknown or other
acatgtaatcataaatcacttcaatattctaaattgataactaattcgattgtaatgggttttatttagggcacaaaactcaacagatctaacacattccatactcctatgaacaaattgattgggcaggttgtaggcacatagtaggtcttcaaggaagttccaactaattgtatcataagccttgcttatgtctatgttgatgacattgttgggattattttaccaggatctagatttactacaattaattagcatcttaaatatgaatatctcttatacgatgaaattaaacacataagnnnnnnnnnnnnnttacattgattgcagcggaataattatgactccttccacttagaaatctaacccttgttcatttctatcgcagagtattattaaaatctgagcctggatctctttctcttttttaggtttgattaccaccgtctttcgcactatgattgagtacttgacttgttatgtgtgggtatcgcactctattactatgggttgattatgaagaacaatgaaggagtgttcaaaaactgtatagaaggtgtctctcatttactagtcatctgaaaaagttagaaactagatttggcaggctgaaaatactggatgagatgaaagcatcatgttccttttgtagtgtttcaactagcgcttaagtttgaattatatagattaaaaaagaataatatattgagcaaaaatcaacatagtggccaactactaaagtgccttttactagttacaattttgccactttattttaactatttatttttcttttaataataccatatttccaatttcaatcttataaatatcaa

SEQ ID NO: 143858 - DNA, 512 bp, Cannabis sativa
acatggcaaggacttaccttaatcctcctaggttgaacttgaatgaaagaaacctactaaaaaccacagaaaattgaagaaaaactcttggttttgctcagctcctaggttgctcgaagggaaggagagggagaagcaagtatatgtgatttttttttatcctcattcactatatctatttaatataaccccaatcagcctagaaaccattaaaacaaaataaataaaacttgagataataccattttaccctcaaccaaaatctcttaagcttaaatcataacctaagggcattttggtcattttctaactattccacaaaactgacaacttaaaattttaaactagtccggtatatttccaatttaattcatctcttattgtcgtgacatttctgacatccccgtcaaatttcacacaattgtcagacccaaaaaatattttattcaaattatggtatctacgatacccacatattccaatacaatctccgtaattaataaattaccctt

SEQ ID NO: 143859 - DNA, 1639 bp, Cannabis sativa
ccatcttaggagtaggggcaggtcttttcgagacagctatcaaaaacaaagcaaaattataatcagctaaaccagaataaaagacatggactaatttaactaagtcttgtgtaaatgattacttacgtattatgcggaaagtgattgtgccgatgggggagagaccggtcgtccagaagaattcatctttaaagagagttttatttggaaaatccacaatgatcttacgatcatctgtgtgagtcccaagatagtaaaaacaccctgctacattcttcctcgatggaacagccttgacagagtagagatactctatttccaagggagtggggcactctcaattcaagattttgtaaaaattcctcaaacttgcgaggattttgtatgaaatgggattcatttgaaatagggcaagcccgaggtggtttaggaagtccttgaaatagtctcacaaggggattattgctccagccctgatgtgttcaaggctccaagcgcctatcccggtcgagccacttgtactagtctcgccactgggcccctcagatgtttcgcgagtaagttgcattggtggataacaactgaactcactagcaactaccgatctaacccagcagtcttgcctatattcaataccacaagtcctcagagtattacccacgtagtctccgatggctcgcacctttgactctattagctcatcctcgtaggtgacgttagagtcctagggagtctttggtttacgtggcttggaagacataatttcaaagtccaagtcacctggttcaaaagcaatcgtgaccttgggtaaaaataaaggcttagccaaagcaatagaagacaagttgggaggttcaggccaagcagcgtctcgcaagaaacggcacttgccttctgtaatttcttgcaagaagtgtctgtggcgactaacaatatcttcttggtggattttcactaggtgttccctaattttcgcatcatttatctctaatttggatttaggtgctgaaattctgggtttgtatgggagggcaagtttagtagaaccctctatttctaaatattctggatgataaacttctgaaccagattgggacattgctgcaaggagaaagcaatcccaaatcctggaagaaatttatcaaaccagaagttggtaaattggagaatctcaaaaagctacgttctacctaaaccctaacatttacccaaatacaattcaaccctaaaattgctaaaaccaaacgaggtaacaaaggtgctaactaagaaatcagtagtcaaacctagaaacacaacattaaaagcatgtaagaaaataaggagaaaaatcacttactgtttggagttggtttttgggacgatgagcggttctgcaatctacgaaacaacgaacggtcagaagatccctctgaatgcttgaagtcaaaaattagatcggatgaaacttgcaggaaaaatgttaatgacaaagatggcatgcaaggtttcaggcaaatgtgggtatgattttttctacataaaagcttgaaaattttttagagtttctgaaatggcaaaggtagtgcaaaggtggttccttttttcattttatactcttgggttaatctccgttagatcagggagacaattgatccaa

SEQ ID NO: 143860 - DNA, 703 bp, Cannabis sativa
attttgcacttttcattctaaccgggtccgcatataactggtttatttattttttcgttgataaattgaatatgatagtgtcaacaaagtagtggtgttcctgcaaaattttccttctacttgtaaaatgcactaactaaaaaagaaaacaaaaagaacattaagagctaataatagagagaaagaaatctatttctcacaaatactaaaagatgagaagctaccgaatgtccaagaagaataagttctttaatggttaatacttctatattatttgttcaagttatccaaaaattaggtcctccttagtaatcacacgcagaacgagagaagaaataataatactacaataagactggtgaaacagaggggatgcattatcttatacaagtgtaccgacgataaggaagcaacaagatttccatttaatccataataaagacccttgaaaattattctccctccaacatgagcaacctaaaaatgaattaatatgcacacatattataatcacaattatcaaagaatatgtagcacaaacaggtcgagaaatgtgttaaaatagtcaacccttcaatgtagctagtgagtagagacaatcattgaaaaattgtaataatatatataagaatattttttattttaggaaataaatttttatttaagaaaataaaataaataattaattttctgataaatgaat

SEQ ID NO: 143861 - DNA, 586 bp, Cannabis sativa
aactgtgtagtcccatacctacacagactcagaatcatcccaattgaccttccgcaggcagtgtgggattgtatagtttacccaatatttccccttacggatcatgggactactaactatcacaatcaccccccttagggggtctgatgccctcgtcgaccacacttatggctgtgtcaacgctctgataccatttgtaacgaccccacttcaagcctccattgggcccttacacccacggaatgatgactctcatacacgagtatgtcactctggctacttcatggactgatgacttaccctacaaactaacacgaatgtttctagtgtgctttgtcctcactcgcgtgcttcctggaaaaacttcccaggaggtcacccatcttgaaattacccaggtcaagcacctttaactgtgaagttcttccgtgatgggctaccgaaaaataagatgcaccctgtttatataggtatactactacaaaaattgcatgagaggtcggttaaaaaccgacctacaatcgttcataagtcggttgggaaccgacatcccatgcagtgacttgtcatgtaaaacatgagaagt

SEQ ID NO: 143862 - DNA, 511 bp, Cannabis sativa
tatataaaggtacacttaaatattagtgattattaagttgagttgggcatgtgatttgaccaagaagatcaaggtcatccaatccaacgttagtcaacttttaattaggaaaaggaaagaggagagaaatgagatctatattagggtgaagtagtagtactactggatttatagctgtaatggttgaattctatttttttattataattatatttgcgtggacatttatttaaaatttattacattaatttatttatttatgccaaataataaaagtcaattaattaaggttctatttggtacaacttttaaaaaaattaaaagctagctactctttaaaaaaaattgtgataaaaatatatttgataatcaattaaaaaaaaaaacaacttattaaagaactagtaaatatctcgcgtttcgtgacaaatgtataaaatattttaattaataataattacttagtaaaattatattaaaattttaactttactattaaaaaatttgtgac

SEQ ID NO: 143863 - DNA, 608 bp, Cannabis sativa
  modified_base (104)..(112): a, c, t, g, unknown or other
aagctagacaactttcctttcaagtttgaatacaccaaataggaaaccatattaatgtataccagccgaaaatatacaatgaataataaaatatttttgtcaannnnnnnnnccaaaaatggaattaacaagatagatctcaaaatacgaagtaattgatttatgcataaataggctccatcttattgtataccgcaaacttgatgtattttactttctgatcaaatcttgctcaaacttcaagtgcttgaactctcttcgacctccttgaagagtgcttgaactctcttcgacctccttgaagagtgcttgcttcctcccaaggcaagacttgaaaagctatcacctgaaagcttgaagaaccttctcccgaaggtagcactgttgtccttcttcttttgtagacttgattataaactcatgacaatacaaaatacataaacataggaaaagagacgaacacactcttatctacaaaataaagtcactctttcttacaagatatgaataaaatacaaagttgtgaaagatcgagatacaaaacctagctactataaggtgtatttataattaatatacacctgttaggttataattaacctatattt

SEQ ID NO: 143864 - DNA, 801 bp, Cannabis sativa
aaggggaagaagccacttgggagttggagtccaacataagaactcaatatccagagctattcaggttagatttcgaggaccaaatccttttaacagggaaataattgtaaagaccacttaattttaatatgatggattagcaaataattagggtttaattatgaattagattattaaccatgatttatgtatttatgaagatttatttgagttatggatgcgttattcatgatatatatgaaatttcttattttttgtatttgtgcctgataatagtggaacgtgacgttgggccgatagtgagtcacgttttcttatggtttagtattttagtagtagtggggcaacctagtaggcattagaaatgttggtaataatcggggtttaagaaataaccaaattacccctaggtggcatgtgtgtgtatatcggtatgaatgcatgttaattatattgtttacactaccaacactataatagttgtaatactgagtgtgttggtatagtgtatgatgtttaagggtatgttacggtgttactaacacgagtacaagtgggtacagagtgcatgtggtacaacactcagtagcacccagaattacaatttgaccctaccaacactagtacggaggtggtacttcagtgtatgtggtacagaggttgtactttcgttaagaacgttcttgaccatttggtgagtcttgtaattaggcacatgagggcctaggtaaaagcgagtattgcatggtatatatattttatgcatatcttagtaagtctgttgactcatcagtttgctac

SEQ ID NO: 143865 - DNA, 651 bp, Cannabis sativa
atttcaaactaatcaaatatatcacgaaaaaatatgtacttaaatatgataatacaaaaaaatatgggcttaaacacaacgcgatacaatgtaaattagcacaacaagtccaaaaacgtgtcatataaacacaaatagattaactcgaaagcacaccacattaaaaagtctaataatttaataataataacaatgataaatatttatttatcaattaaaataataatagtgtttaaattctaataattacaactacttttttatatgatagtgtataactattgttgaaaaaagatgtaaaaataattaaaactataaaacacatgttttttagtaattaactcaccaaatttaataaaaatacaaaaatataaagcatgaatttgagaaaaaataggttggtctatttaaaaaataaatcagcccaaataaatattagaagatgttctcattataagagagaataggaggattacaattaaaatactcaaaatataagtaaaagtattacatcaagatcacaagaaagctaaagaagaataagaataacacacaatatgcttgatcaaggctcaatgatttttgtcttaaaagtcatttcctccctcatatggacacttaaggaaattctagaaatgctcttaaggattt

SEQ ID NO: 143866 - DNA, 659 bp, Cannabis sativa
gcccaaacagtacgctgcttgtgcatccttgaactccgtctaccaggttcaggacatcagcaacgccatggctggggtaagtatttgtgatttatttctttcctcaatattttgtctaaggcttttattctcattcttatctcattttccaaattactgcagagaccagccgcctttccaagaccatagttaatcatggtttcgtcttgtccgaattcgggggcatagacgaggtcgtgaggatcctgcgggacctgtctgctgagaggcgggcgatccaagaggaggctgagcgaagggaggcccttgctaaggcgaagcttgaggaagaggcaaagcagagggaagcccaggcggaggcgatgctccgagaggaggtcgtacggagggataagctggaggcgaggcaccgggaggcgttgagggcggagggcgaagccgttgccagggccaagcgggagcttcgggaggctaaggaggccatggatgaaatggttgccaaggtgaggtccctagaggagttgcaccaggcggattttcagaccaaggccaacttggccgtggagttgaaggagctaaaggacttcagagaccaggccttgaagaaggctaaaagagatgagctcctgtctcccgtctcccgtctcctgtagccgctg

SEQ ID NO: 143867 - DNA, 761 bp, Cannabis sativa
taattattggtattttaaataaagtgcacacacgtggcatccctgttggacagggcgttacataatggcaagcagttcgacatccaatccttcacttacttttgtgcgaacctaggtatcatcaaaagtttatccgcagtggaacatcctcaagcgaatggtcaagttgaagcagtcaacaagaccttgaaggatacagtaaagaaaaactcaaagatgccaaaggaaattggccggaagaacttcctaaagttttgtggtcatatcggacaactgagaaaatggcaatcggacagactccatttgctactggatatggatatgaagttatgctccctgtagaactcgagccaccatcccacaaaagactgatgtacaaccaagataccaatcacgtactcctggccgaatcacttgatgaaatcgaagaaaagcgaaccacagcaaacttaaagttgatggcccatcaacaaaaagtagctctatattttaacaaacaagtgaagactcagaaattcttcgtgggagatatggtcctaagaagggtatttttaaacaccaaagacagtacggcacgtgtactcggacctaaataggagggaccatataaagtggtcgaagttctcgaatccagagcatacaaattaggtaaaaattatgaaaaatgcaactcgttctagtaccacgatattggaatggggaacatttaagaaaatactaccaataaagtaccaggtcagacgaccacactaagtactaaa

SEQ ID NO: 143868 - DNA, 532 bp, Cannabis sativa
  modified_base (355)..(356): a, c, t, g, unknown or other
ctaattaatataattttatttaatgaaactaaatggttaaatactattaattatacaattcataattgtcataattaatcaaaacaataatttcacaaattactattttgcctttaaaaatttatttcctataaaaatttattctcacttgaaatctatttatcaaataaaaataaaacctttcccctgtatggacatggacctgacctatatttcaaagctccaataaatccaaaattaatatcaatctaatttagtttattaattccattattacttcactataaatatagaattgcactctttgacaatatagaattatatttacataattcttacttgtagtccattgatnnaatcaatataagtagttcgtcctctaattattagttcataattagagttggttaaaatactgttttacccttataattatctctagattccttatgtactattaattcaatgtgaacagttaatttataacttattatagatttggatccaactgttagcactcctagaattaaca

SEQ ID NO: 143869 - DNA, 1038 bp, Cannabis sativa
cattgaagcaaatcctgagaaaattaaggctttgatagatatgccatcaccaaacaaaccaaaggaagttcagaccttaacaggaagaatggtggaacttaacagattcatttcaaagtcaactgataagtgtctgccatttttcaatttattgcgaggcaacaagaaattcgaatggacaaaagagtgcgaggaggcttttaagagcataaaaaggtatttgtcggcacctacggttttggcaaaaccaataactagagagacactaatcctctgcttggttgtctcggaaaatgcaattagtgcagcaatagtgcgagaagagggaaagaaccagcaacttgtttactatgttagtaagaggttacgggggccagaatcaaggtatccccctcttaaaaaacttgacttatgcctaatccacgcatctcgcaagccacgaccttacttctaggcacatccaattaaggtgttaactgatcaacccatgagacaagttttatcaaaaccagatgcttctggaagattgataaaatggtcaattaaactggggcaatttgacataacatatcacccacgaacatccatcaatggcttggcagatttcttgatagaaggaataactctagaggaaaatccacttgttcagtgagatgcggatacttggagattattcgtggatggtgcatccaacgagtagggctcgggtgcaggggtgatattaatttcaccagaaggccttaagtttcattatgccttgagattttaattctacgcgtctaacaacaaggctgaatatgaagccttgatcgctggtttgaggatagctaacgcgttaaaagtcaaaaatctcatatgtcatactgattcataacttatagtaaatcaggttctcagggaatacgaggctaagggcttgaaaatggccaagtatttagagaaagattgaaagaagttggaaaagttcgattatttcaaaattgagcaaatcccaagagaacaaaactctaacaacgatgccttagcaaaactggcctc

SEQ ID NO: 143870 - DNA, 575 bp, Cannabis sativa
  modified_base (540)..(540): a, c, t, g, unknown or other
tttttaaatttgataattatagatcaaaatcgtagaaaaagcccccataaaattaaataaatctagtcataatgattataatataaatataaatatttttgaatgaaataagtctcataaaataaaaattctgagtccgtaaccttattaatattattactctaattcattaatttttatcactaaaataataagagaaataaaaaatgagaaagtatatttttcactctaaaatctaatatcttttttcaatgccaaatggtgttatttgtagtgaaagtttatattttacaatgacattttcgtgtacattttagaaggaaatattattaaaaatgctgagaatagtagtagcatatgcatcacttctaggggagagtggagagaaatgagaggacatgtgttggttgggggaatggctcgtttgaatggtgtcagcaagtgagagatatatggttctagtcttctagacgtgggccactacctcaatatataaggaaacttacaaaaatattggaatttaggttaatttttacaaanatactgtcacacggaaaagttttcaaaaatactgt

SEQ ID NO: 143871 - DNA, 615 bp, Cannabis sativa
cgggcaatgatagtgacatattcaccttgtggttaacgagtggtaagggtactttatgtaccattgtgattacaatgttttgtaaaagtttaagcatgttaatttaagtgtaatcgataaatgttataataattatcgttttattcacttttcttgttgagtctctgtgactcacgggtgctacatggtgcaggtaaagggaaggccaaagttgagcagccatgagtttgaaagtcgtaacaacaatgtacatatcagccgcggtgttacgacccagtgattagggtcttccatcctgattgtatttttaaatataagcttacgttgtaaaagcacggtgaaactggttgtaaatattttgaaaatgggggtccccgtaaagattagtaattatctttaataaaagttttgtgtttatttaaattaaaaagttttaattaacctcattttttagtataattatacttatgagcatgagcaagtgtaaattttattttataagagtaagagcacacacgtggcgtccctgttgaacagataattaacagattaacaaataattaacaggtgatattgaattgaatagatattacggtaacttttaatatatctaat

SEQ ID NO: 143872 - DNA, 1654 bp, Cannabis sativa
  modified_base (1195)..(1196): a, c, t, g, unknown or other
  modified_base (1603)..(1605): a, c, t, g, unknown or other
gtactaaatttcagctttgtacccatggctcgctggagactttgccaaaactttgatgtgaacttcggatctctatatgatatgatggatttcggagccccatgtaacctcaatatttctttaacatacaaatctgtatattgatccactataaaggttattttcactggtaagaaatgtgttgacttggtaaatcgattcacaacaacccatgtggaatcgaacatccacgtggttctaggtaaccaaaccacaaaatccatggtgacatcctcccatttccattcaagaagagttaaaggctgcaacaatcttgcatgtctctggtgttcagccttaatttgttgacaagtcaagcaccgagatacatattataccacgccttcttcatcccacaccaccaataaaagggttttaagtcttgatacattttggtagtgccaggatgcaatatataaggagtggtatgagcttcctcgagaatcttattttttagttccgcattattcagaatgcaaactcgagtttcatataatagaatcccattacctggcattgtgaagtctttagcttgaccaactaaaatgtagtgccctaacatttaggcacgctacccaagatgattaagaaaccctaatcccctaaatgagattactaataaaataagcgtggaaattaaactttaaacgaaaaaggaataaaaataaacttgtaataattgtaaccttacaaacaaaagttacatattttgggatcccgaaaattgttttacaaaatattacaattcttttcgcttagccgacctaagcggcaaaatagagttacaaaagtttcaacactggtagatctcaacccgcttggtctagtgtggcccgaacatgtacattcattgcccagctcccacactcatggctgattagaaacagatttaccctttcctgcacagtagagcatccgtgagccaagcccagcaagacagtaaaatatatcgataatcataattaacacatcacataaatattaatgccatttcatttttgtctgtatgacacagactcgcgtgttacgctcacacgcctatttatgtctatgtggcatagacctacgtgtttcgctcacacgtctatttacattaaggccttagaacggttcatctcagttctagttaccaagtccaacccgattatgccttgannacataaccctttacttcaatatacattgatatacatcatggcataaaaattacatattaacaatttacttgggtaataaccctaagccaataaactgctcactttagagtaataactctaatcccggttcctagtttctcatatatatcacattccatataagcgtcattgcgcatatctctacgtgctaactactatcttacctgatgtcccgcaaatatgaagattccaaaccccccggtgttcctaaccaagtgccggtaatcctagtcacaaacacggaatacacaagtataggattaacccctaaattcatttccacaaattataaaattggcatttaaattctagatattcatgtagagctcaaaaagagctttccaacgatataaagaatatcccaaacnnngtcccgagtcaaaagttatgaccacaataaaaatctgaaaaaaaaaaaa

SEQ ID NO: 143873 - DNA, 1169 bp, Cannabis sativa
tttactgattttgaaaaataccacattttttctaacataagggcccaaattttttttccctatggccctgtttgtttcagggtcggccctgggttgagatgtgtcatacctggttacttttgcaatcaacaatttggataattatcacaaagtcaagaatctctctaaacctcaagctgaacaaatctcaactcaaatctctatttctcggttaatggatggtatcccgtggaaaccaactgatctccatggccttaagcttaatgttgatgttgtcgttgacacagtcatgaaggttttgggagttggtgcaattgtttggaatcatgaaggtcaagtgattgctattttttctaaaccagtccaagaatgttttagattggacgaaatggaaactaaggccctctttcatggcctcaacttggttgcccagttaaattttccaatcactcaagttgaaactgatgcactacgagtctcatcagccttgaacactacatctcatgacttatcttgtttctcatatttgagtatagatgtttattgtcttttatcctatttctatagtattgttatttctattttcttgtacttcatgttaatcatgtttctgttggattatttacgcttgattttatatatttttgtttcttgtttttttttgtcattattttaaggttattttaccgttgtttacccatatcaatttatgacgttcttcaacatccttgttctgctcaatttttaaacattgacagtatcatttaataaaaaaccaatcacaatttatcaaatcattcatatctcaattccatgtagtacccaagtagtttaaaaatcctacaaagtacgtaaagatcattggcatcccttttaatagtaatagaaaaatataatgaaacttgtatgcaaattcttttctttagtattctatgctcaaatgtatttttagttttcccaccattgttccactgctattcgtatattgttcttgttctctttatttttgatgtcttgtactgcatgttctcttgttgtgccccagctccccatatttattgcacttgttatgttgtttctttttctagccagctttcatcctctttttttatgatcttctagattttaccctttcaatgggaggcaacactattacgtcttttcacatt

SEQ ID NO: 143874 - DNA, 891 bp, Cannabis sativa
ataactccctaaccaaaccttttttacggaagagggtgtaatatcctctttctcgaaagggtaattttgtaattttttctatattcgttaatttgcatattaagaagttttattaaacatatgagattttagtgacaataaaaaagtaactttctttagttagaatattttttttacaatgtacgaaatgtcgggtaaataatgaattacttgtggtaatttaattatttattttgtgcatattattattgtgagtatacaataataattatgtgaatttagcttatattatggtgtaatatatttgttatattattattattattagaaatataatatagtatataaatttgtgataatattattattgttattagttatatccatacgtaacttaaggaaacaaaatgatcgataattgtggaactaagaatcgctccacaatgaattgttacaatattttgtatgattggaagcctcagagaacgaattctaaggggagaaatcgtgcaaaaaaagtgagagagagagagagagagagaccaatagtgttcacgtgaaacctagagaaagaaagagacattttgattctaaaatacttagagagtttctgggtttatttgatcactttgaatagcttatgtacgatctaaggaagccaatagtcatgaccaaacgggctaagagcagaggtttcaaaatccaccattttcatgtacattcaagcatgttcttgagcaatatcaaatttaaacgtgtttgaaccaatttaaagaacattgtgtttaagcttataggaccccaaggatctgttttgacgtggagaattgaagctttaaggccctgaacgaaaattgccattattgaactctatttttaatggtacaccgg

SEQ ID NO: 143875 - DNA, 552 bp, Cannabis sativa
atgttaaaaattggtcaaaatagtcattttgtgtaaaaattccatatatatatttgaacaatattggaccaaataatttatataatataatttaccattttgcagggaattataagggaagcaatggagtgtcctcatcatcaaagtattatttcatgcattgttcattgagcttaataaaaatgttgaagaaggtaaaattcttcgtgctagaattgttcctaactgtatatgtatacaaatttagtgaaaatgtgctttttaattttttttattcaattgtatctatgctcatggtgtgtgatcataatgtgttagaaactagtagctgcagaaaataaaaggaacgaagttaccgaaatagaatctgggttgagtcgcggactatgttgctctctttaagacgttcgcggcactgcctagattagtgcaagcagactatcagcgtcgtcgtccccaggataaaacagcccagtcgaacacactgtatcggaactctattgcacgatagagaaccgtcgaaattaaacacccaaaactgactactgctcg

SEQ ID NO: 143876 - DNA, 644 bp, Cannabis sativa
aatacaaatttggattcaaaaataaccttagccggccttagagatcttgcttgagacctggccagtcctaggagttaatcatgggagttggctagttctatgatttcaccctataaaactacctggtttatacctagctttggtgaccttggccagttcttggctgagtcatgggaccctagctgatccttttaaggcttgggaaccctggccgacttgggccttgattcgaagcgggttgtcagctttgtgtcctcttttgacttcgataaaaatcttattatggacttgtatgcatatacatccttagtctcatacgtggtgttataccaaaaattcggctaccatctcagtgggggacacatgttaggataaaaggaatatggatcaatgctatcgctttttatgcaataactcattaattacgtaagtatcatagtatatttgtaacctgctaattgtaaggtcttatgcgaggaatcaatatacaaactgttgcttagtataatagtgatgcaaatatcgaggcatcaagtacattacatctaggaagacaaaagcgaaacatgtcaactacgaaagcccttagtgtataatgtacaaactaagtgaaacagtccggttggctcgagacctagtaagcg

SEQ ID NO: 143877 - DNA, 1165 bp, Cannabis sativa
  modified_base (614)..(622): a, c, t, g, unknown or other
  modified_base (731)..(737): a, c, t, g, unknown or other
atgcctaagttagttaagggtgttaacgttgttcaacctttctatagtctatacacactcttcacttagtttggactctagtatggattaacttattttgttcatttttaacaatagtgatcctagactttttagaacaacttggagactaacccatggactgtcagaaatagggtaaatgatccctacatcaaatattttaattgcctcatctcttactacatctttcatgttttgatttaatcttctttggctttctcgggaggtcttagcatttcttctaaatgagttttatgcactcacatagttgggctaattcccttaatgtctcctatggtccaacctaagacctctttatgcttgctaaggatatctaacaactttactttttgtttttcatctaaatcagatgcaatgataacaggataggtgttagactctcctagaaatgcatatttcaaagtgtcaggcaaagatttgagatctaactttgatggctcaaaagttgactcaacatgctctaatggaatttccatttttaagtatccattagaggggtagactcgagcaaagaattaacatcttgaataaaatcatcaacatttaagcacatnnnnnnnnnttttgcataagtttcaaaagattcattcatgtccatctcaaaaatattttttgtgttaatcatgttcacttcatgtatttcctcacactcaatagatttagcaacattnnnnnnnttcaattcaacagtcatgtttccaaaagataattttaatacaccattttgacagttgataattacattagttatagctaaaaatggtctacctaaaatgatgggtatttgattatgagcatttttaataggttgagtatcaagaataatgaaatcaacaggaaaatagaatttagcactttagttaaaatatcttctgtaatacctctaggaactttcacagaacgatcaactaattgaattgttatagaaattggttttaattctcctagaccaagtttgtaataccttaagattaaggaatcgtattaacaaaccctaactagttatttgtgtattaatatggaattatattattatataatttaatatatatatatgaattatattgataaatgacatgttaagaccctattggtgagcctgggc

SEQ ID NO: 143878 - DNA, 608 bp, Cannabis sativa
acagggagagaagactgttcaggttgaacaaggagagaacactgttcaggtggaacagggagagaacactgttcaggtagaacagggagaaaacactgttcatgtggaataaggaaacctgagggaaaatcaggcagaggagttggaagactaccagttgactagagacaaagttaaaagagcacctagacagaatccaaagtatagcttcaacatttggaatgaagacattgcctatgcattgttaagtgctttgtaaggacaaaagaacaaaccaaaaagttgtggagaagctatgaagtgcaagaatgctaagaagtggaactgtgctatggatgaagagacagactctttcagaaaagagaagacttgggtttgtgttccaaaacccaagagaaagagtgttgtgaaacatatgtggccctttagaaagaaagaaagatgccataagacaaaagagttagaggatatgagtcagatcctcaactctaatgagattggttcaaagatgtgttgcatgttaactaccataccagatacaacatatactatagttgttgttagcaagtatatggtgttgaatgggaagatacattggttgattataa

SEQ ID NO: 143879 - DNA, 1207 bp, Cannabis sativa
  modified_base (226)..(249): a, c, t, g, unknown or other
  modified_base (1020)..(1031): a, c, t, g, unknown or other
ttgatgactttttgattattggtaacaatatcaagaaaatgattgacattaaggaatgactcaacactcaatttaaaataaaaaatttgggtgaaactggttatcttcctggtattcaaatcattagaaatcgaaagaacagatcacttgctctctcgcaagtagcttacattgataaggtactagacgattctcaatgactaacaccagaggggcagttatgccnnnnnnnnnnnnnnnnnnnnnnnntaaggaacagtgtcccactgattcccaagagatagaagacatgagaaaggttccttatgcttcagcagttggaagtctaatgtatgctatgttgtgcactagaccagacatttgctatgcactaggaattgtgagaaggtatcagacaaatgcaggagaggaacattggattgcaattaagcatattctaaaatatttgtaaaatacaaggcattatgtgttagtctacaagggtggtgctttaaatctcgtaggctataccgactcagattttcaggctaggcttgtcttgatgactggaagaagtctacatctgggatggtatttactcttgagggtgaagtaattttttggagaagtaccaaccaaaccgtaacatcaaactctatcatggaagttgaatacatagcttttgcttaggctgctaaagaactggtttggctaagaaagttcttcacataacttggtgttgttcctagaatggaaaaaccattggttttactttgtgacaacactagtgctatagccaatagtaaagagcctcgaagacacaagagaagcaaaacattgagaggaagtaccacatcatcggagaatatatggcaagaagggatttactggtagagaaagttgatactgaagacaacttagcttatccgttcaccaaaattttgactttaactgcatttgaatagcacaaactgaatctaagattaatttaaatgtactgattgttttatgttagtgcaagttggagtttgttgggttttnnnnnnnnnnnnaaactctatttcaatataatctttcatattcatttatcaataaagaaacagatttatttcataactaattcatgtgttatttggcttatatgatcatttgtttgatttataaattcatccaaatccttatcacaatgatattcttgtttattgtgttgtcaacacagtggaagtaa

SEQ ID NO: 143880 - DNA, 1326 bp, Cannabis sativa
catgtcctctgatttggcagttttgcggtttcaaggtacatcaacattaaatgactatcttttccacttccatttcgaattctgtctgtaggatcaaacatctctctgatctaacaaaactgatttcaagagtataaagtaagaaaaaggaaccacctttgtagtatttcctctattttagaaattctgaaaagctcttaagcttctttgctgaaaaactagcactgactttgctcgagaatttgcatgccatctctgtctttgacattttcctgtgagtttcctctgacttaaatttcgactccacacactcaaagagaccctcactgcatccaaagatttgcagaccgaagagctgtatttcgtcccaaaccccaattttaacagtaagtagcttttcttcttgatatcctttatgtttgttatgctgcgtttttaggtttaattgctgcatgttatttgtttatatcattgccgtctcatttggttttagcagcttttagggtcaaactgtatttgggtcaatattagggtttaggcaatacgtaggttttacagaaccttcaactcaccaccttcaggtttgataaaattctttccagggattgggattgctttcttcttgcagcaatgtcccaatctggttcagaaatttatcgtccagaagatttagaacttgaacttcctacataatcaaacgtcccttataaatctaaccatttaaaacccacatccaaattagggttaaacgatggtagggttagggaacacttagtgaaagttcatcaggaagataatgttagtcgccacaggcgcttcttgcaagaaatcatcgaaggcaaatgccgtttcttgcgagatgcagcttggccagaacctcccagtgtgtcctctatttctttggctaagcctttgtttttacccaaagtcacgattgctttttgaaccaagtgacttggactttgaaataatttctcccaagccacgtacatcaaagactccctaggatcctaacgtcacctttgaggccgagttaatataatcgaatgtgtaaactatctcaggctacacaggtgatatactgaggacctgcggaattgagtatgggcgagtatgccaagttaggtcagtgcaagctggtgagtttagttgttaccctcctatgcgtcttacaggtgaggcctctgaaggagccagtggcgagaccagtatgagcggctcgaatggtataggtgcctggagccttgagcatatcagggtagggaccataattcccctccgtgattatttcaaggattacgcaaaccaccttggacttgccccatt

SEQ ID NO: 143881 - DNA, 704 bp, Cannabis sativa
  modified_base (282)..(289): a, c, t, g, unknown or other
  modified_base (638)..(642): a, c, t, g, unknown or other
accctttcttgcacagtagagcactagtgagccaagcccagcaagacagtaaaatatatcgataatcataaatacacatcacataaatattaatgacattttatttttgtctgcatgacacagacccgcgtgttacgctctcacgcctatttatgtctatgtggcatagacctacgcgttacgctcacacgtctatttacattaaggccttagaacggttcatctcagttctagttaccgagtccaacccgattatgtcttgaacacataaccctttacttnnnnnnnnatttatatatatcatggcataacaattacatattaacaatttacttgggtaacaaccctatgccaataaaccgctcactttagagttataactctaaccccgatttctagtttctcatatatatcacattccatataagcgccattgcgcatatctctacgtgctaactactatctaacctgatgtcccgtaaatatagagattccaaatctctgggtgctcctaactaagtgccagtaatcctagtcacaatcccgggatacacaagtatagggttaatccctaaatccctttccataaatcataaaattggcattcaaactacagatattcacatagagctcggaannnnntttccaacgatataaagaacgtccgaaacggagtcccgaatcaaaagttatgaccaaaacaa

SEQ ID NO: 143882 - DNA, 679 bp, Cannabis sativa
  modified_base (574)..(603): a, c, t, g, unknown or other
aaagtctactaattatttaattgttgacacttaatttttttttcatctttattttcaagccttatggtattttggacaagtgttgctcaaggtttattgtatttgtgatagtttaattatttagtgatagtctaaatcgcaaaaaccgcataaaccacaccgcaccgtactattttttgcggtgcggtttttgcgattttttaatttcgcggtgcaggtgtggtttggaaaattgaaaaaatcgcatatacgggttggtttgaaaaaatagtcaaaaattgcactacccgcaccgcgaacacccctagtcttttgtaatgaccacccatggtctcttaattctcattaatgcaacttttgaggtttatcaaaaaaaaaaaaattgagatttttttttcataaatatcagtaattaaattttttgttatatatatttatttatttaaagaattaaatatgatttaattaataagagttaactattataaatataagtctgatttaagaaacattatggactataactttaaacgtaatctgaacaattcgtatactacaaaaaatcttacttttnnnnnnnnnnnnnnnnnnnnnnnnnnnnnnaaaagttgtgactaattattaattctcattcatgtgttgtgactaaaatgtccgtggctaaatgtattagtcacaa

SEQ ID NO: 143883 - DNA, 942 bp, Cannabis sativa
  modified_base (719)..(727): a, c, t, g, unknown or other
aacttcccatagtaggatttgtgtttgaggagccaaaacatgcaaaccaggttgcatgttaaccagggcgcagggcccaatgccatctcaacttgggcgctggggccctgttctggctcacttgaaatctcatttactccctaagatcacttgcatcttcattatttctgatgacaaaaaaagtccaataacagtttttcaaaaatttgattgaaaacaacccaggttgacaaaatgtcaaaatgtgtagaatttgtttcaaggaaaatattaatgcataatgatggattagcataaacgggagcaaaatgatcaatgcgaattttttcttccacattcacttgatttggttccatgatattagaattttcacttttaattttgacccgtgataattttctcttgaccaaataatttttagaatttcgttctcagtgaattaaacatcgagtattgtaaaaattaaaataacagaaaataagaaggtggtgtctaccatataagtgcgtaaataaagcctgtttaaaatagagcaaaactaaataatttgataaataatatgtatatatttgacaaaaatataaatactaatattaatatatatctaaaaataaagagaaaattataaataaataaaaaattaggaggcggtgtctaccatattataagtgcaaaaatattaaaaatgagtgtcatcccaaaattggcactctgacgtnnnnnnnnnagaatggtgacacgtggcatcaacttagagcacctggtcggatgagcatgccgagcaggatgcctcgctggcatatctatgatggaatactcaacgagctgagcaaaatgagcaacactagcgaattcagccaagtacttcgtgagtcaccagctcaatccctataactcagggatcaacttgcatggatatggcatacacacgattccactatc

SEQ ID NO: 143884 - DNA, 584 bp, Cannabis sativa
cccgaagcgcctaatacccttcattggtgaaacccacaggaaaacatgttcccctgcctgaaatgtaacatctctgcacttcggatcagcataacttttgaaacctgaagaggagggagctccagctactcctgacgagtatgatccttatgagggagctccagctactcctatcggtgcaggtgttatctgtatagatgacagcaagtccaagggtgaaattttggcgatagaggcacaacctgcaggggttaagagtgagaagaggaagagaaatctccctgtatggttccgtgactacacggagatgaagaagaaacaaaggtcttcttcgacgtttgatccgctggcgccaccggatgagagattgttggatagtttccgaaagtggtgttctagactcattcccaaccaccagcttcgtgatttgaaaagtggtgattacggttcatcgttcttatggaagctgttgacactataggaatggcttacagatgacgtaagtaaactaatttataattttactttactttacaactaatctacaattaatatattttgttgtctaactgctttctctaacc

SEQ ID NO: 143885 - DNA, 705 bp, Cannabis sativa
gccctttccttcttctccagattctatgcaatgtgagataaaggtacctcatcatcatccgagtcaggagctttcccatctttaggcatgccccatctgcagctagtgctcctgcaactctaagagcaggaggatataagccatacttctggaaatcggccacactggtcaactggattatattcctctactctgccgagagagatgggatgtggtttaccctatcccttatctataaagtagggatagagcgtctgaagaatggcacatgccaaaattcgtagtgcccgatcctacggaggccataggcaataaagtacttcttggcgtacccaccgaccttcgatatggatgtgcaattagtgccacccaaccattggtgactgatttgactgaaataaaaatatctagtcctattctagttcagcgcaaacttcagatcaaagtagtaaccgatctcttagagggtaggctaaggccaaccaagctctctatataagatgaacatcgttgaaagatacttgatgcttttcagcgtgagctgagtcgaacacatccaaaagtaggaagcaatgtccaaaaaatactgatgaagcagtaacactgccccatgcttaatgtggcacctgagctatgccaaccaacccagagggagcctgtacgcccaataattcttgcagggaatctcgcagtgggcatccccta

SEQ ID NO: 143886 - DNA, 837 bp, Cannabis sativa
caaaagtgttaccaaacggcacttgtacacaaaattattaacattatcatgtttatattaatgtttgctatgattttgtttcactgtgaccaaataaaatagatttacttcgcattgatcttaaccctgtaaagatattatgccatttcattaatcttaaaatcttaatatcaaatttaagtgaaattaaacttgaactttatagattttttatgataaaaaattgaaaaaaaaaaatcaaaacctaaaatacaattaggtatacgtggtttggcacgtaacattcatctagattttcttggctgaggttaacggggttgaatccccaatttatttttatttataatttaaccctattagataattttttttggctgaattaacggggttgaatccccaatttatttttatctataatttttttttccaaatctcaaacacagtttatagcatgccaactcatggaatccctaatttatatagcatgaagcccctgtatatcgcatgaagttcgaaatgacgaggaagaaggtgagagatgaaaatcaaaatcatcttcaaccattctatgcctaacttatgaaattaaagtttcaatcaacttgattttcaatcgataacgatgagtagacgacaggtgaatgatttcagatgaatgagaccagcacattcgcccaaattaaagcttcaattgacttgattttcaattgttaacgatgagtcgacttgattttctgctctaactgcgggatttcataagtagtttttttaattaaattaattattcacaccaagtcttatcatcttaaatgaaaataaataactttttgcaggaac

SEQ ID NO: 143887 - DNA, 621 bp, Cannabis sativa
gcttccttggctgcctcctcgtcctcttcctcctttttggtctatttgtagaaagcaagaatttcctccttagattcttccaggaaacttgtgtctatatctggattttccatccaggcttgatagatggtacggaggccaacaacattacatcgatcatggatttcggcctccttcccttcaagcgtcaccttagcagcttcaagttcccctttaagcttctcgcattcatcgcttttgacctttgtctccttctcagcagcttcaagactcttcttcatcttctcagcttctttattaaggcgagtaatctctagttgggcatcattccatttcttggccacaacctcgtgttggcctattaagttatggacctcggtctccaagtattttaccttttccaagcctcatcgctgggcgacaaaagagaggaaagaagcctggaaatccactaacaaagatgcatgagtaaaaaaaaagaggaaaaaagaataaaagaagtgaacaaataaggacaaagaaacttaccaagtggctgtgattgagacaaactccttgtaagtactccctccaaatccccatgattgattaaatcccaatcatggggaaggagagccttga

SEQ ID NO: 143888 - DNA, 1255 bp, Cannabis sativa
tctggaggggcttaccccacgactacacaaatggctcatttgttacgttatattgtattaatattatttaatataatagtatgtttggtattgacttattaatatattatgtaaagttataatatatttcaataaactcgaccccaataccgactccaaatcgggtcccggtcccagtccaggtttgggtccagtcaagtcttactcctaggtccaaggtcttggtccgagtcggagattaggatcgaccccagatcctttgtaaatactataatacaagctaatgcaaactatttgttatataataaataatacaatttagattgtattaaaatttttagacctcaattgtttataggtcgtgtctcagtgtactcctcctcaacataatcctagccagtcaccaagacttctccttcctcgaaaacaggctctccggcctcattatagccaccaaaaggaagtacccaaactttctcatcttcttctcctacttctccctcggcctcggaaggagtggcaggatggacttcaccctggtcctcaacctcttggacttcgatgtccccatcagcaacttcttcttcctcgctcggaggtctaacttgctccattctagctgttgcgaacaacagagcaatgtgaggatcaattattgaagccttcttcatagtctgcttagttcgtgccatcattttacgtctgggcagatgctttgtttcagtggtatgtttggcaatagtcacagcaaagtctgctacaggagcaagctgttagggtttatgccctgaaaagcctataaagacattattgattattacataaagagttgaatattttgatatatgcttgaatattaagttattaatattattattgaataatttatattaaatatcagaaatttttttattcatatatgaggttgtggcttgtagttgtacagagcactaagaccacttagctatgaatacaatagtcaggatcaaattagagttatagaatctttaatcaatggttgctagtacgattcactgatgcgtgtttttcggtgcaagtaatctcagttcggattacgaatgtagtatgacatcaaagtaaaagtgttgtatataatagagattatatctgacaagaaccgatatgaatgaagttgtctttatgaacatgccgtttattataaagacctaattcatatcataacgatgatcaatagtagattagcctaaatcctgagtaatcatgaactcttgtt

SEQ ID NO: 143889 - DNA, 734 bp, Cannabis sativa
cggttgttgtaggtttgtttaccgattgtcaatttgattttttaattgaaaaataaaaaggtacaatcaagttactatttgtgttagttaagatacaaaaaggtacaaccgagttactattcgtggcagttaacagtacaaaattactgtagacagtgggtccatgttgtcggagtgatgttattttggtattttcattccttcatatcatctatgtatttgtgtaatggtagttgagtacattatatcacgtagtgtgtacatttattgtttttgcatgatgtttagtaaaattagtgtacaaaatatcacgtaccgagtacaaaatatcacgtaccgagtacgttcatttatgtttcgtagtatattggcaagaaaaatttgttataactcatgaaattatgtgttattatatattgagttttaagttggtatatttatttattttaattattttttatattaaaaaaattaccacatagaaatatttttttctcaccttataagattaattttttttacctaaaataatttagttgtaaatcaataataattttgagatttgttcaagatgagataattaccttaaacaccccaaacataacatgaagtaaataaatctaggatttttgaagcattactagattcaaaaatgtcctgatcgtgaacttaagaaaagctagaactgtcaaataaggattgcatgtttgaaagctattctaagtgattagggg

SEQ ID NO: 143890 - DNA, 959 bp, Cannabis sativa
  modified_base (930)..(933): a, c, t, g, unknown or other
ccattattataatctaaataatcaatgaccctcgatagacggtttacattgaactaaggacaaatttactattttaccctttgatggattttatccttaaaatacttagctccttataaatgatatttcgataaaataatgtaaatactaaaataagagctcttctatttatattttttagcctagctaagatctaaggacactatcgtttcacttctaaatagctatagaagctacaaattctatatctatgattaacgctctcacttaattgcactatcgagtttctaagatataagtatgagttagtcctatcggtaaactagtaacgaacaagttaaaaaaactcgtatagtacaattaagttaaagcttaatcatctcagggttagatcaattgatctaaaattaactaaatgatattgacttagaaaagatataacggcaagtttatgatatcttttctactgtcaatatcggtctagtccgatgtatagtcagtatatccgatacaagtttactttactaatgttgaggaaaaaattacacttatccaattgtaagcaaaacacatcactgattatcacgtcagtgtaatttcagtgcactgatatatcatgagacttaatagttttgaagcatataattataattatctttcactgtgtagacaacactatatataatcatgggtataataactatatatttgaaatttaatagaattatatattaaacatataatcatgaatcttgtgaaataagcaacataaaataatttttaaaattttattaattagtaaataagattatattaaattgagttttatttaggatataaaactccaacaagctttcacttgtactattataaaactagaagtgcattttaattaatctcatcttcttgatgtcttgatcaaatgtagtnnnnagtattatctttgtaataggatttga

SEQ ID NO: 143891 - DNA, 720 bp, Cannabis sativa
  modified_base (613)..(616): a, c, t, g, unknown or other
atgtggttgtggtcttttgatgacttaggtccagttacaacaaagagttcttagaatagtctaagtggatcctggtcatagaatactaaactcaaattcaatgcattgacatatagtttggatccattgacagaaaatggatattaatacttgtgaaagttatactgtaatgtgtaatgcattcttggaactgaaatttaaatttctgtaagaaccagtatattctgtagtgacaaattatttccagctgcatctgggattcgtagtgttttgtttagagttcgtactgttagtgttagtccacgtcaccaaagatattttgggttttaattgttcagactgtaatagctgtctattttgggtttcttagtttagctgggtataaatacaacttttgggtattatgttaaaaaaccttttaatcggagattagggattaagtttctttcttcttgtttcctctttatgttccatggcaggtgatctttgagcttggaggtattaatccaaagttgcacatcagagcttgaagatgttgagttcagactgaagggatttcagtatcatcttcatcaccagatcttaagagagttcagattgaagaagtgttgannnnagctcatcattcacacaaggggatcttgtgtctccaatcaagggtcttggttggtatgggtatagattcactgtattttgtaaaagagtgtattgtttacaata

SEQ ID NO: 143892 - DNA, 516 bp, Cannabis sativa
aatagaatttatacattaagtaaagtcatgaaataaatcatgtgaaccgtgcaacatagactgatttctgatcttttattaattagtaaatctgattatactgaaataggttttatttacggtagacaacctaataatttttctttcccacttattttccaattcaaatctttgagggaatcactaccaaaaatgttacttttagtcacaacaaaacttgtaactaaaagtaaaacaagttataactaattataaattatcattcttacgctgtgactaaaaagtccgtgactaaaagtattagtcacaaaaattaaaatttattgtaattaaatatgtttctagtcataatattttttgtgactaaaactaaattagtgacaacttgtgtctaaatactatgtttagtgatcacaagtaacttttttttgttatgaataaaagtcacatttagtcacaaaaaaattttgttgtgactaaaaggttgtcactaaagatagattttttttttttttt

SEQ ID NO: 143893 - DNA, 711 bp, Cannabis sativa
  modified_base (496)..(508): a, c, t, g, unknown or other
aataaggtcaaattatttaacaaatagaataattaaaaaaaaaatatctgaccttaaatttaaaataagattaaataatcaaattttttttaaaaaaaaaaataagataaaaaattaaactaatatgtagatatttagctatttacaaattcaaattacactaatatgttaaattaattttaaaaaattaaataaatttaattctgataattagaattgaaataagaatagaaaatatctaaatacaaaactacacagaaaatcaaaagttaattccacgaaatagcataaaaaatcgaagaaaatgaaaaattttgcaagtggtacggacagtatgttgcatactatccgcgcgcggataaggggtttaagacacccctgggcatgtcgcttggacaatgacatgtcggaacacgcacctgactgagggacactcggttccgcgcgcgtgggcttgagtgatcaacctatcttttttttcaaatcttcaaaaaannnnnnnnnnnnnaaataaaattgaaattgagttgagttctataaaaaaaaaaaaaattgcttaatttttaccaaactatcgaataaaaataattccagaaccaaaaattcaattatttctcatgaaaattcacaaacagcaatcaatcatcatataacacatagatcaacatgaaaccatccaaatcacatataaatcgttttaagtccaaattt

SEQ ID NO: 143894 - DNA, 877 bp, Cannabis sativa
ccatgagttgaacgagtcttcgcacccaatgtacatatcaagccagtcttcaggatctttaaaccttggtcgctctgataccatgttgtaacgccctgactctcagttttccatgtgtgtgcttttacaaacgcattattacaagtttattagttaggaaaaagtgtgttttaattaaaatctttaagtaaatctaaaataaaaactttcatttcaaacactgtcgtaatatggggatcccctgctaataaaattcctttacaactaatttacaaaacgactattacgaaatcaaggttacatttttaaatatagagaaaataagtcgatcttacttcccagaagccaagacaccacggcggatatgtacattgctggaaaaatctcaaactcatggtcgaacacaacttctaacttcatacctgcaccatgaagcaccagtgagtcacattgactcagtaagaaaatctactagataaagcaaaatcatgataagttatagcagatttcattacaatagaatatacataccaataggtcatactctttcaaagtacatatacaattcagagtttatacgagcaatcttattacaagattatacataaccaacaacctcagtgtttcataaaacattctaatcatacattatcataaacacttactttcaatgcttcataaagcattctggttcacacgttagcatattcacacagcttcagtgcttcataaagcactctaattatgcatcattataaacacatacttttacatccctaggtcactgcgattgcaagaaaagtgactaatttcataagcaatataacatccatttaatcatactataactaaaatgtattcaattacaactcatcac

SEQ ID NO: 143895 - DNA, 782 bp, Cannabis sativa
  modified_base (33)..(42): a, c, t, g, unknown or other
  modified_base (486)..(497): a, c, t, g, unknown or other
catggcaataccctaaacatcacaaaaatgggnnnnnnnnnngttcccaaaattgccccaaccggtagactggttcccaaccagaattctggttctacggggtttcttgggaccaacaagaattccagttcctacaggtccccctgaaccggaatttcagttcagttcaggattcactcaaaaattcataactcactccaatcaacccccattcaaactaaaccttccaaacttgttctatgcatcctaaagaacatattcaaggcaataaaaacaacatctaacaactagagcaacaacagtagctaaaatcaccatttcatgtaaaaatccaatcttaaaactcaaagaactaaagaggaagttgcaaagaggtttaccttggcttggaaaacacttagagttgctggaaattactggaattgaagaggaaaaacgagaattctagctggttctatggtgttcaaaagagagagagagagagannnnnnnnnnnnaaatgtgatttttcctttgtttgatttttttaaataaataaattaaaggcttttgttttattaaaatatcagccaacataacttcaaaaattctgattataatacttaaccaaatccacgaaaggacaaaatacaacatgggcaaaaagaccaaaatgcccttgcccatactgaaaccataaaagatcatttaggggtactttgggaaattctaaaatcctgactattcctgacattcccaatgtctaattatactaccccgcttgttatagtgagatttctctc

SEQ ID NO: 143896 - DNA, 569 bp, Cannabis sativa
ccagttcggcccgaaatactcgatgtgactataccgcgccaacttgtcagaaaacacctgaaaaaggacacaacaagtatactatataatagtagagtccataaacactcaattaaattaaatttacagttttacccttctcaagacataattacaaaaatgcccttggctcaccaacggggtcttaacatgtcatttatcaaattaattcacatataataaattatacaataatataattccatattaatacatatttaactagttagggttttctaatctatttccttagtcttagggtattacagttattttcaggagtcatatgctcctattgcttcctaggttggggggacgttccctttcttgacaacttcgactaattcttgtcgctactgtattcttccctctgatcatgccacatgtctcatctgtaaaaacttggataacaatacttccactagtgaattaatggaactaaaggataaagaagtaattagaatggtaaaatggtaatttgaccaaaactaattacgaaccaatatatggaggactaatcactggaattg

SEQ ID NO: 143897 - DNA, 738 bp, Cannabis sativa
atttgctctattattttctcatatgccagctttccccaacaataattgtcaaatattggtagattgtccactagttgtagccattcaagatctattaccgaagaaggacttggcattatgagaaatgtattgagcaaatagataaagcacaacttcactctgtctctagtctttgcttctctagatatgctatctagagcactgacaacatctgttatattaatagacattgtgttcttgaagtacttttcttttaacttgctcttagaagacacaagctccatttcttcaggtgtcgggccatcatcactgtacaatccagattctattgcaaactcttggagagaaaatcttaaaggttttccattaatcaaaaaccataactcatgcctcttttggcaatctaccctcctcaaaactatctggtttactaacgtgctaggaaaaaaccctttagtgtcgaggtccaagagacgacccaattgggactaatgtttaaaaacatctcggtcagactttgtgagccaattctttatttggcatattacacttagcggggatttaatggtaacttcaaattttgcagctatattagtagtaatggcacgaggtatacatggaagctctgttgttaatatagtttgggcatttacaataataatgtgtgaaatgaataaaaatatataaacgataagaacataaatataaaaagtataaaaagaattacaaatttaacta

SEQ ID NO: 143898 - DNA, 784 bp, Cannabis sativa
tatttatttcggtattcagaaaaatattttaatttaattttttttttatgatcgtgtgtgtaatggacaaacttacatagaggcaagagggaatagtcgtctcctgaagaaaaaaatcgagaaaaaatatatatgtatttcggttagttacaatatatatttataattaaaagtaatgtattttggttatatttataattaataataaacataataatagctttggcatgttgattaagctatcttacaaatcttatagattatagaggtaaaggttcaaattttagtaaaaatatctctacttttaaatatttagtttactttgtgccccctcacagaaaaaaacatccctcagttttagttttgagtttataattatttgggaccagttataaatttttagaaaatttcaaataatttacaataacaaaaataagatttacatattttgttgtacgcgtgactgttttttcttatataaatggtaagtaattgtttaaatcttattttcagtattgtaaacttttcagtattgtaaactattcaattcagtattgtaaactattcaaaattttctaaaaatttacaggtggtcctaaataattacaacgtacaaaatcataaaaaaatattagactaaaaaaatttctgaatgctgaaaaaaataaaaaatctactagaacgaccatttaagtaaatctattagctaaatatgtcatttcagtgtttcgtagtgctgtgtagtggcctgattaccctttgggggtgtttggaatgagttaat

SEQ ID NO: 143899 - DNA, 619 bp, Cannabis sativa
tgttgcctagattagtctatcttcgtaggttctaaattttatctaagttaaattaattgcatgcttcgtgaatttactgcttaggtaaatgagttaattattgaggacttcactttgattacatgtaatagggagattgagataatttaactgcttcaactttatctgcgagaataatagtatagaagttaagaatgattattgagggtggagaataacctttaactatttatctcatatcatagtatcacttttaattagtttttttatttttatttatgttattttattctaatcatcaaaatcctcttttctaattcttgtcactagtttttgaataattgaataaacatagtctttgtgggatcgacccttattaacaattatactaaaataattggaagtattggaatcaaaataatagtaaatttgatacgacatacgacacggatcaatccttgttagctgtcatatgtttagaacaactacagtcaaaataacacatttgagaaacaacacttttatcaaaaaaacccagctagatatttttctttttcaattcatttttgtttcaaagcactatgtttcttttgaaaattttttaaattaccaaaataat

SEQ ID NO: 143900 - DNA, 506 bp, Cannabis sativa
ttaatatctttattaaaattataaaaactaataactttatcatcgttgatgtaaaaaattggctaacactgattctctagattggcaagataaaatttaaattaagagtaattaataagagagacagacacacacacataagatttatagtagttcactccatgtatcgcaataataatgaaactacggaatttttatttctcataagaattacaagagaattgactaaggcaagaactcaaatttttagagagagagatattctgatcttgtgggaactttgttgaatgtgtaaaatgagctagtggagctatccttctacaggcaatgagcttcattaaaatatcaataaataatacaaaaaatatgaaaaaaaaaaatcattctagactagtcttaatcattgatggtgatcaaatgactaaaatgactctagatggtgatcgtcaaattttggagcttgaatcgtgccagttggatttttttcgggttatttgcaaaaaaaa

SEQ ID NO: 143901 - DNA, 658 bp, Cannabis sativa
  modified_base (28)..(39): a, c, t, g, unknown or other
ccttttagtgccctttatgttattttannnnnnnnnnnnaaaatggtcattttgccccaatgttattttgtcctttagtggactttatgagatggaaatatataattttaaatgttatttgttggctgaataaggagtggaattattcattttttttatccattatttaaaaattggaaaaagttagaaaattagaaagaaaatcaaaactttttttctctcaactctctctctctattcggccctttgatgcagcaagaatttgaggttttctctggtttttcaagctgattttttgtgtgcaattcaagctttaggtattgttcttactcttgtcctctttagtttcttgaaaaatcaagtaagaatgggttgcatgcttagttttgttcttgttcttactgttgtatgttgttgttgatttcttgagttagaacatgatttaaagtatggattcaagcatggttgtgttggtgatttgttggtttatcaagatatgaaatttttactcaaaactatgtttttcaaagaaaatgatgaatttgttgctgctcttattgttgttgcttgatgttgttttctgagattattttatggatatcaaggaagatttgagttggtttggattcatgtttgttagatttaaccaagtttgagt

SEQ ID NO: 143902 - DNA, 503 bp, Cannabis sativa
aagagccattcagtgattctaatttgtaattactactgaacactggtgtttgagaacgagagatagagacgaataggggatggaattcatttatataaaaaataaataaataagataagcagggctggctggttacgacccgatcagcggggcgaaactccaaaatttgcctgaatatttcaggtcaagaaccctatgtaacaccaccagttatgcagtaaatttgaatttggttataagtgaaaacttgtatatcttcactaactgactgtacttggtccaagccaaactaattagaaccagctttttgagatttgaagtttcagttaactgcttcagaaaattaagtttcaatttacttatccgcttgactaaaaacttttgagttaggtctttacagcttgaccaaattgagaaatgaagagtgttactgtaaatttcatattacaattttttagttaatttctgtgcctgaaaatacatgttggaatatatatatatat

SEQ ID NO: 143903 - DNA, 676 bp, Cannabis sativa
cttactaatctgttataactttgatgtctcttctttataacgacctccaacaatctcaatatcaccaacaccacataagtatccaataatatctatatataaaataaaataataaaaagatgttggaatattataaagatgaatagttgaataaatttattaaatatcaataaaatttaataattaaaatacttgagagtattgtgttatcattaacacgtaaatgagtcaaatttggagttatgaattgaaacctattgatcggaatgctaactatttctccttctagtctctctactgaagtaattgtaaccaaaaataaaattttatagttatttaaaagtggtctgtagtcacctgtagttgccacaatttttaaatttttcagagagtacaaagaacattcactcaatagcttcttaaacttaaaaaccaaattttttcgtattgttgcatgcattagaaatcaagaaaagaacattccatcatgagagaagaagagagaatataagagaagaagataaaaggtaagaaatatgaaattaggaaaaataaattagaatatatatagagaatagaaaaaaaattataaaaaataaagtaaaaaaatattttttcaatttgaagttgtgatgatattttttaaatatgatttgaaaaaaataataataaaata

SEQ ID NO: 143904 - DNA, 733 bp, Cannabis sativa
cccaccggagacaacaaacgcttcttttgatgcacgacttgcaccagcagcagcgagtccgactccaaaaccacaccagtaagcacacgcactctctctatcttagaacgattggatagagtctcacaaaaaaacacaacactgggcttcttttggatcacaagatctttaaggaattgtaaagtctatgggttcccaagcacatggcaattccaagataaaatattcataatgattggtgggtctggacaccagtacccaccaaactcaagttatttgaaccatttaccacttcgctcgttgccacatcaaccctcacatggaccccatcagtatcttccaaagccgttcttatcctcttcgtgtcaagaaccataagataagccttctcattgatatcctcagataatcccttatgcatagcagctggtaaaatatcttccataattatagggtccccattaacaacctttgatgttcctcacgttgaaccaaagtttcctccactatcatcggactcaaccccagcacaccacgattctcctcaaccattaccatcgtcgaccgagagacctcaccccgagctgcggtttttgctacagaaacatcgtccaaagcagcagtaaactgcttaagccatttagctccgatcatgtgatttctacgtataggtctcactcacatccattctccatacgacttgattatttgaccctctccaacctcaaaccgc

SEQ ID NO: 143905 - DNA, 532 bp, Cannabis sativa
ctattttcatagagttatcagtagagtttatgaagaatgaggtcgaacccatgagaattgcatgagatcgaaaaaaataattatttaatctaagctattaaaaatctaacctagttccttaacggtaaaaatgacagtaacagatattttcaatgatatttagagatattattaagggttcagaatctacttaagtgtatataaaaatatttatgtttatattgattctcataatttaattagtaatcatccaattattttctaacaaaaaatagattttccttcattttaaaattataacttctaagcattaaatatgaaataatttaatgtaaatacaaaaaattaaataatattatttttaagactgtaaagaatccaatcaacaagaaggagaatcgggctcagatcttaatgatactctgatatagagagaatataagggttagagatctgagtggaaggagccattattattccgctacacccactgtaaggtttctgaaactttatgtgtttatttacattgttt

SEQ ID NO: 143906 - DNA, 506 bp, Cannabis sativa
  modified_base (27)..(49): a, c, t, g, unknown or other
  modified_base (140)..(144): a, c, t, g, unknown or other
  modified_base (189)..(191): a, c, t, g, unknown or other
  modified_base (304)..(322): a, c, t, g, unknown or other
agtggtgcaaggagaaattaataagtnnnnnnnnnnnnnnnnnnnnnnntagagctacttattggaagcttgattatataggcccattgtcctcacactaggtgagacaataatgtttgtaagactcatttaattggttnnnnntaatcaattataattcttaaattatactatgtcttatttatgaannntcactaagcaatgacttaattgtgaagaaaaaagattttagggtttacttgttaattaagagactttgtaaagtctaactaataaataagataaatgacaattttatttgatnnnnnnnnnnnnnnnnnnnataaataattttggcatttataagattaaaattaaaaaaatatggcatttgtaaaataaaagataaatagttgaaaaaaatgacaaaattataactactgggacccatttacatggacgaccacttaaggcttatttttgctattagtttatcatttttttattccatataatttaatcataac

SEQ ID NO: 143907 - DNA, 996 bp, Cannabis sativa
tagattagagaaaaaaaatccaaatatctacaactaaaaagaaaaaataaaccctaaaacaactaaaaaataatataaataccttcattatttgctggtttgcttgctgaaaaacaacataaaccacacctaaaaatgagtcgacaactattttgggtttattattcactagtttgcttgctgaatatatatatatatgtgtgtgtgtttactaatttgctcaaagaggaatatatacatatataaacacatatattttcttgagtcaagtttttgtggaaaggattagaagcttcaatgaggaggagatcataaacagttatatgtcaacttaggcgttgggcctagctctaggtgttaaccttggcgctaggtcccaattttactgcttcaaaaattctgtttggttctcgaatatagttgaatcttaatattttttaaaaatgaagaagatggtcagaagtgttctagagaaactccatataaaatggcatgcgttgggccctatttttttgtacccaagaagtgttgtttcttctttgaaagtacatatttcttgtttttgatgaagacaaagaagatgcgaaattcggatctcctatctgatacttggaaggtgcccaaattgacagattgtcaacttgggcactgggtgccggggctctagatgctcaaaaatgaacttgctctaagacggcctcaaatatgtccgtgatatatctagttgatgtcccaatataaattttgacccttttgcactaagacggcccccaagactgaaattctagttgaatatgtcaacttgcgtaccgggtgaaaccctaggtgcctaagttggcttatgggttggatgtttatgtaatttcagctctcgagccttggattaagtttttccatgtcttcatgctacaaaatacttaaagatagttagttatattcaagttattaaagtctgaacttccatctcagagattctgaagtcaacctgggcgcagg

SEQ ID NO: 143908 - DNA, 719 bp, Cannabis sativa
tatccaaaaccagtgggtgttaaggataggtttattcactagctactagggccagcgaaggcttagagaaccttccatgtccattcggacaacgaaagcccctacagtgcaaacttttgcatattctgatcaatcctccatacttcagtgtccaatcatttgttccatataaccaagttgttgtataattggttatgctgatctcgtagccgatcaatccagtactttcacatattgtgatcaagcatcctcgctttgttaaggtgagcatgaaaaccttatgttacgctcaacaactatcaacactaagcaatttttatatccaaatccaatgggtgttaaggatatttttcttccactagctagtaggctagcgaattcttagagaaccttatttgtccattcggacgatgaaaacccctacagtgcatactgttgcatattctgatcaatcctccataattccgtgtccattccattgttccatataaccaagtggttgcatcaagcgttatgctgatctcgtagccaatcaattgagtactttcgcatattgtgatcaatcatccatgttttgttaaggtggcatgaacaccttatgataaattcattactatcaacacctaaacaattttatattcaaaaccagtgggtgttaatgataggtttcttccactacctagtagggccagcgaattcttagagaatcttccatgtcc

SEQ ID NO: 143909 - DNA, 761 bp, Cannabis sativa
tgctaatcaacgaggttatcgaaaaattatgattaattaaaattttgcttatttaattaaaatcataaagttacatgtataataaattctgagatccagtttacaaaaacatttataaaagtttaactgtacatatacaaaagtctgtcgcctagcgactatatagaaaaagccctgatgtctaaccgccccgacatgtacaacttccatctgctcactctcacggctgttcagacttagccttaccttacctgcacatgaaaatagcaactgtgagtcaatagactcagtaagaagagcataacataaaacataataatatcacgggttataatcagacacccatacacccaaccataaccctatccctgtgtcccacacagtactgactctagaacattcatacgacaatactattcaaactcagaaaacaacaccaactaatagcagcagctacagaactcaaaaacacaaatcatgcaaaacaaactcttacttaaagttcaagaaactaaagagggtgaagccaagaacttacctagagcttgagatcacttaaaccttgcagtaaaatacttgaattgattaaaaaaaaaacatcaaaccctagctgcctagggattttgagagagaaagagagttcttctttttctattttttttttttttttgtaaaatgaagtaaaataaaaaggttttattacaaaatatcaacctaatgcaaaataaagggattatttcacaaaaacataaaaacaacaa

SEQ ID NO: 143910 - DNA, 694 bp, Cannabis sativa
aacttaatctaaaattaatactaaaaataacctaacaatatgtcaaaataattttttctaaaaaaaaagttaacctgcccattacttttatcgatttggttaggataattcgtccaaatatgtttattattattattattgttagtaagagtattcatctaatttaattcatacaattttgctcatagtgcattcgatttgcactaagtacagaattcatatttttggaccctatccaatccgcacaagagctcaaattagttacttaattgtaaattatttaatatttatgaaattataaattattttcaaataaccagtaacaaaataaaataatttattactgttctatgtctctaataacaaattaaaataaacaaacaataaataatagattccaagaaagaagaaaaatattgtatataaaaggaaaatttagtttattttagattatactttctattcaactcaaaaagtgatcaactgacaactgggtcgtataaatttgatgcttgtcacgtgttacacaaacagaatgaaaaggcaataaacatagagatttgttacaaaggtttggcccccttgtgatagcgggtaatgacctacttcccttttggttacatttatactaaggaaatactatctagatcactataggttggatctgctatagcacccttaggattacaaagta

SEQ ID NO: 143911 - DNA, 500 bp, Cannabis sativa
  modified_base (328)..(334): a, c, t, g, unknown or other
tgtactcaatcactaagagggacgaaattttctgaagaacactcaagggatttcgaaatggaagaagaagaaagaagaaggaggtctcaaaattgtctgacaatttgtaaaaggaaatttgactaaatatgcttacataacattaacaaaatttccctgaacttataattaccaatatttgtgatctaggccaaatttaatgttatccccaaattaccctccccatttacatcacatcggaccaaaaatacataatacataaaaagcaattgggttcgatggggtccgttggcggcccaatgctacccattttttttaattttttttnnnnnnngtttttgtacataaaaaagttagcttcaggtgaccatcggaccaccatcggaccatatttgctaccaattttttttatgtttttgtacataaaaaaagtagcattacatcggaccaccatcagaccactattggactaccattggaccatatctgctaccaatttt

SEQ ID NO: 143912 - DNA, 906 bp, Cannabis sativa
  modified_base (220)..(222): a, c, t, g, unknown or other
aatctttttacctcaaatcttactctttttgtaaatccaagagattttgcgtcagcagaaacagcttctgcaacgacaggtttaaaatctgttgtagcagacttcacatttgcagcatcaggaagattcgtcggaacactagattttacaaactttgtgattccagaactttccatagcatctgatcatatgcctacaaaacctctttgacctgcattcnnngctttttcaaaaatagaagatccaagattaagcatttgaacatttttattaaaattttcaagttccttctttaaaagagtgattttttcatctttaacacaaaattctgtctcatattcttttatttttaactcaaatatttcaatttgatgagatagttttttatttattttaatcaactatctatttttagtagtaagctgaatccacttttcatacatgactttgtatgattcagtaagagactcttcatagatttcaaaatcatccgaatcagattctacttgtttagtggtattattcaaacatacaaatctggctttttcctgtgaatcacacaacacattaattataaagaagttaaggcaatattctcagaattttcttcatcacttttggtttcatcattactccacgtgacattgaagcttttcatattcttttttaaagtgtttgtacactcggattgaatatgctcaaaacattcacattccctacactgaattccctttttgttagacacagatggtttaaaagaagcatttccctttcaaaaattttaagttattctttttattacccatctttctcatatatttttgaaaattcttggttaataaagcaattttatcatcacattcactatcagaaattttattgtcagcaacttttaaagcgatactt

SEQ ID NO: 143913 - DNA, 915 bp, Cannabis sativa
gaatactcgcaattgttcttcaagcaattttcttcttgtcattaataatattacatacatttggtgttgcgaattttgttcgacaacatttggcgcctgtgggaaccgcgaattaaagtttcattcatttcaagtaagaaaatcatcatggctggaaaccaaacaaatggaggtgctaacaatgagtccatcaacatcggaatgatgaacgtgccattatctggagctaggacacaacctgtggatgtcgttaatggcagagtagggagaggtaatattagacctctcaatctattccatgaaacagctggccctcaagtcggagaaacgtccacaccaccagcaacaatgcactttctacctgttactccggcggtggtatctgaaggaatcgtccaactcaccaccgaccaatatactgcgattcaggatcaactacgcgcactgcaggctgaagtggatggacagaacagggcccgacgcccccctcgagcccctactacccgcatagataaccctcaggtaacaaactctaaacatcgtaataatcgtgttcacagcgaacgaagaaccaatcctgaaggtctggacctaaaccagcccacctcgagagaccaatctacgaggtatcttaaccaggaaacattggttgatgaagaccctgagcgacgtaatcctcgcagccgaccatcaagagacaatgacgcagaatccacctcttcatcctcgcatggtcgcacacctagcagatacatgaggtctgtactgtggagacgcaacagggaggacgataccaagtccatagggacgatctgcgtgatcacctcaacgcggtgttcatagcgcgctcccacgcccctcgcgacgaggaaataccccgtgatccccccgtgggtgatcaaggtgtaaacactc

SEQ ID NO: 143914 - DNA, 533 bp, Cannabis sativa
  modified_base (149)..(155): a, c, t, g, unknown or other
  modified_base (484)..(488): a, c, t, g, unknown or other
ccaaggggacgcgtaggtggcttagttctaccaaaaatcttgtaaaaatcaagagtttgcaatttctatccataaagtatttacatttcatgtttattatttgtttatacttgtgattatctttgttattgcattaaacttgaatattnnnnnnnattgtctttggagtttttaaatttctaaaattagtatatatttccaattcaccgccctcttggaaacatatcttgggctaacaattggtatcagagcaatggctcttgtttgtgggtagatttcacaatctaagagtatgtcgtttccaagcaattcacacaataagatgctagaagatttaagcactagtagagcaccattctttgatggggtagactttccttattggaaaattagaatagaaacttatttcaatccgttgactttgatttgtggcatattgtatgttatggtccttacattcctatgcatgttgtagatggtgtannnnntataaagaaatatgatgcatatgatgaaaatgataaaaagatgat

SEQ ID NO: 143915 - DNA, 509 bp, Cannabis sativa
  modified_base (463)..(469): a, c, t, g, unknown or other
tttttttagttacacaacaatcttttctcaaattggaaactcctattcaaatatatctccccattgtatttgtgcattgaaaaatcattttctagaaagagatgtgtgagtgaaagaaaaatcatgcttatcaacccacctaaattatttcatttcatatgcaaactattttattaggttactcaattctatgatgtgtcatttctaaggtcaacaaaaataaatgagtgggtcaattcaatagaaattttagtagggccttttatcaagaaagtggtattattaacacaaattatttaattgcatggttaaggttattatgggctcttttagtgttgtcttgtttgaaagcccactttctatttctttagtgaaaactacattattattttggctaattagcaatttcccctcctaactttcacatgtaccaaaattatgccccttgaacttttttggccgnnnnnnnttctccctgaactattaagattgttaaatttaaggacttt

SEQ ID NO: 143916 - DNA, 710 bp, Cannabis sativa
  modified_base (141)..(142): a, c, t, g, unknown or other
tttgaaaaaaaagttaaaaaaatagtatatggagtaattcccctttaatttttcatatttttacaaaagttattataattattttttattttttaaaatttataattcttttcttcaatatttaaaatatattttattttnnttttatatgtatattttttaagcatataagaaggaagaaaaaaaattaataaaaaccagtataaatcaaagatatacttttttataccaaataaaaataattacatggggtgcttttatagatttttggggtgcacaaataaaactatccaacaaaattgataaaaattgagcataagatatatcgataatttttgtaaaatacataatttaaaataatatttatggatttttatagttttataaaataattctaacttaagtcttaataatcatggtagagatgagttttaagacatgcatctacaattataaatttaatattgtaatgagtatatagtaaacaccttctgtagggggatgaatctaagcgccgttaggctccactaagtaataagtttcaatcaaattatttaaaatctatgttaaataagtatattttaatatttaaatttaaattaaagttcattatagaaaatacatttagtattttaatttctgaaaaatattattaagtaaggttttttcaaaaaaattataaaaatacagttttacggaattttaaatat

SEQ ID NO: 143917 - DNA, 559 bp, Cannabis sativa
ttttttgagaaaaataaaataactcaagtttgtttccgtaaaattaatttttgtaaaaataaaatttttaataaattttgttaatatctaaaatgaattttttaataaaaaaaataaatattttttaaatcgcttaattagtttaaaaattttaatttcttttttatttttcttaatcattcaaaatattttttttaagatcttaattaatttttttagatttattaaaaaaaatattaattttttttcattttaattttgtgggggtacattttgatagttgttaaagtttaagagacaaagttgttaatttacaaagacacatcagcatttaaacgaaataagggatgaaacctaacataaggactaaacttctgtaaatgtaaaagttcaaggattcttaacaagccatatatttaaaagagaaaaatcaataattgtcaaaagtttccgagaagtaaaattactaattattcttaattttatgttaaacttaggggtgttcataaaatagccgatgcaatctaatccgcatgatccaatccgcaaagtgcgaata

SEQ ID NO: 143918 - DNA, 577 bp, Cannabis sativa
aataaacaacttagaaattctcattcaatttctctttctctcttcatctttttcttctttcttctcatctactttatattatattatattattttataacatatacatgtatttttttattaatgaaaatatagtctttaattatagagataaaaataaaaaatagaagaaggaaaataaaattatatgagaacaaattataataataattatataaattttataggaaaaaaatgaaatatgcgatgatgatcacaagtataaaaaattaaaattttatttatgaaagggatattaacaatattactacttaaaatttaaaattagtaacacttaactacataaattaattttttaatagtaaaatctttcaaacctcacttcgattagttatttatcctttctatccaaaagactctgttataagtgctacggtggcatgtcacagtgtacacgtggtaaatgttagtatattgacaacaaaattacttgaactctatgattagtgaaacttaaccacattgttgctcctaaattcgcccaatatacgtggaccagtcaagaggggacacgtgga

SEQ ID NO: 143919 - DNA, 545 bp, Cannabis sativa
  modified_base (67)..(68): a, c, t, g, unknown or other
  modified_base (266)..(275): a, c, t, g, unknown or other
  modified_base (320)..(324): a, c, t, g, unknown or other
tgatcttaccgttgtatctttctaagtaaatatcactggttgaacttagatcaaatgatcttaatcnngatatggttaggttcaatcttaagcatgttatttatgttcttagagttttccgttaaagcctaccaatggttttgggtaacacatacatcttttgaacatgatagtacaattgagtgggaacactaaccatagatacggaatctatatcttcaatctagacatagaagtgaaatgatgatttccttcaagcttggctnnnnnnnnnnaaatggaagagctcttatttcaacaattatattagtttactgaannnnnatttatagtaagctaagtgttttaaggataaaataccttgaggggtggaacggtaaatttgtccctacttaatgtaaatcatctttagaggatctttgtttatttggattagaacgatgtataattcataacgtattcataccttggaatatatagagcgttctacataattaagagtgcaattctgaacttatagtggagcaaggaggaattaataagtt

SEQ ID NO: 143920 - DNA, 970 bp, Cannabis sativa
  modified_base (926)..(931): a, c, t, g, unknown or other
ggctgctgcaagagtaagaaatctcgatgatagtatacagcttactgcccttcaggcggggatcactactaatctaaccaccactgggggaaaattatgggacgacttacatggtcctccagtgaagaatatcactgagttcaacaagagggcccaggtgtttgttcgaaaggaggaagctcggaaatagaggaacttgttaaaaaatggttcgagaagcaaacccaacaatgtttcaacaagcactgtctcaactagagttgataattcatgggcctttggctcaaagaggaaagacgactctaaggcgtcgtccaaagacaagaagaaaaataagaagcacgaaaagtacatgccagtttatactatttataccgagcttaatgaaacccgagaaaatatttaccttgtgcatgtgcacaaggttgccttcagtaaacccgagcccatgaggcacgtgaggcataaaagagatccaaccaggtactgcaagtaccataaagacattgggcacacaacagacgagggccgtcaattgaaagatgagatagaaagtctcatcgcgcggggccacttcaagcaatatgtgaagagacagggcaatgaacataaccagcccaatctgcccaacaacccaagcaaccagggattacaacctccttctattgaaggaggggacatcctggttatctcgggagggccgcatattgtaagagagagcaacaatgcccaaaagagctatgtgaaggaaataaaaaatgagcagtcagtatttgctccaaaaccttccaagaaggtaaaaactgaagaacctccacatattttcggaggaagatgagaagaacgtgaggtaccctcacgccaatccgttggtcattactatccaactcgccaataaaaggataaagagggtgttgatagataannnnnnttcagtgaacatcctttacagggaaacactgaagaagat

SEQ ID NO: 143921 - DNA, 939 bp, Cannabis sativa
agaggcgcaacaaaatgtttgaaacatgttggcgtagtacaagattgaggggatagtccatactgtatgcttggtactctaggccaagttttcctgagtgatcgtaagccgcaggaggcgcttttgttgaaaaagaagcttgttggcaagggtgtggaagtagtgcagggactgtcagattcttgttagtcacgacaaaagtcaagagttgatgactgagatggttcagattgggatacacatggaatgcttcaattgctacatgggtgggtcaagaggaacgcacatggagatcaagggggtggaggccgcaatcttcagaggatggttgtacttggaggtgttcgcatgcgagttttatttgacccatatggaaaagcagaggtagttgagtggaatatgttggcttgttaaagcgtcagagggcgtaagtcacacaaaggcatcgatagagatgcggagttatggaatgaatgcatcaaagaagccagcagggctgagaagatcgagcgcaagcgttgagatggcgctagagtttgtatggaggccagagggtcgtgcctgtgagacttaggagtcatgtaagcctgtgaaggtcgataagggtgttaggtttgcatgaaggccagagggctacatcattggaacttagtacattgtgggagccagaaggggtgtgatgcaagtgtgaatcaattggatggttgagtggttagtgcatgcatgtagaaatcaacaggggtgctatttgagatagttaactcgagagtcacatcccgcgggatgcacttttagatgacatggtgtgcatgaagagttggggcagttaggcattcacatgggggcatgttatcaaggacgccaacagatgaagtgggggagagaccttcacggttcactcaacagactagttattcattacaagcatcgagatgagta

SEQ ID NO: 143922 - DNA, 719 bp, Cannabis sativa
gtaagggcccaatggagcttgaagcggggacattacagcatgactttttcttatggcgactttgtctcatttaggtttttatggttaagatcatagggcaattaaagttgacctcgattttagtaatagctggtgtcaagcgttttaagttgcgtttggaaaattatggtgcaattgaaagtaattacacaatttgatatgtttgtttgactgtgtacgagaaatttgtagccaaacctctttaagtttcaattatatttcagtgttaaatgccaactaagatgccatgtgggattgctattatgtacatttatttttaattgcttccttataagttattttataatacagtttaattatttttatttattgaataacaaaataacttttagtaaaccatgaaatgtggttggtatattcaattttttagtaaagtttgtttttattttttaattttaatgtaactcatagatattatttggtttccttacaagttattttatgaactattaaaattattatataaaataagattatttagaatatatattgtaaaatctaatgatagataagaaaatgggccaagatgcaaaatgatcctaaatctaacaattaagttaataaatgtccatttttataaaaaaattaagaaaatatccattctgttaaaagtttgatgatgaaattacagttataaccttgaataattaagtgtttgg

SEQ ID NO: 143923 - DNA, 767 bp, Cannabis sativa
acacaatcacagaaagtgagtaatttacataaaatagcataataaacatatatgatactaaatatatttccaaaatatgcatttcataaatattaagtaaatctcatggataaacactaattaaacaataatccataacattaatcttaggcggtctttacataagctcaacattggtagattacaatcttcatccaaaactctttcttaagagttacagtttacagtgcaggaaaacattgggttcagcttgtttttaaaatttagaggataacggatttggagtgattaacttcaatatgattacgttatgtaaaaaaagttacaatcagtggggtccagtccagtccaataggagtttattggttacaaggagtacacatgattcactatgcccctttaatccctctgccaatggccctagcaaaattaaaaaccagtttaaagaatggttcaaaccagttcgaatatgtgagcaattagctcacaatcttccctccataaagtggcaaaaacaccctagcattttaccccactttcagcaaaagacaattatgctaagattccttacagaacccatgtgcaagtgtaccccacgagcacgacaacttgctaagattccctaaattttttaacttcattaaatagcaactaatagaccataccttcttttattcttgatcaactaacccaccaccaaccaaaaatatcatataaaaggggtcgttattctctaagaaaaacctagaaatcaaaagtaggaggag

SEQ ID NO: 143924 - DNA, 594 bp, Cannabis sativa
accttaggtattttcaccgccaatttttgaggttgaggactaatcggcatcaacctcaagtttttggggacttttgccgcaattatccctaaaaagaatatgaatgagttgaaattctataagctaatctagttgggttggattgataaaatagccttaacctgcccaacccaacctatgtgcagccctaaaggacatctttgataaagataacttaattatatatcggttcttgttagatataatctatatgatatacaacacattcacttagatgtcatactacatcagcaatctgaatcgagattgcttgtaccgaataacgggcataagtgaaccgtactagcaactccgtacaatagaagtcataacctcatgcatgataaggaactttgtggtatttatatataaattattcaatattaaatataaataatttaatatgtaagtgcatatgaaaatgttcaactcttatttataaacataaatcctaggctaactagtaattttccctcccgaactttgacatgtactaaatcgtgccccctaaacttttttggctgttaaaaatcccccctgaactattgagattgt

SEQ ID NO: 143925 - DNA, 1214 bp, Cannabis sativa
gtaaaataaattccaacagtatactcccactaagcgacttctggaaagatattagaaggatattaaccaacaacatgaacgagtttctcgatagagcagacaactttatcaaacttgaagaagccatacgataggcctaggcagggcatgttaatagtaggcagtcatgaggcacccaacagcctcatgacccactagggacacaggcaggcaataacaatgttgcccagacctctagtggtaaaaacactagaaacaagcgcagcaccaacaactctgggaggaacagtggcagaaaggggacgtttagcacttatcccacaccacagaagaacaaggaggagaagcacacttgcttcaccctcctaacaaagaagaagcctgagaccatcttgatgatggccactcagggaacaatcccataccgaaagccctttccaattagaagggaaatgggcaagggggacatggaaaagttttggtgataccacaacgccttcaaccatgacactaatgagtgtcaaaatcagaagagggagattatgtacataaggcgtaacaatccccacttgcgtcattatgtgcgagaccaccagacccaggcgcaaagaggtcaaaatggagatccgatgccaccacctgtggcagaacatctacgggtcataataggcagaccccacatttctggtgaaaccagcaaaactagggagcgctatgctcggacactccgtcatgagcccaaaggcaaagtcctaactgtcaaagactggctggagctctaagcaacagaagcaagcctatagagcccacgatctcctttggtgaagaagatgtagcactagttggtttctcgtataatgatcccccggtcattattgtgcaaatcgggaatatgactgtggctagatgtatggtggacaacggagcctcctccaacattcttttcaaatcaacatatgaaaagatgaggctccaactcactgacatggaaccttgcaaccaagtcatgtatcacttttttggccaaggcatcgcacatgtcgggtatatcagtttacccctcatagttgaagaaaatccaaccacaagaacattgatggtgcagttcatcgtgattgacattccctcagcttttaatgacatgattggctgaccgaacctcaatgacctgaaggtggtgacgtatattttgttggaatatattctaccaggat

SEQ ID NO: 143926 - DNA, 863 bp, Cannabis sativa
aataccgaaattcgaaaaatagtagcataaatcttcatttatggtttaatttttattctgatgtgtgtgttaaattctgagttcaaattttattgtgagtgtttttagttttagtgttttactggggttctaatgtttgagtttgtatttataaaatctatttatttatttattttatagattttgagaacttgaaatttgactttgtttccattgattatgggagttaaagtttacctttttatttcattaattaaaaaatattagtagaaagtttatggaatgagaattttgaatatatgaaattagaattagaaaatagcatttgaatcgagaatcaaaatttattgttaatctcctaacaaaaaaaagtttattattaatctgtcaagataatatggcttaaagaaaatggaaaaattaatttttctttcatttaatatgtatatgatatttttttttgtgaataatatgaatttatttttattaatttttgtttttttaaaattattttttctaaaagaattatcagtttggctaattagaaatttgaggatatcaatatgaactacaataatgacatcaactttatatgatttgaatataaaaataatagattatgaaaaaatttgattcataatctcacatttttcttctacataatctcataaaatttgattcataatctcacattcttttttttgttcaattcataaaatttgattcattatagtttcttttataaaaaaaaaaaaaaacgcttttcttatattctgcaaagtaaaaaaaaaaaacttaacacgtatatagttatgaatacatatataaataattgaatgattatttaatttaatattattaat

SEQ ID NO: 143927 - DNA, 1050 bp, Cannabis sativa
  modified_base (555)..(565): a, c, t, g, unknown or other
aataccctaagtttaagtcaaagggcattttagtcttttaaatgggtagtgtggtggctgcctagggaggtgacatgtggcctcctttattcagcaaggaattaattagagaaaacccattttctcatttgaaggaaaaatcaaaaaaattagaaaattcattctcttgaactctctctctttctttctttcggctgggaccaaaactagaggagaatcacctcaagtcaaccttttttctgggatttcagcaagggattcaaggaggtttaagctaaggtaaccctagttcttctctagttgtgttatctcaaagttttcattggtttcaagttgtgattttgctagtaaggggctgttaggtttaggtttgcttagggttcgaattctaggcttaatttgagttgattaagggtcctagcagctagttttagtgtgtggtgttagttttatgcaagtttgagttttgaactcaaagctttgatcattaatggcaagttgagtttctttgagttttcctgtgaaatacttgttggaatatattgtgtatacccnnnnnnnnnnntctggaaggtttggtggcatttggtggagaattgagcaagaaatgaaaattttggtgtggactggtgcaaatcgggtaaccggttttggcaggatccccgaatgctttgttttctcaattttcgtccatttcagtgccgtggttgggtgcttccctattttcagagtttgtgtaatccctttagcaacatatggtttctcgttgctacactaagtactagttcgtgcattgattcctcgcctaagaccttacagtcagcgggttgcaaatatactctagtacttacgcaattaatgagttattcagtaaaagattcaacattccatttatcttgacacatgtcctccaaccgattttcgggtataacacaaattaattttggatcaacttaaattagaatatttttttttttaaaattaataattaagtagatttttctaggaaattagttattcagatattctttaaaaatatatttaagttaa

SEQ ID NO: 143928 - DNA, 632 bp, Cannabis sativa
atgctcgggccacactagaccaaagcgggttggggtctaccagggttggggtctaccaatgggttggggtctaccaatgttgaaacttttgtaactctattttgccgcttagatcggctaaggagaaaagagttgtaatattttgtaaaataatttttgggatcccgaaacatgtaacttttgtttgtaaggttaaaattattacaggtttattttcattctgtttttgtttaaagtttaatttccgcgcttattttaaaaccaatcccgtttaggggattagggtttcttaatcatattgggtagcgtgcctaaatcttagggcgttacaatttggtattagagcccaaggtttttaaacttcctgtagaccggccacatgtacaatcatcgtcagagataagcttgactcatggtgcagtaatatgaaattatttagtcgaatgactccgaagttttaatgcttattgattcatttgttaatttagttttttttcgctgatttacattcacatttttccttattttccaaatgtactttcaaagactccaattcatttctcattcgctcgattcgtatactccattccatttcggattccatcatgaatttctataaaaaaaaataaaaa

SEQ ID NO: 143929 - DNA, 673 bp, Cannabis sativa
ccatgagatggcggtcttctctagcaatgtacatattgaccccaccagtctgcatgttgagttgccagaagttgttttagactggctgtgtttgctgtattttgaattgttgttgtatatcatcttttggataaatcttttataatagggatccccgaaacacctttttactgccgttataatgtccgtttttagtgttttattttgattaagtttttattatcctcatagtttttaacaattaattaatatattagtattaaactagtttataaaataacacacgtggcgtccctatagaatagggcgttacactccatcagcttataatgcgatccttggccgaccatggatccattccatgaaagttgtgccatccacataccaccaagtgatcaggttcccaaccaagtggggagtgaaagaaatatggggagcccaatactcactaaaagagaaattgacaacattatagcaactacaacagtctagttcgacctttgcactgcatgaaccttgtatggaagacctagatgatgtgtgcattagcaaggagttcccataccataaagtccagattaaaacaaagcttacacctgagtttcgagctaggctgattgaattcctaatcaaacgccatcactgctttgcgtggtcccatgaggacatgaca

SEQ ID NO: 143930 - DNA, 517 bp, Cannabis sativa
ttaaattagttttagatattagtaggctttaaatttgaaaaaataaattactcaacaaacttgctattttggttatttttaaaatttgattattttctatttgatttattaattttatttataagatcacgtatttacaaatatttaattaataaaatatgaaatgatcttattttgacatcaaaaattaataaaatttaaagataatttagacaattttaaattgctaattatgcatatcagttttttaaaaatttgttatttttaaacatatttttattaatttaaattataagattagataaatgttaattatttgatattttatcttattaagatatttatttttattaaaatttatattttttgttaaaataacatacaattttttgaatagttaattatttttgtttgaattgatattttagggttttccaaccttaaatttttgggaaaaaaacaaaaaaatacaaaaaaggaaaaaaaattacaaaaatactttgggccggcccattaa

SEQ ID NO: 143931 - DNA, 1381 bp, Cannabis sativa
ggtaatcaagcgttgttttaactctataaaacttttctcacactgatcaatccaaacaaacgtcaagttcttttgggtcagctccattaagggtacaacaatctttgaaaaaccctcaacgaaccgaggataatacccagctaaacccaaaaagcttctagctttagtagcagatttcggtgttggccaatctcgaacaacttcaagcttggccagatctaccatgatcccatctttatctactatgtgccctaagaaagagacacgagataaccaaaattcacacttttgaatttagcatacaccttgtggtctcgtaaccgctgcaatactgatctgagatgcaacttatgttcctcgtctaattcagaataaaccaatatgttatcaataattacgatcacgcatctatctaggtaatccttgaacacccgattcataagatccatactaaagatgatacacagccttggcccgacatttaccctgatggtcattcttgcatttcgaacattctagatatgacttaaaagaggatccgtgaccttgacgaccacctctaattccctgaaactttctaatactccctgatgttccggaagcttctgccttccatttatgatcagggttaccaccgtcggtccccttactgaaattaccacccacaggaggattcgatgccatggcgacatcctttacaatctgctcctttattacatgttgctatgcctcctatacaattaagtctagtcctaccactatcttgtacaaagtgtcatgagtagtggtaatcttcaactcccaactgattgtggcgttgagttctctaacatacttctgtttcctggtgaaagtaggcaccaaatcaccagcaaaattcggatagtcgatcaaactccagagtgtattcagccacgtacattttcccctgagttagcttcacacaatcttccatgtgtgaagtcctcacaacaatgtcataaaaattttcttcaaacagactcttaaactcatcccaagtcattccactgacatctcgagtctgtctcacaatatcccaccaaatgcgggtatgatcttgtaacatgaaagttggacaattaactctctcgattcccgtcaccccatattatcaaggatacgggtgattgtactcatccactgctgagctttgattatattagtacctcccagaaaagttgaaggttgcagcttcacaaaccgttcaaacacggagtctctatgtggcatcatgaacccctagttacttaccactggcacaagtggtggtggtaacacttgttcaatagattctcacatactgcctaaaatggaaagcggtaaataaatgatcatacaagcagtaaagcatttactctca

SEQ ID NO: 143932 - DNA, 594 bp, Cannabis sativa
  modified_base (55)..(59): a, c, t, g, unknown or other
  modified_base (557)..(568): a, c, t, g, unknown or other
taagaaaaggaatgttcttccttgttcttgagtcaatacaaataacgaggattannnnnttaccgaactgctcggggctaaacctctataaaattcttgtgtcgtattattgcgttattatatattcattatgacatatcgtttatctcttataaaaaagactcattgtcgtttgctaaaagcgaagtcaacacactgattttaagcttttgatctcttagaatggtgctgacccaagttttttgaaaattcttcaaagaaattgagagagaaaaagttctttgctctagtttttcaagaatgagaatgactaaagtgattaattagggttttcaatcctatttataagcagttcgaaagggagaagtaatcatttaaaattttaaatatctcagattccccccaaaagtgtacgttatgtactcattactgtctgaaaaactatcttcacatgcaaaccttaagacgcgatgtggtaaaactatcaatcaacattaatgagctgaaattgaagagaccctttgtaagagtcacatgttgaaaatattttaccaggnnnnnnnnnnnntaccatgtatgtttcattaacatcct

SEQ ID NO: 143933 - DNA, 1502 bp, Cannabis sativa
gccaacatgtcagaacacacctgaaaaaggacaaaataagtatactatataataatatagtccataagcacgtaaataacctgaaaattaattgagtaatgtgatatgtttttaagacaattttgcccttgaatgcttatgtgtgttatatggcgctaggggcattttggtctttttgaccatttgtttattttcaactaaatggaatttcaagtaattgaaactcctttgtttcttagcccccaaaccgacccccctctctctctctttattcatcttttcaatttgtgagtttgttgagaaaaagcttgggttcaagcttgatttgtggccatctttggagcttgtgtgatttcgagatcttgaggtagtttctatctctttttgtttttaattgttgctaaagttgaagttaatttaagcatgattttgttgtagagatccttgtgatgcatgtgagttggaattagtttaatcttaatgctctatgcttgtttgtgttagaagattggagtagaatgctttgtgttgtgtttttgagataattttgaggttaggttggtgctttaatctttttatgcagctctgattttgttgttgtacgagatcagagaatgttggttaagtatttaagctcttaaagttgggattttggtaaatcttgctctagtttggagcctaagttgtatattgtttgaatctgaatttagatgcatttgagctgtgatttttgagctttaatatgtgtttttgccctctattatgttgggtattattgtggaatttaatatggggtttgagtatgtttttggcttagtttgggtgtgtttgagcatgtaattcgaagctggaaattgggatttaactgggtttgaaacccaggggccgcagcccaactctctgggcaccgcggctcgcctatggggaaatcctgggttttaaacctaggtgtcgcggccccatgtggggagtgccgcggcgcgcccttcgtttttaggcagattcgaaggcgttattcgaatccttgtaactttgtgatccggactccattttaggagttctatatatcgttggaaagctcgttctgagctctatgtcttaatctgtattttgaataccaattttataatatgtgaaagtggatttagggattaaccctatacctgtgaatcccaaaaattatgactaggattgacacttggtcaggagcacccgaggatctggaatctccatgtttgcggaacatcatgtaagacagtagttagcacgtagagttatgcgcggtggcacttatattgaaaatgatatatgtgagtaattaggaactgggattagggttattaccctaacatgagcagtttaatggcctagggttttaccatagtgattattaatgtgtaaatactataacatgttaaatatatgtgtatattgagatttagggttatgcgttcaaggtataatcgggttggactcggtaaccgagatgaactattctaagg

SEQ ID NO: 143934 - DNA, 786 bp, Cannabis sativa
atggacattgggaggtgtttctttgagaatgttttgcctttttacttgggtaagagtccttttatcaatatatgtcgctcaattggagattatgggagggaattgaaaactcttagtatgtatgagcttaggacatggatatttaaggaggagatgaatactacagatgctgtagttgatgatattaagcagttatggccactaacgagagtttcaataatgtctgatggctggtcagacattggaaatcggggcataatcaatattttagtcaataatcccaagggcactgtatttcttaaaagtattgatggttcttcatttagtaaagatgcaccgaggttatttaaaatgttggatgatgtcattggagagcatttagttgtttaagtggtcaatgataatgctagtgcctacaaagtggcaggcacattgttaatggagaaaagaaagcatctattggatgtgcagtatattgtcttgatttgatgcttgaaaaaattggtgaattgctacaacaccaaagtgccttgtccaaaggaaaaaaattgagcaagttccttcacaatcattaatggatgttaaacttgacaaggaagtattgcaaaagagatattataagacctactgccactagatttgcaactgcatttcttacattacaaagcatatatcaagtaaggcaacctttggaagctatgtttacttctaaagagtgggcaacttgtccttgggcatttaaagctgatggaaaggaggcaagatacacggttttgaaagacacat

SEQ ID NO: 143935 - DNA, 934 bp, Cannabis sativa
  modified_base (579)..(584): a, c, t, g, unknown or other
  modified_base (702)..(703): a, c, t, g, unknown or other
ttttgttgtttttgtgtatttgtgaaattatccctttttaaggcttttttttttatgtatatactaaaatgtcaaaattattacacaatacattagacagaccctataaatatttatacagcaacaaaaatttataaaaatgcattttgctctattaatttagcctcattaaccgccctcttcaacaacaacaacttccagcaaccgaacacaaaaggctcgaaaattgatgaagaagaaaagaagggagggaatttaaaaaaaataaatagtaaagaaaggaaggaggctctctttttctagttttttctgaaaaagaataaaaactaggttatatgagatggatgagaatatgaaagccatcttatcccttttatagtatttcatctagggtaaggatttaaattatatggaataaaaaaaataaaataatagcaaaataaacactaagtggccggccataagatgtggaccccactagttataattttgtcatattcaacaatttatttttctttaacctatgacatattttctaattttaatcctataaatatcaaaaatatttatttaataatnnnnnntaattattaaataaaattatcattcatcttatttattaattagaccttacaaagtctcttaattaacaaataaaccctaaaatctattttctttacaattaagctcttgcttagtgannattcataaataagacgtagtctaattttaaaattataattgaataattagcaccaattaactgagtctacaagcagtattatctcaactagtgtggggccatgagcctatataatcaagcttccaataagcagtttcagactttaccacgtaaattctctaacttattaagtcctcctaattccactataaattcggaattgcactcgtaattatatagaacactctatat

SEQ ID NO: 143936 - DNA, 991 bp, Cannabis sativa
gagggaatatccctatttttgtggactggtgggtctgtcccacaatttgctcagcattataaagttgtttgcacaagttggccagccatccctatttttagggccagcccatgaaggtcataggccggggccaggctctaaaaatagggttgggcagccaacttatgcaaacaactctgaacagctgagtaaattgtgggacaagcctaacaacccacgaaaatagagatattcccttaagatattagtcttatattctagggatttaattttcattttttgtaaattaaataacagataaaaatatgttaatatcattaatattttaacctattgcccttgatttttcccaatatacgcggatatgaatgaggctgacacgtggatctgtaagaaccaacacttatgaaaccgactaagtcttaggcgaaagaggaatactcaggaaggtgtctcccggaggagagcataagaagtatttttactctccgggaggccagaggtatgctaaggcagttccgggaggtgcagagatctcttcaacagtcacttcgcatttaatgccgcatgggggaagacgtattgaaatctccataaacgacatgacagatggcgtatccccccttttttcagctattacactataatcaataaggctattgacggctaatttatgagaaatcacatcagtcaaaagggaataaaagattatatccacctaactcctaagatacctatggtataggtcatgtatttcctattttgtatctgttgggaatacatgcccctatgaagctaacctagaaagacaagtgatccattcctagggatcaccccagataaacactataaataccccacaaacagactgaaaaagggtcgaacattcttggtttaaaggaattaaagagagaaaataggagaaaaatccaccaagaacattctctgtaataaatactctcattaataaaaaagactcgtggactaaggc

SEQ ID NO: 143937 - DNA, 530 bp, Cannabis sativa
ttttttaaaaaaaaaatcatgtaactcgttcttcatcaactccttcccctgttcaaaagaaaagttctaaaatggggttgaaatatttaactaatagaaacaagggtaaacgacctgttgttgaggaagatgactctgattttgctcctccattgtcgaaacgtgggcgagctcctccaaagaagaaatcaaaggtgactgcccaggaaaaaattcctcaagatgatgctcaaaaaaatgatcaagatggtgctggtcttcgatcttaggtttgttttcagtttctttttggtttccttccttttttgaaattttttcgtatttgacatttgtgcgttttgtgtttatcgatttcactattttaggtttttcattttagcaattcttttggttttgtttggttttttaggggttctgtttttttagtttaatttatttgttctttttatgggtttttcatttttcgtttgtttagtcttaatttctgtttcatattgttgtttttctttctgtttttgtttttccagatg

SEQ ID NO: 143938 - DNA, 587 bp, Cannabis sativa
cggggtggggcaagcttatgaaaacgctcccaaataaatagttggaggaaagaagcatccacgacactaattgtcttcatacttccggaatttatatcacgaagtatggagtctatgttatgatacaaagttcctaggtaaagagctcctattggaagttgcttcccacaggcaagtttacatgctaaagggtataaagcacgacgtaccaacctggattgttttgagggaaaaacgtacctacttaaccataaagtgatacaagcagccaattccacaagactatagccgttacctcgaaaatgggttatccattcgtgcatatcacacgtggcatcatttttttttaaatcattcgatgcttccgtcaaggctgacaacaggtctctctcatcctttgacagaggttcaattgcagaagtaataccacatatagacaataaaaggagagcatagacatcttctaatgttacagaaaactcacccaaattcaccaaaaatatatgagtcgtaggacaccagcaactcactaattggttcaaaatagtcacatcacgaaatatctcaataccagagcatacccacat

SEQ ID NO: 143939 - DNA, 872 bp, Cannabis sativa
  modified_base (51)..(69): a, c, t, g, unknown or other
ttaactgccatggtggaatgtctacgtgtacacagtgtacacgtgacacannnnnnnnnnnnnnnnnnnataaatatttaaaaaataaaaaattaataattttaaaaatgaaaaatagaaaaaataaaaaatttctttttctttaaaaattaaaaaaacaatttttaaaaaataaaaatttaaaaaaaaccctaattccctaattccttgacgctatctttttctctgctaaaaaaaatcctaacctaaacctaaaacacatttctttcaccctctctctcttaccgaaccttagccctgaaaccccttctgctcctctccaaacctggtaccccgctgcagaccgcctcataacagtcggagatgtccacgacgaccttgaaaagaccaaacaatcgctgagaataacgcacctctctctccctctgttcattatcgcacagccacccatccaaacactacccaaaacccaatcggacccaacaataatcaaaatccaaccaaacactacccacaataatcaaccccaaaaaccagtaagcgaagcctcgcccctccaatcggaccaccaatcgcaccaacaaatccctccaaacagaccacaagcccacctctattcacacctccaatcacacctccgttcgcacctccgctcataccgctactcgcaccaccgctcgcaccactgatcgcatcactacagcacctccgttcgcaccgtctatcaaagagagagacaacgtggggagagagaaagagcatgagagatccaaatctgagcagagaaggattgggattcatgggtatcgttgttttcgccattgttagggttttggaaggtttagcagagaaaaagatagaagaagaagaag

SEQ ID NO: 143940 - DNA, 697 bp, Cannabis sativa
  modified_base (526)..(527): a, c, t, g, unknown or other
ggctgtcaaaaagtgcctttctaggggccaacattctctccaaaaaagcctcacttcccatgtaaggcagattaggtctagggttgcgcaactagatcttataagtgagttcagaagagaagtcggcgtactcctccctaatggcttgttggccatcaagagcctcctacagcttctgcttgtagtcatcaagatcagactgcagccttgagatgaaggtggtttgtgtggtgttctatgtctctccgcgaagagggcctccagctcagatatggctttgtcctttacaacaaggaagcctcaaaggtcttcactcactcctgaaaagaagttgaggacccccgagagccatcacgagatgagctcagtttaatcaaggcctacaaacaaaacaacattagtgtaaaaactgttgggttttgtgccgtaaataaaacccatttaaatataatctgattgactaattaataaagaccagaaatcacattttatgttgcatggttcacatgattataaattctattanntccagaacatatgtatttgttcgtgattatggtgttgtcagcacagtggaatataattatgattatatgttcaaaaagattaattccctgatttgtcagttcactggatttagacttgcatgataatcatctattggtatacctacaccttggataagtggtatgtcctt

SEQ ID NO: 143941 - DNA, 1233 bp, Cannabis sativa
attcccattcccattcccattcaaattcccattcccattccctagcccattcatatttgtattcccattcccattcctattctcattcctattcacattcccattcccattcccattctcattcctattcacattcccattcccattcccattcccattcccattcaaattcccattccccgacccattcccattccctgacccattcccattcccgtttgcattcgtattcccattcccattccccggcccattcccattcctattcccattcccattcctatacccattcccattctgattccccagccgattcccattgccattgccattcccattcccattcccattccccgacccattcccatttcaatctcgttcccattcccattcctggcccattcccattcctattcccattcccaatccccattctcattcccattccccaacccatgcccattgccattctaattctcattcctacttccattcccaatctccattcccattccccgacccatgcccattgccattccaattcccattccccagcctattcccataacgattcccaaaaccctaaaaccccaaatgccaaaactgcaaaaacccaaaaccccaaaccccaaaacccaaaacccaaatcccataccctaacccctaaaccctaaaacccctaaaccctaaaaccttaaaactcgaaaccccaaaacgccaaacatcaaaccctaaaccccaaaccctaatcccaaaaaacagctatcctaaaaaccccaaaccctaaaaccccaaacccaaaaaccccaaaccctaaaatccaaacacaaaaccccagacttaaaacgtcaaaccccaaatactaggtccaagatcctaaactctagaccctagtcataaaaccccaaaccctaaacctcaaagccaaaaaccccaaaagccaatgacccttaacccaaaaccccaaacccctaatcccaaaccccatacctcgaaccccgaaaccctaaatcccaaacctaaaaacccaaaaccccaaactcaaaaccccaaacacctaatgtaaaacaacttaaccccaaacccaaaaaccccaaaccacaaaccccaaatcgtaaatctaaaaccctcaaacgtcaaacccaaaccccaaatcgtaaaaccccaaacccaaaccccaatagaaaagtgatagacaatggtcttggcttcgtgttggattttatgccctaa

SEQ ID NO: 143942 - DNA, 656 bp, Cannabis sativa
aaaagtaatgttattgggttgctttcaaaaaaaaaaaagtaatgtcattggttgttggtaacaaaaaataatattttattagtaaaatataaatttaatttaatattacttttaatgttatttgaaagaaataatcaattcgtcacatcattcctattttttttttttatttcttatgctatgaaaaataagtagtttttttttttaattaatatcacatttatatttttaatttgaggagagagaaaaaaaatgaacttatgaactcaactagagtagttattggataattttggaagtcttatgtcacgttgttgagctttcagcagcgttgtttgtcattatgttgtacctatctcctggacaataaggatgagcccacttttctaatcctatactctcaacataaacaacgatgacaagatccatctatcgaagcctgtaaatgtctatcacattctctcttcgaccattcgtaagcggcgagccttatttttgtgttacatacataagtcttgaacttgtgaatgacattcatagaaatatgtttgtagcatgcatagtggcatgcttcggaaaataacctcgatagcatattcgatactttgatgcctatctgatacaaacactaagttttcaacctccccaatcgcttc

SEQ ID NO: 143943 - DNA, 541 bp, Cannabis sativa
gtaaaataaattccaacaatgggctatatccaaaggatttcattcctaagccagtgagggagaggaagaggaaatctggtgttggacgggccgaacgatctcatcaggagaatgaactcattcaactgaagcgcgaagctaagttgaagggaggtgcaaggtccaagcaatatgctcaggagcccttaaatcctaaagatgaggctgaggaagagcaggtgactccgctcaaaagaaggaagaaatttctggcccagcccaggcctgttgaacatgaaattcgcattagggaacccatctctcctgctcggccgtctcctcccgtgcttggaaaagggaaagctattatgtccgaaataagaggcatgtcaggtgcaatggacttttgaggcctgctcaagcaatcatcttgcatattactctgtcctgcttttaagcttcttgactattatgcttttatgtttatgatgtctgattcctctaaccatgttgttttttgttccgtgcagacatgtcttagaagatgcttgatgctctgaag

SEQ ID NO: 143944 - DNA, 612 bp, Cannabis sativa
aattaaatataataaaaaatgagacattaaacttagtttagatgaatgatacaagtttttttaaataaaaatactatattattttttttaaacccaaacataaataaccattttagaaaaaattctaacaaaaacatatttgtataactagttaaaaaaataattataattgtgcaggcttgaatataataattagatttagttttaaatattgtgtttataattttttttagctaattatttgagacgatattcaaaattgagaaaaacaaaactaactaaaatttaaattagcacatcataagtttgaatttattttagtttttcaataatgtatactaacagattataataatctgagtatttcatctatatataagtcattttgactaaaaatatattttttatttacatatttgtaaattatatttaattttttttttttgagaactatatttacaaaattctgtacaatatttttctaattaattattttagggcgattctataatgcactcccttaaaagggatgtactgatacacccttgacttatgtacgttataactatttaagataacctacaaaattttgagaaattctgaataatttac

SEQ ID NO: 143945 - DNA, 553 bp, Cannabis sativa
ttcggtttttattttgccattgcacttcattacgagtattccaaatactccaacacaacatagcagcttcactcgccacaacctcactgccggtagcaaggataccaaaaaaccaatcacagaaatcggcatgaacaccagcatccgactggtttatggccgataatgcccagcaggagcgtgagaaagagcagtccacctagacatgaaaaattgtctccacatgcatattacacaaaggacataaaagatcaacattaacatgttttgattgaagttgtacctttgttgggaggcaaccagagcaagccttccaaagaaagtggtgaactttagagggaacgggcagcttccaaagtttcttccaaaagttgtcgtcttgcatgaacaaccaatttcctctcgatgattggagaaacttataagaacttttgactgagtaaatacccgaagattccatactccaataccaaccatctatagcccgtgagtgactaagttgaatacttctaattaagttgatatcacgctcttcaaacatatcattaagaag

SEQ ID NO: 143946 - DNA, 528 bp, Cannabis sativa
gtgtgttctgacaggttggcgcagtatagtcacaaccgagaatttcgagccgaaccgggttcgggcctgaaatgcaaatgggattgatttagctggcatttaatttgttaagtgataatctaaaattatttggaaatatttgagtatgaagtgactaaattgcccttgtgtgtaaaagagtatgttttttggccctagggggcaaagtggtcatttgaccatatttgagttacatctaataaaagttgatttttgagggtattagataaattttctgaaattgtctccctctcacccgatccctctttctctctcaaaaccctctcattttaaaaatttattttgggaaggaaacttgattcttggtgtgaattgaagctagctcttgaggaattaagcttgagtgtggcttgaatttgaggtagttcttctcctcacctcctttaattgtgaatttgttgttaagtttggattgaaagcatgttttttttttaggtttgagtgttcttgattatatgatgagtgaat

SEQ ID NO: 143947 - DNA, 721 bp, Cannabis sativa
  modified_base (523)..(525): a, c, t, g, unknown or other
agggcataaaacccaacaatgttagccatacagttaaatccgttagttagttaacagaatcaattggcttgttttctcatttatggtattttcagttgtttctttcttttcatcttgtacactactaaattattttatataaataacagaatagccaactgtttagttgagcttcttttggcatttcaattctttctttcttctggtttttatctctggttttgtacgttttgcttgccaatgttcaaagtctcacagggtaattcccctaaaatttattacttatataatttactaaaaatgatttgttataatttattttttcataatttcacattaaaaaaataattttaaaaatattttaatttttgtagtatacattcttatttttttttttattttagtcttttcttttaagaagagggaataaatttgtattaaacattctttagaaatactattaaattgtgtcttttatttttttttcttttaaggattctaccaaaactagatgagatgatannnatacaaacgaatcaagtaactgatccacactatgtaataaacatgacaatgaagaaagtaacttaccgtttgaagttagggcttggggcaatgcctgtgaatttcttcttcaaaccttcgaatgaagtaaggatcgctttgagaaaatgaagtcggaggaaacttgcaggataaaggtcaaagacaaggatggcat

SEQ ID NO: 143948 - DNA, 588 bp, Cannabis sativa
ttatgagaagagaaaaaacataaaattatgttttaggagagaaggtgaataagtcattgactatgaactattagaataggatttttgaagccaaataatcactaatcatagaacaacttaccaacgaatcacctatacaactaaacatttaaagaataataataacttttgtcaaaaagaaaaaataatgataaactatttatggtagctataccgttcaaacaagcaaactttacatgactttagattaagatcttactatttatattacaaatagtgattctttaatacagaagcaccctcatttatataaccataacatttctcaatctaatataaatggtaaatcactaaaaaaataaatatcaatgttagaatttttattttattttattttattttattgatattgaggtagaggggattcgaacttgggacctcctctttgtgaaagatataaaccagttatgcctcaccgctgattttttttttttttttttttgataaaaatgttagaaatattaaactattagattttgactcaatggacaataataaaaataaatttgacttactatacttaattta

SEQ ID NO: 143949 - DNA, 500 bp, Cannabis sativa
tttcctctactccatccatgctcagacatatctctgccgtcctcaatgtctctgcagttactatacatatatatatatatttcttttaaaaaaagtaaatcagaggccattttttcagcaagagggctttgaaattggtggagaatttgtgatagcaagtcaatggcaatggacctcaaagtctttgctgtggtaggatatataagatcagaagtagcttaatgcaggtggttatggtgaagaaccaccaaatccctgacatggggttcttttggttcctttatttttttatggagataaaatattaagaaaatgtgtacaataaagaagaaagattctattttttatatagtttggtggctggttagcaagatgggagaggttgggagtggagagtcaggtttgggggtggagatggagatgggttgggggtggagatggagatgggttgggggtggagatgaagaagaacaaagaagaaaagaagagagagagagaga

SEQ ID NO: 143950 - DNA, 658 bp, Cannabis sativa
  modified_base (52)..(57): a, c, t, g, unknown or other
tatttttattcattataacactataataaaactggttctattttaattatannnnnnttgagttattttatgttatttatatttttattatgttacataatcagttatattttaattataaccagtttgagttattagtttttattcatagaaccggttttatttttagttatatctaagccattaagttctggtgactttgcaggccataatgactttttcgatgacttttccggcgacgatgacgtttccagtgacttttctgacgacttttccggtaacagtgatttttctggtaactaacttttttggcgacttttctggtgccaatgacttttccgacaaaacttattattgttttacaaatatgggatttctactttttttcaaaaatattgcataaaaaacttcatataaatgtaaaagaagaaaaaaatccataaccctgcagtgttatttatttatgccatagaaaagtaaactatcttcttaattcccatatttataaaacttcccctaaaaaaatcgtatttaaaattctgtgaaagtgtatttttataattttttatggtttttgaatatttgtaaaataatcccaaaaagaaaaaaaagctatttacaaaaatatcggaaaataaagataaattttgatatatat

SEQ ID NO: 143951 - DNA, 594 bp, Cannabis sativa
tcatgctgaagtgccatggccacgaaagcaggaagagttccattggaagagaactgagagtgaccaacaaaagtccgaggtttaaaaatgtcggccttaccccttgtgatcatggggtgagtagcctgtaaaggagcagcagcagtggtaatagcaggatgttcaagtgaggcagggatagggtcgggaagtgaaccagttggtgatcctgcaggtgttggtgaatgagagggaacaggagagccaatagcagaaagagaatcacttacagagttcactggtgaagcagggtcaggtgatgctgcaggaacactttgtgaggatgcagaagcatttggtgaagacaaagggacaataggcagagtgaaccaagactggggagtagacatggtgacatactgttccagttgcctagtattaagaaaaccagcagagaaaggaaactcaagttcgttaaaaatgacatgtctggtgatgtaaattcgaccgtgtggactgaggcacttgtagcctttgtgaacttcgctatagcctagatttacacacttaatagagtgaaactcgaacttgtggctttgatagggtcgaatgcaa

SEQ ID NO: 143952 - DNA, 692 bp, Cannabis sativa
agtcttgttctcaccccaaaaccttccagtgactaaatgttggttttggacctaaagaggatgagtgagtcaattgtaaaaaatcatgtgagacaccattctcttccatgtgaatcttcagaaagtgttgcagatcattcctggaaatcttatactctattttcaagaaaatctcatataatatatgtttcatcattattcatgtcttattattttcattgaccatttagtgtaggaacataaacttagaaataacttatatatataatttgaaaatagtatttgatctaactttttggccaatgatggatccggcaacgatgagcaacataatttgcccatttgaggtgagcacaggacggccatgacagaaaatgtggaaggggtgcggccgggactataggccaaggtattttatcgagggggttgggcgatcaggactagatgggggcgatgggagttggagtcttgacagagggggaggagagcgagaaataatttgtatttttttaaaaaaattataatttttattaaataaatataatttggatttataataagcattaatattataacagggttagtttaggaatatcaaaattttaaatgcactaagggcccgtttggtatgcaggactggattggattagacaggctaatttgtccaatccagtgtttgggcatgttagaag

SEQ ID NO: 143953 - DNA, 511 bp, Cannabis sativa
agaaccaccattacaagataaaattcagccatggagtttgaatgctagagttaaagaaaataaaagagaaaagaaagaaatgacaaacaacaataaatgagaagttttccaaaagggtagatgttgaatcttgttgttcttctcctcttttccccttcttcttcctcttctttcactctatcttttttttctatagaaaaaaatggcagaattcttctctatgtttacgtgttgccctcctttagagaacttcctaggttttgtaccatttgccccaaataaaccctacacatggcatgcacatagcctctccaagtgtttgctccagccaccactcctagaatgccatgtcatctccacaaatgccaccacttttaatgaagtgccagctcatctttttctcatgccatctcatctttttctcaagaaaataaaacaaatcagctactaacctgtttgctgcagcaaaaacttcatagaatttcaacaaaattaagaacatgactaactt

SEQ ID NO: 143954 - DNA, 760 bp, Cannabis sativa
gggcacaaaacccaacaataggtaactttcataaatctttcttgattgtctcctaatattacttgtttgattacatattagatggctcccactcaacagtaggagtctggttaaagtaatacacaagtgtacacttaacctcttactattggttctcagggaaatcttgttgtgacttattttcttagtctgaaactataagttccttctagactaagtcatcaacgtagcattctagtataaacattaatgtaaaatacttacttaagaataagtagtaatcattaaagataccacaaaacttttcattatgactagggtttttgcctgagtcattcgaatagactttgcaaaattctcctatcttatattcaaaattctaataagttatttctatccatatgaatggttagattttctttctcaatttcatttaaagttcctatcatgatcataacattgtaagctaagactagtgtcatccaaataatgatgggctagaattttaaaattctcccacttagataaggtactatgatactatgtctaagaacttcattggtatcaatttttattactatagtaaatgttaattagaagaaattacaggatcaagaataagttctaatcatttgctaatttgttaattatattatatccatgtctaatcaaactatgtgtgtcatagatagtgtggggtattgagtatagtctgttgggttttgtgccctaaataaatcccatttcaatataatcagat

SEQ ID NO: 143955 - DNA, 507 bp, Cannabis sativa
aaaaaaatattaaaaattacacccgttgcacgacatatgccaaattaaattagttaaatactccaatgctatgttatgtattaatatagtataataatttaaaaataaaacatataaatggttttatttttatttttataattatgtgaaatcaagcgtttttacttaggagtggcaaaacatgtcattgtatcgtgttcgtgttatattttatttgacatgtttttatatttcgtgtcagacctgtcgactcgtttttaactcatgtctaattttatcaacactaacttgacccataaaaaatttatttctagataatatagtaaaaattaaaaattttaaaatattttcttttagaagaaaattaaatttaaaatttttaattcttgaatcactaaatatatatttttagataggcatattatttttagggttgtacatcggttggtttgggcgatttatcctatatattttctaacccaacctaaagttcggattgctaaaatt

SEQ ID NO: 143956 - DNA, 1074 bp, Cannabis sativa
aattttaaattaagataacaagtataataaaatttaaattatgaaattatatgtgtataattttaaattgtaaaaagtttttctataaaatttttaattatttaagtgcaaaataaaaagaaaaattcctaaaaggtccttatatagtaataaattgtaacaaattaattaatagttataattaatttaatttcaaaatataattaatcttaagtaaagttttataaggaaataaattatcagattaacttatttattattaattttatttaattttcaaattactcacaataatttaatagtaatctaatggcttaaaaaaaatgtaactgttacctcctccatatgtatctttatctttatatatttaaagtgtctatctaaccatatttcttggtttaacaaattttacatttttcctgttaaacatcaaacaataagttttaaaaattttaaaataataaatagataataatactgcccaagtggttgaaccaaatcctctttttcaaaacaggtttgaataaagatattttaaaaaattaatctaattaaaatcccaaaaatcatggtaggatgcgatcacattatgagcatgcttagccaatttatggtggcaatgttaaaattgcaaccaacatgagaggttattgttaagcaacatgtacgtagtggcatcaaagaaaactcaccaagcaacgattacaactatcacgagaaagagagaaaaaaaaaaaaaaagagactacatcaaaattcataagaatatcttacctctccaagtcggcggaatgcaccataaataccaccaaataacattgagaagattgcataccaaatcagggtatccataaaatagacctgcaaaattttgtaatgtcagaaatctaatcatgaaggctgacataataagaaaaatatatatatagggagagaaaaaaacatacaagaataattggagcccatagtgcaacaacaacaccaatattatttctggctgcacaaaaggtgagatgaaatcaatatcactttttttttttgctaagacagatcaacatatcacttgatcatagg

SEQ ID NO: 143957 - DNA, 549 bp, Cannabis sativa
actccagggttgtagctacatcgttatgacagagaccttctgagtaaactttgcggaaaatggcctgcctcaacaaacagtaccataaccaggccggactagaggccaaggacacgtcgaggtactaatggactactcttagctgtcgccattacaggatcaattttcgatcaacttcatggctcagcacaaaggtaggggaagtagtcatcaaaaatggatttggccctcgcttaagcactagcgctggagccttgggatggataaattaattatatgtgacgaccctttatgagttagtcatcataaatgcatcgggtcttagcaccgtcggctcgccccaacacctcttgcacctcgttgtgtctgtgaatggacggcgaggaacacgtgcttgaggatactagtgacctttcacacacgtgcttgaggaacacgtttcgtatgcctagtgacctttcatacacgaaaagcgatgcgcatgtgtctcccaagctccgggaagctctaagagatgcgtgcatgcgccttaggatctcctgggcagtc

SEQ ID NO: 143958 - DNA, 579 bp, Cannabis sativa
tcacaaacggaaggctaaagcttctagaacaccaggaagtaacagaaagttttggggaagcagaagtgacagtcaaggtcacgggtctacattcagatcatacctagagtgtctcaaatgtaagaagtgtcatcagggtgactgtcgggctaagacatgtttctagtgcagtacagtgggccattttattagagactgaccgtaagctaagaaagaagaaccaaggaagaacaacaaccagaatttgaggcatccgtttacgatgactcatcctgacgctaatgctagtccgtcagtggtgacatgtcagttgtccataaatggttgttcttattcagtattatctgattcgagagctagtcattcttatgtatcaagtagaatagttgagagttttcataaaccgtgcgatgtgtatgcttcggtgtttggtaccctgttacgctcgggacaccaaattgtatatactcagtggattaggtctttttctttttggattgacggttatgaattaaccgccaacctgattgaattacaattgtctaattttgatacaatcctaggaatggttttcttgtc

SEQ ID NO: 143959 - DNA, 529 bp, Cannabis sativa
aaaatgaaaaacccataaaaagaacaaataaattaaactaaaaaaaatagaagccctaaaaaaccaaacaaaaccaaacaaaatgctaaaatgaaaaacttagaatagtaaaatcaaaaaatacaagacacacaaaatggcaaatacaaacaaatttcaaataggggcgaaaccaaaaagaaactaaaatcaaaccttataccgaaggccaactccatcttgatcatttttttgagcatcatcttgaggaattttttcatgggcaaccacttttgatttcttctttggaagagctcgcccacgtttcgacaatggaggagcaaaatcaggtcatcctcctcaacaacaggtcgtttacccttgttcctattagctaaagatttcaactccattttagaattttttttttttgaacaggggaaggagttgatgaagaatgacttacaaccacatttatatatagattaagagaaaaataaaaagagagaaaacggttaatgggagttgaaaaaaaatttgaagaacaaaa

SEQ ID NO: 143960 - DNA, 507 bp, Cannabis sativa
ttatataagttttgaaataattttgtgttttgaaataattttttgtattttaaaataataatattaggtgtaccaatataaacgtgccacatgtacaataatgtacacataaacagtccatagtggcgtagttaaccggatgacaccttaaatctgctaacaattttttagtttggatgattttgctgccaaaatttgagattggaggattaagtgcaaatacaacaatagttaggagggtttagcctccagaaactcaatatagtactctctacaaaaaaagtctattgatgcaacttatgacttttcaacatttaggactaaattgagtttttttgcggctaaattctctgaactattattttagttgtacttaactattaaaactcaaattttagtagtaaaacctttcaaattactgaattattatcaaatttaaggtgacatttattttttatagttaattgccaatatgaactgcttatgtatacactcttgtacatatga

SEQ ID NO: 143961 - DNA, 1207 bp, Cannabis sativa
ttacctcctcctccaaaactggctgtaaaagagcaacattatcctcatatgttattgatggttgtataacgtcaagaacctcagcacaatttgaccccatagaatgaaaaatatcagtatagtagtctaccataacctgagacagacccgacccccactgaacccaagaaccggcctcatcttttaattcatgaatgaaattatttttccttcttaagctagcagcaattgcttcgatctttgccgccaaaagatttctttttgatgatagattttagcaagttgttttctcgcctccttatattctgatagagactccacatccaaccgacctttaaggagaccaattctggttttacaactctgaattgtctccttaaaattgtcagttaagctccttccccacacactaagaggaccctgaacagccgccactttgtcaacaatgttacctgatacacaagcttctcgttgctcctggataatcgcataacaattagaatcacgcagccaagcattctcaaaccgaaacaccctcctagaagctgcctggaactgaaatgatggatccaaaaaaagaggacaatgatccgatgtggaaaagaccatgttaatcaactgtgcattcggaaaaaaaactcatccaagaaggggtagctagcggtctatctagcctcactttgatccaactgttcgtgcccctactcttctcccaagtgaacagatgacccacaagctcaagatccacaagattacaattaaagacgatttgttgaaaaccatctataagccaactaggataaggattaccacctcttttatcatcttggctaagaacattattcaagtccccaataacacacctaaggagatcattttcttccttcaacaccctcataagattccaagtattgccccgcaacgaccgattaggttctccatataaccccataaggtgccagatatgagagctatcatgtcttaccaccatatctatatgattttgagaaaacccgaccatctcagcatcctccttatccttccataacattgctaaaccaccccctcccctgagcatcaaccgcaaaaagaccctcataaccgagttgtgatgctagaagctccaaccgagcttttaaacataacgtctcacaaagaaaaataaacaagggcttcttttgaaaaatcatatctttaaggaattgaa

SEQ ID NO: 143962 - DNA, 553 bp, Cannabis sativa
  modified_base (444)..(450): a, c, t, g, unknown or other
acaacaataaaactaaattataacaaaatatacaattgacaaaaagaaaccagtttcatgttataattactgtaggggcagcaggaatagaagaacgactcggttccattgggccctttcttcttgccacagacttcaacaaggtttttttttctttacttataaaatcaacaatatgctcagaaccatcatctatggaatgagacaacattgcctaaaaattaataaaaaataatgtaaataataatgaaacatattcaaattaaaaaaaacatattttaatacaataatacaaacacataacatgtgaaatgtataaagataccatatttttctctattttacccttttttgatataccagaaatattacgagaagattttcttttactgccaatgaccgaaccagtttcaacaactcgttctgtaaagcccgcttagttannnnnnnaattatcagttaattatgattaatgatgaaattatttatagctatttaaataatttagtactgttatttatggaattcggaaatgcatggttatgttattcag

SEQ ID NO: 143963 - DNA, 825 bp, Cannabis sativa
tcttactattataaaagtatggtattgatgtctatattgattatgccaattttacccctaataaaattataaaagtacaataatactaatatttttggactcttctttttatagaaatttgtcttatcttatctatcttgtatctattaaataccaacatacttttttacaatacataaactattattattatttttaattttaaaatcattattattattattaatgaaagtataacatgaataatagccaatttacttcatctcttttatcatatatatacatacataattatatcacatcacttatatatgcataagtatataatttagtgctttttgtactattttttgtcttgcccatcttcttttcttcttaagtaattattataaagataattatacctctatattttagttaaaaaaatttatatacagtattttttttccccttttatataataattatgagtttttttatattaacataatattattttataatattaaatttaaaaatgttacatataattttttttattaaaaagtagagtgttgatataatttgtaatatgtgattttaaaatttaattaattcaaaatcaaattatttgagatcggaccaaataaattcgctgtgaatgatttgatgaatccgaactatttaaaattctctcgttccgtcacagttttaaaaatctctgtagcgattcaacctaaactaattagtataattattttatttatgcttaatatatatttttagacaaaatattgatatttgacaataattttaggtagaatattgatattgacttaatattat

SEQ ID NO: 143964 - DNA, 1018 bp, Cannabis sativa
  modified_base (778)..(780): a, c, t, g, unknown or other
ttctcctaagcagaggatgagagagaaagaccgtctacacatagcttggagaaagaccggctacacatagacgataaagaccttctgtacgtagagagccttgacctctgcacagaccctattctcctcatcattaaagcccatttcctgaagctgagatctattttctagcctcaggaaatttctcaacactggagagaggctgacacaaagatatcctgacataggatagggtcttaggtcggctggtttctctgatagaaaccacgccaacttccttcccacatccacctaaaaccatgccaatcttcctctggaattcttcatcaacctgaggaggatctttgagatcgctcacaagatcaataccctctaggaacacttgtgagaattgaccatggcaagtcacggggttcccctaatttggattggtcggaggctcctcagccctggaatccatcgtttctagctccagttgaggcttgaagtctgtagaaacgaatgaaaattggttggtgcatctgtgtattatgagtttgggaggataaacttctgaactcaaaagagacattttggcaggaaggaagtaatccattctaaaaatggatttcactaaagagctagaggtgtgaaaaatgacaggcatgagccgcccttttatacacaaagtacagtgacaagaaagccaaagattgagaaatctaacggctgggaatcgtgtagaatatgaacatgcaattcataatgatctttgaaaccatacaaccgccaaaatcannngaggcgtcctttccaagaaaggattttggcgaaaatgccctctgtaattattaaaaagctctttttactaaaaaaaaaactttttaaggggcgttatacccaaaatttggctggagaacgcgtgtcaagataaagagaatgtgaatcgatgtcgtatctttttatggactaactcattaattgtgtaattactagagtatatttgcaacccgctgactgtaaagtcttaggcgaggaa

SEQ ID NO: 143965 - DNA, 780 bp, Cannabis sativa
  modified_base (88)..(88): a, c, t, g, unknown or other
aaaataatttccaacaaagatatccctgagaaccaatagtaagaggttaaatgttatcctatgtacaaatttaaccagactcctactnttgagtgggagccatctaagatgtaatcaaacaaggaacattacgagacagtcaaggaaaaatttctgaaattgatcgatatgttagatgatagtggtgtatattagaatctttatatctacaccaactcataacctattcgagatggtggttactctaggggtggaggaattattctagaaggatgtaaaaacccatttatgataatttaagctccatcagtaacgatacataactttgttgctttcaaaaagcactgggaaagttattcaattcaagaaagttcttactgtattatctctattccatttttggataaaattagaggtatgtcttttgtatattcagatgcacttaataaacagtaaagaattcagtatccctagttgagtaatgcatataaacactactacaatttagacttttagtgacaatctttagtgacccacgtaaaagtgcgtgtcagtaaagagctaagagtgatttttagtgacacgcataatgagactctaaacattcggtgttagtctcttataatgtatgtcactaaaaatatgtagtgtctctaaagaataatactcattactttatcattttttttaaaaaaaaattattgacctatagagtcatgccatgagggactgcaaaagtgtgtcccgacttacgtagcgcgtcactatatcatagtctta

SEQ ID NO: 143966 - DNA, 1800 bp, Cannabis sativa
  modified_base (1759)..(1763): a, c, t, g, unknown or other
cgttaagtagtatcagaataactaaagttaagatcactttatttttcatacaaagtgatgaggtgtctttgagataaattaaatattatattcattgaaataaattgacattctggaaatatagttaaccaattagattaaagtacttcattagttatattgattcacgtaaaccaatatttaattacgtctttaagattgtcaataagttgtgttgtgaagaaccttaattattatttctactatagaagtcaaatttatttattgttttaatgataaatctcgtatggtgttatagagtttcatagtaagcctagaattcaaaataatatttcaggccattaaaaaatttgcaacaaattcatatacaatatttatggctaaaaactataagagtactggtcggagctagcatatcgacattaagtatttagtcataaagaggcataataagtggtcattaagcacgcaaattgaattgggtgattgcatatccttgactaaaggcatgctgcaacacaaattcaaggatcataaagtgaatatggtattcagttatcccatatatagtttttgtttgtaccactaaaattatttaatgaaactctaattttgatattttctcatgtttatgtaccttaatttcatctgaaaaaattatcataagaggaccataataaacataagatttagagtttattcgcttaagtaccacattaagtatattgttatataatgaatatatcgtaatacatgagagataatactcgacatataatgatgacctacgctatatgattcatatgtttattatgtaatgaagaacgttgggttttaagtggtaaattaatttaaatactgatcaagtggagaatattagaataatttttatatggtagcaaattaaattttttatttgatttgatttataaaatataattaattatttactaattaattaaaatattctaaggtcatatttaattaccaaatatttcagttactcgatctaatttttagaattaattgtcaaaatattctgacaattaattgtggcagagactttgatggaaggtctcacctatataaatataggatctcggttcccgagctcactactcattttgtgaaacacaataaatccatctaaaaagagtagagagagcttggaagcatgattacccacactaatcagtttttttttttttttgcagatcaaagcttgtgtgggtttaaatctcaaagaatcaatgactagaggtatttcgatccttaaattatgtcgtgtatatattcgtttattcctcattttatatacacatttatatatttcatctatacatataaattttctaacaacaatcagtagatttattcatcatagcccacatagcaagacaataagctaccttattacaccctctagaagagaaacaaaatctatacaaccaaaattcaaataatgcagacaattatcagctaaaataagacccctaattgtcttggacattctcactcagctgcaaccctttgatcacagtggggcagtcagacgcaacttggacgttctgcaggttccattttttcgccacctctaactgtagtccaatggatataacttcaaccaaaggaatcgagaagcacctctgcatatatttggtgtcagccacaatcaagctactcttagaatttttaatgttgagaatcatggggttccatcttaaaaccaattaataatgagtggagtagcccatgttcnnnnntatggctcaatacttttacatttgatctatgtgggac

SEQ ID NO: 143967 - DNA, 1080 bp, Cannabis sativa
cactgctttccccttagctttttcggtaattcttggagtaacatcctccacagcagtgccatcactagcacattcactagccacaaccgtagcatgctgagtggttgtgaagggaaggtcgcaaataacagtagagtggaagctcccatggctcaaaggagaaccttcatgagttagaccagtggagttttggataggatcaactcccatagattccattgtggttgtattaccacgagaggcagcatcagaggagccagtgccaatgtcttcagtagtaagaaactagctcacagcagctgcaagggactgatcaacattttcctgtggtgcaggaggtttatccaaaggaagagagtttgagagatcaaacgggtttcttttaaaagttgatttcggaggggctttgagaggtattttgtaaggaagatcagggggataggcacgatcgtcgcatttttgaaggtaagtaatgcactttgtgagggtatgatcgaataggccacagtgaaagcaaatatttggcaggttctcatatttaaatgttaaccatttctcgcgatggatactcttgaaatccaccatgattccacgagtgatgggcttagaaatatcaatgagaacgcgaactcgaagaaaaagctcagagactttgaaaagagtaatcttgtcaacctccaagaaatctcccacctcatctccaatcagcttggccagctttagagatttttggccaaagggaatcgagtggacttgtatccagaagggtgagtacctaagctggttgggtaagagagtgtccaggcctgcaggattagcacatgtgaccagacaatggtcaaagtgccatggctggccctcgagaactcttcgcatgtctccctcataatgaaactccaccatgaacatacccgacccatattcagaaaaggttaaagggccacaggtaatccacgcatttctcatagccacttcgaaccactcaagcttaatgattctaggggaaaggattctaaaaacaaggcagaaagttctactaggttgactaacccccccagtgtcatcttccagatcatgaac

SEQ ID NO: 143968 - DNA, 933 bp, Cannabis sativa
gtggagaaaagtttaatgtgagccagttgtaccgaagaatgctggaccaggatgaattctcggctgttggagcaatttggagcagattaaatatgccaaaacatgctttttaactttggcaagttactcaatccaagcttcttacaagggatatgttgtgccgattgaacatccctatcccaaacaaaaattgtgtggtttgtgacattgaaactgagagccaccaccacatctttttcagctacatcttttcccaacaggtactgtctttgctttttaattggctggggtttgatggttggtcaaggaacattgatagctggactgtttggttgggcaatacaaggtcgagcatcttagacaatgtgagaacgcttatgttggcagccatggttcaccacttatagggcaaccaaaacacttgcttattttctttttattctaactttatcaattttatagtgaacaaaattaaaagtgatgtgaaatataggctcttgttgatcaaagataggaaaggttctagagtggagaagaatatacttcaaagattgatatgtaattagtaggctttgcggttgttcttctcctctgagaagtttagttgtttgtattggcgagttgattaatgaagtttccttcttcttgatcaaaaaagaagtctcaaaaaacctagagagaaagaaagctaggtttattgcattttaagcattagttggataatgagactttcttttctttttatactacttctcttagggttagggttgatttatttagaataaaaaaattataaaaatggagtaaaaatacccttaagtggccggccattagtgtgtctaacactagttagatttttgtcatttttctctaccatttatctatttctcacaaatactactttttgcaatttcaaccctataaatgccacaa

SEQ ID NO: 143969 - DNA, 2692 bp, Cannabis sativa
taggggcatggttgatccagcaaatccacgagcggtggatcctgcattgcagaacccagggaacacaagggttccaccagccgtaagtcccgaacaaccattaaccataagtcacggtgtgatgactcctatggatcaaatcgcgcctattgtgcaagagacgaggaataccagttcagcagccgaccagggcattcataacacagccgttccgcctgctaccaatgttcaaacaaccattggagatgacactgagatctagaacctccgtcctgctcatggactcatgcagggtcataccaacaccctacatcatgattaggaggaactctgtgctgcggtaaaactcgcatttgaagagcagaggcgcatgtttgcagaatggacggacaatgagatggaaacgttaagggctcagcatgcagtcattgacgatcgtagtcggtaagccactgtgcttatacaaaaagcctatcagactgtcgggcagcaacccacgaatgtcatccctttgggagaaacagatgaagatccagtgatgaatatctctcagactataaatggtgggcagaccttgtctaggaattcatcaggagaagtcatacctaacaattccaaccaggttaatggtgccggtcagcacattagccaaaccaaccagtcactgagacagccaggcgttttcgtatttgataggttggggacgactcatgatctcaaaaacgatctgaataggaagagaggagtggacgatcagcttgacacgccgatggtgcagcctggaatccgcactcaaatttccacttagaaagatacggatgtgactcagatcggccaaaatgccgaacaggttagtccagccatgcaggcatagctggacgaactaaagagtatgttccaaggcatggccggtcagaggaagaatgatcttgagttggactgagcccgtggaactcctttttcctcagacatcaatgtcctggagtttccccacaagtttaagatgccaacctggaagatgtacactggaaaagaagatcgtttgtcccaccttaagtattttgagatgaaaatggatctgcaaggagtacgaggagatgtatgttgtagggtttttcctgcaacccttttggaagccgcccaaaaatggtatttccagttggtgcaaggaaagttcaactcatggaaggctttctcctcagagttccatggaccattttcctcctctcgccaactttcgttgcacctaggagatctagtcgaagtaaagcaaagaccaagagagcctctctgagcctacatcaaacgattcatgacggtagcgactaaggtttcacgggtaaccgaagatggaaagttatccgcgatactggggggcattgaagtcctttatgaactttggaaggacataaggaaaaatggtccagtagactctatgagtgattttcttgaccgtcctgaaggctttatcaaacttgaagagactattcagcgagcaaaaggtgaacaaaaacgtggcaagtcaaaagctccttcaactgggacatccgtctagctcccccattacccaagcaattcaatctcaaatggtaaacgttctagcaacactaataggcaagggaatgggaaaaagggaaattgcactagcaagaccgaacaagctcctcgggagaatccagcaaactatactgtatttaccatactgacggaggacatagaaagtgtttacatggccactcagtcactagccccgtacaagaagcccccacccatgaaaaacgatgttagcaagagagacatgaccaagttttgtcatttcatggagattaaagccacgacatcaatgaatgcaacaatctgaagtgggaaattaaattcctaatatggaaaataacccgcatgtacagaagtatgcaaaggccgatcagaatctgaggggtgataacaaccaagacttgcaacctccaccagtagatgggcatctacaagtcattattggaggtctgcacatagctggagattcaagcaaagctcgggagaggtatgctcgaacagtacagcacgaggaagaagaagtaatcctggtcgtagaagaaaggaagcctaaaatcccacaggcaggagagcccaccataactttcaatgacgaagattctatcaaaattagattttcgcacaacgacccattggtcgtggaggtccagatagccaacaaaattgttgccagaactatgatagataatggagcctcctccaacatcttattcaagaccacatatgaaaagatggggctccaactcaaagatctaacccctttccttctgcccgtatatggtttctccggccaaggagttgcacctctagggcaaatttgcctacccctcactattgggcaagctccaatgaggataactataatggcataatttctggtattggacgttccatcaacctttaatgtcatgctaggccaacgagctttgtatgagttaaaggttgttatgtcgatattccattcatgcttgaagtttccaacaaagaatgaggtagggtgtttaagaggaaaccagcaaattgctagggaatgttataacctcgcggtggccaaggctaagaaagaagtatcctccagccagagcacagagaagggaaaaaacatttctaagtagggaacttcccaaggcggggatga

SEQ ID NO: 143970 - DNA, 701 bp, Cannabis sativa
gcacaccatgcagtcttacaatttcattaacgtacaaatccgcatattgatacactgagaaggttgtcttaactggtagaaaacgagcagacttcgtaaatcggtccaccactaccaaaaatgaatcaaataaaactgcggttctaggtaatccaaccacaaagtccattgtgatatcttcccatttccactcaggtacggttaaaggctgcaacaaccctgccgatctttgatgttcagctttcatctgctgacaagttaggcgtctctatacgaattctaccacattcttcttcatttcgctccatcaaaagtagggtttaagatcttgatacatcttggtggtgccgggatgcagggaatatggagttgtatgagcctcttcgagaatttcatttttaagttccgtactaccaggaacacaaaccctggttctaaacaacagcatcccactatctgacactgtaaagtctttggtttgaccagctaaaacctcctctctgatctttactagctctggattagttagctgagcagctttaatacgttctaacaaattagattacagcgtcaggttatgaagtttgcctacaacaaactcgatgcttgagctgaccatgtcctgtactaactgaggtgaaatctgaaccatactagttacttgtccgggacccttcctgctcaaggcatcagccactaca

SEQ ID NO: 143971 - DNA, 615 bp, Cannabis sativa
gaccgcctactcgtcccagctctctgccgaatcaccaaccacgagaaaggaatcacactcctccagagaatcagaatcggaaacattttctcaattctgtcagtggtagtagccggattagtcgagaagggttttaattgtttatttatttattttaaaaaaattgataaataaataaagaaaaaaaagtattatttttatttaggtttaattttaaaataatttttatcatatttaagttattaaaattattttggaccaatgaaaatatgtcacgtgtacacatgtgtacacaatggcattcttagttggcacttaacactcaaacttagcatatatatcaaatttgcaaacagaattaaagataaggggatattaccactaaaaacaaagaataggaggttaagtgtttgacaattgaaacatagggggtttgattgcaaatttctctttaaaaaaaagttaaaaaaaatagtatatagggtaattttccaaaaatttaaaaggtataatttattacatgttaaaattgaggaggtaaaaatttaaattaatcttaattttgttataaatagtattaattatgtggatgtccaaatcttttatttattacca

SEQ ID NO: 143972 - DNA, 502 bp, Cannabis sativa
taatttccaaattaaactaagtagtctttacactatcagaacaacccgaaccgtaaatttaacaaaaaaaaattaaaaaatagtaaacgaaataattccccaaaaaaatattatgcaagaagattttcatttagctaatcatagtgtgtggttgccaatattagttagcatatgctgagaagcatgttttgtatttagataatatataaaaattattttataaatatacaaaaatagtaaaaaataattacaaaaatacaattgtatgaaatataaatatttttaggattttttacaaaaatattaaattttgggtaaaagtttatatttatactgctacacgacaaaaattacattatatttggcctttttttttttcttttatactgtaaacatcaaaaaaagaacgagacctccatcttccataatcacaggcagaatcaccacaacaacaccttaacaaccattaatgtaacgccctaatgctaaggcacgctacagt

SEQ ID NO: 143973 - DNA, 553 bp, Cannabis sativa
  modified_base (31)..(60): a, c, t, g, unknown or other
  modified_base (321)..(322): a, c, t, g, unknown or other
  modified_base (503)..(517): a, c, t, g, unknown or other
ttttagaagttcatatttagggtcttaatcnnnnnnnnnnnnnnnnnnnnnnnnnnnnnngtaaaataatttccaacaaaagatgggtacgaatttgtctatagacttcaacacaaatctactaagtgcagcagtgcatcctgtttggctttgtacttccttgattgttgtgggtgacttcatgttcaaaagagattggatcttgtctgggtttgagcttcttcatattgtagctgcagaggattttgaaattttctgtctatgtaacaccctaactagcataggcatgttaatgtaatttttaacgtactgtgcagctcnntgctaatcaacgaggttattggaaaacgtgaataattaaaaaatttcttatttaattaaagcataacatataacttttataaattttcgggatcccgtttacaaaatacagttacaaaagtttactactcatttacaaagtactagtttcctagcgacaaaacaacaaaagccctgatgtnnnnnnnnnnnnnnnctccaagcctaaccgccccgacatatacaatcttca

SEQ ID NO: 143974 - DNA, 674 bp, Cannabis sativa
  modified_base (509)..(519): a, c, t, g, unknown or other
gttggccggcacacctgaattcaggaaacgaggtaagattagtataatgatatagatatgtagttacatgtatagtgtgcatgttagctaagccttttagattacattagaaatgtatgttggcttttatattatccgatagtatcacatcgatacgcttagagtatgactagcgtaccgagtataggctgatattatggtcgatagtaccgtactacttgacagtattacatcggtacgcctagattatgactagcatattgagtataggatgatattatggtcaatagtactgtcgtacaaacattctagacgcaacaccatgtgggacacagggatagggttatgattgggggtatgggcgtccgatgataattcgagtaatcgttgtgttattgtttatgcttttgttaccgagtatgttgactcacaattgctatttccatgtgtaggtaagggcaaggctaaggctgaggaggcgtgaaagcgagcagatgaagattgtacannnnnnnnnnnttaggcttggagcgtacgatctttgggacataagggcttttgttgtatagtcattaggcgacaaacttttgtatatgaatattaaacttttgtaaatgtattttgttaatgggatcccgggattttataaatatattactttatgtttttaatta

SEQ ID NO: 143975 - DNA, 543 bp, Cannabis sativa
  modified_base (176)..(182): a, c, t, g, unknown or other
  modified_base (478)..(478): a, c, t, g, unknown or other
atataggctcacataggtcaaatttatttggatgggccctatcatgtttctaggtttacatagatgaaagaaatacaaaatttacctgttctaaattatttacaagatctattgacaattggattatgattaaaatcagatcattagatctgttaacaagttaatcatagcaattnnnnnnnaataaataataggtttgttaaattgtttttgaataaacaaacaatgtccatgtaacaaattgtgaagatataattaaattattattttaattaacaacctattttgaaaatttagggttgttaaaaaaactttagatatctcttcaaaattaaaaattaaaaaatgaaactaatttaacatatctacgtttatttgaattattttatcaatttaaattaaatatctaataagataaatgatttgaagataaccaaaaaatatatttttaatattattttctaatcttataatttantaaaattaaaataataaaataatccaattttaaaatagatgtggttaggtaattattattttaag

SEQ ID NO: 143976 - DNA, 529 bp, Cannabis sativa
gagaaaagtttgaaaagtttaatattttgagagggctgccgcacaaagggtatttgaaaagtttgacatcggtataaaataataaaatgaattaatattttgagagggtgtcgtgtatgttgctgtttaggtttagaataatatattttattattatatttattttatattttattatttaactttttatattggattttaattgattagaaaagaagtggtccgaataacaagaacccactattattaaatatatttttttattttttatttacttattaattatagttgtactttttttataaaaaaaattaatttatgatatagtgacacgccaaatggttggggatatacttatccattcgcgcctagcgtgtcactatatgccaatattttctatctataaccttaataaaaatgagagtgtttataggcttatactaattgaattactaaaatagcctttattaattatgaaattacaaaaaaagaaaactcccatttcgcaaatatatatttattcaatacc

SEQ ID NO: 143977 - DNA, 2609 bp, Cannabis sativa
  modified_base (2033)..(2038): a, c, t, g, unknown or other
gtgtctcgagtctagggtcaagttttgggtctccgtcccggttttagggcctagtttcaggtccaagtgcctcatctaggtcttgattcatggtcccgatctgggtctaggttcgggtttggggcccaagtcccccatctaggtccggatcctaggtcccggtcaaggtccaagttcaggttcgagtttggctctcaagtttgggtccgagtctaggtcccattatgggttcaagtttgagtctgggtccgggtctcgatctgagtcaaagtccctattcgggtccgggtcggggacacgattcgggtcccactcaaggtctagatgctagaccaggttctggtctgggtttgggtccgggtttaggtcctgagtttaggtctaggtttgggtttggatccgagtctgggaatctagatcctggtttaattctagctcatgtcttgggtcctggttcgggtcttaggtttgggttccaagtctaaggtcgggtcctgtgtctcgagtctaggttcaaattttgggtattaaacctcggttctgaggcccagtgttgggtccaagtcccccatctaggttcggatcctttgtccaagtcttggtccaggttcaggtttggggccaatgtcccccttctaggtcatggttcggttcttaggtcccacgtttgagtcttgggtctcgggtctcggtcccgggtccccgtcccaatccaggttcttgtcctagtcgaggttcagggctcgatcctagttagtgtctgcgtcccagtcctgatctcagtctgggtctgagtcttgggttcgagtccgagttctggtaagagtcctgctcttggtttgggtctgggtctgggtcaaggtccggttttcggtctgagtttgggtccgagtcttggtttgggtctgggtctgggtttaggtctaggttctgatacgggtctgggttatggtcctggtcttgggtcacgggtccagggttccaggttctgtgtcgcaggtcctggcgcaagtgtcgattcgggttcgagttggggtcttggtatcgatcctagtttgggtccgggttcatgttcggttctgcatctagatctgattttgggtccaggtccaattctagttccaaggtccttattctgattcttgttccgatttcgggtcccgagtccgagtgtggatttgggtcctggtttagaaatggttccagctttgggtcttggtacgattccaagatcgagaaactatcgggttgggtccaagccccgggtggtgggtcaagattcggatcccaatcttcggtcccggtctcgtcccaattcagatactgggtcctagtccgggtcgaggactaaaaccggggtcaggtcttgggtcccaatcccactcctgggtcccgatttttgttctaatttcaagtttggttccccaatctaggtcttggacttgggtccaagtctgagtctccaatcccggtccaggttgtgcatctgggtttgggtccaagtccgtgtctgggttcgggttagtgtcctgagtcccgatctgagtcttggttcgtgtcccggttcgggtctgggtcttggtcctagtcagattctagttccaggaatgagactaggtcttagtccctcggtcttgctcggtcccggtacgcttacagttccgcatccagtttcgggtcacggggtacgggtttaggtctgagtccgggtttgggttaaggtttaggtctgagtctgggtctgggtccgggtttaggtccgagtctgggtctaggttttagtagaggtatgggtcacagatccaaacatcgactatgggttaggtttaagccccgggtctaaatcaggatccctgtctcaggtcccagtctagttccacttcgggtcctaggtcttggtcttagtccgcgtttaggatttgggtccggggtcaggtcctgggtctcggtgctagtttttgaggcccgggtcctgaatccaggtccccatcctagtccggttcctaggtcccagtccgagtctaggacccggnnnnnnttcaagtcctagtccgagttcgggtttgagttttcgatcccggtctgggtctagatctaggttcgagtcctgggtttgagtcttgattcaggttcgggtctgagtctcgggttccgatctgggtctgtgttctgaggcccgggtcaaggtcccccatccaggtctgggtcctaggtcctagtccgggtccatgtttgggttcaggtcctagtcctagttccgatttcgattctgcatccgggttcaggtttgggtctgggtctccgtctaggtcggggtttgagtcctagttcgagtccatggttgggtcttggtccaagtccagatcccgctcttgatctgggtttgggtccaggtccaagtccaagtcttgggtacgggtctaggtttgggtctaggtctcggtccgaatccaactcccaagtttcgatcccagtgggtatgggtctaggtctaggttcaagtctaggttcatatccagatccatgtctaggtccgagtttgggtctgggatcgggtcccaggttcaagtctgacctgatcccggacccgaaactggaatcagactagg

SEQ ID NO: 143978 - DNA, 500 bp, Cannabis sativa
agttttaatcgtgtttggagaatttttatgctttttatcttttatttttgcagatttaaaataaaagaagattagaaaaatatcagaggaaaaagatatgaaaagaaagattaaaatatctcacaaaaagatgatatttgaaatagaaaaaattgtgtaagaaaataaagctgaaacttcaagcctaaattcgactatcttctgattagattttggaaaaagtcaaaacataaacattctagatctctcttttatctttccaaaacatcttgaattgtccaattccaagcaatatcgagagagttatgaccaaaatattatcagtgaacgcagcagaaaaaatcaccgttgaaacgtgaaactccaacacgggccgcgacatgataaagctgtgccgcggcccgcccccctaagtagcacaaaatcatattttttttgtctcacgtgagttttggtggttttctagttcgaataggcatttaacatgtgcgtttttctat

SEQ ID NO: 143979 - DNA, 636 bp, Cannabis sativa
aattggcaactggtgaactctctgtccacaggtcgatgtctttggtggaatgcaagcttttctttcaataaaattcttagtgagttagaaggttttaactgttcggtttcttggatttctcgcggttttaatgcttctgcccatgctctcgctaggtggggtttgttccacaattgtaatggtgttcttcgtttctgggaggtgagtccccatgtgctcaccaaactgttatttttggcttaatgaagttgtttttctcagcaaaaaagaaaatgaaaactcaaaagtacaagaatttcaatgtgtactatattaaagaagcaaaataagaggaagttgctaaatcttcatcttaaattataaattacatataactaatattttaaaaaacaaagtaacaaacttatcttatggtgtaatatttttattgattaaacctcctatattatcaaatatgtagtaaaagttataagtaatatttttgtataaacatcatattattaaatcaaagtttttaaatttaaaaaattaacaaaaaaaaaaaaatccaacgacgtagttgccttctagtctattctatataaagtgtgtctatataacagaattcttcgatttgagaaattcatgggtgacttt

SEQ ID NO: 143980 - DNA, 966 bp, Cannabis sativa
  modified_base (395)..(407): a, c, t, g, unknown or other
  modified_base (592)..(593): a, c, t, g, unknown or other
  modified_base (923)..(940): a, c, t, g, unknown or other
tttttttatcatttttttaattttaattttattaatatattttaaatttaataagaatttaaatgaaagaattatcacacatttatacatacatttttttttatcaaaaccttattcattaaaattagtaaaaatgtataattttgaattattatacgtaagtttttaaaattttaaaatattattaattaaacaatagttatttaaattgattctaagagaaacaatatgacaataaaattatatattatttttaaaatactagaaaatttatataagtattttaaaaaattaatatttataataaattagtgtttaagataaataattttatattattcaagtatttttattttactattttaattatttattaaataaaaaatatcataaannnnnnnnnnnnntatttatgatatatacttgattatatatgatatattattttataatttaattatttttatttttattttgctgaaaattatttatttttatttatttattattttatattttaattttactttattattatatatttttattttaatgtaagtttttttgtctaaaaggaaataaataaaatagnntagtctattcttaaaccaaatacatgattactttcagcataaaccaatcttgtccagtccagtccaatcttttttagtccaatcctgtgtagaagcttggaaggaagactagcaaagtaccctcactgaaattctgagaatgtgtagaagcttgcaaattggaagatttaaaagcttctggctatttctatacatggaacaacaaaaagaagctagaagatagatcttctcgaattttgccaggcccttgtgaactcagaatggttggatcagtttcagaacttggaagcaaacttcctacctgaagggtgtttttgttgggttttatgnnnnnnnnnnnnnnnnnntcaatataatcagatttacttgttaa

SEQ ID NO: 143981 - DNA, 524 bp, Cannabis sativa
  modified_base (358)..(362): a, c, t, g, unknown or other
tatttcattatgttggaaaccttggaaaataataaatatgtttagattttagtatttttgaaatcatatttgctttgcttgttattttctgaacttccgtatgaatttattgaaccaataatttatttatatttattgatatatgtagtgttaaaatgtacaacccacaccccaattctcatctagaatatgcctttaggaatgaacttcaaagtgtgaagatgactccttgtcaaagtatcactttacacttgctcatgatgaacatgaaattccagaaagcagctatgctggaaattgtttttatctggagagcaaagagttcattttattctcaacagcttatcacctgagtttnnnnnatttgtgattaacaattggaactcgtccgacatagacaagctggacagtgaattacgtgcttatgaatagacattgtcacttgcatggaaatccttctccaataatgcagataagggcaaaaggaaagttgaagatattgagaataattcctccaacaatcc

SEQ ID NO: 143982 - DNA, 510 bp, Cannabis sativa
gacagtctcaaaatcttgacaactaatataccgcgcaaggtaaccttgtctagttaatgacaggttgtatttcacgtgctttcaattttgattatgccacgtcaggtgaacaaaaattaggataacaataagtataataaaaatagatatagtgaaatgcacagtaaaaatactaaaagtgtacattcaagtagcttatattttttttaaggtcaatttactttatttaataaatatttatactttaatatagggggtccaaatgttttagggaattttcaaaaatactcgaatttcggttaacttttacaaaaatactatcacacgatttttttttcaaacatactatctttttataaaacaatcgtaaaacaacaaaatagaaccaaaaaaaaagaaagaaaaacaatagtggaacaactaaaaataatagtagagcaacaatgaaaacttaacactgtacacagtataaaaatacaaaatatttttgaaaaaaaacacaatattttt

SEQ ID NO: 143983 - DNA, 564 bp, Cannabis sativa
aaaattaatttttatttcatttaaaacgtatataatgttttttttttgaataatatgaatttatttttattaatttttgtcttttaaaattattttttctaaaagaattattagtttggtcgatactatatttatatgtagcactttattgatcaactaacagaacgttaaattgggtgttaagtttaaaaattttagaatatcaataggaactacaatgatgacatcaactttatataaaaataatacattataaaaaagtttgattcattatctcacacctgtttcttttacataatctcacacttacttttttttgttattcaattcataatgtatgattcataataaattctttctacaagaaaaagataccttcctatattctgtaaagtaaaaaaaataacaaaacttcacatagatgtatagttatgaatacgtatacatataaataatttaatattattaatttagtttatatttattcttacctgttttttttttaaataattaatttctgatagatatttttatagaaaatttattaaaataatattaaaatat

SEQ ID NO: 143984 - DNA, 722 bp, Cannabis sativa
tggaatcgcgtgggaataggcatgatatgcagtaagacacctcgttcttggactggtgcatcgggcggttctttgttttggagaaggatcattccaacttgatggtggttgtgtgttggacgatttggaacgcaaggaatgatatagtatagcataataggacagtgggggttgagagcactgttacatcgacaacaaactattttaatcaatggcgtattgctcaaaaatcaagcaataacttgttgttccctgggtacatacctggggatagggtagagcaatgggtcgctccaggtgttaatagtattaagattaatgtctatgcggtggtgtttagcgagacttttaaccatggagttggttttgtggctagagactcaaatgttattttggtgaaaggcggtacaaaactcttccatggttcggtatcgcctgaagtagctgaagctattggggtccgagaagcattgagctggatgaaagaccatcggtggtcacatgtgatcttggaaacggactgcttttctatagttcaagccattcatagtactattgttatgatttctatgtttggcaaagtgattaatgattgttgttatactcaaaattcggctgccatctcggtggaggacacgtgtcaagataaagggaatattgatagatgcaatcgctttttatggaataactcattaattacgtaagtatcagagtatatttgt

SEQ ID NO: 143985 - DNA, 572 bp, Cannabis sativa
tttttaaaaaaaataagaaatttaaaaaatgttattttaaaaaaaaaaaataatcactttgaataatcactttgatttttttttttttttgaaaaataactacattttgaaatcatttctatttttttttacatctctgaggattctttaatatctaatgttcattataattaggaaacaaaccgcgcttcgcgtgcaggttgtattttatttagtaataattaagttaaacactatatcaaatttcaaattttgataattttttatataaacttttttttttctaataatatgaataactattagtgatattttttactcttaataaaagaaacaaaatatattaatattatagaattctaatttttctaattattttaaatttaataaatgataatttttaactaattaatttattataaataatattattaaacagtgagtttttaaatatatattttttatatatgaataaatttaattaggattcaaaaaaataatatattaattgataaatttatagaaaattcagttgggttttgtgccctaaataaaaccagatcggaagagcg

SEQ ID NO: 143986 - DNA, 998 bp, Cannabis sativa
agtttcttatggacacagaagagcaatatgaatggtccatgtagcattgcgtgggataatctttacaaatctaagaaagctggtggaattgggtttcatgacatagaaaaatggaatcaaggtgccgtagcaaaacatgtttgggaaattgctaataagaaagataatctatgggtgaagtgggtgcatagtgtgtacattgatcaagaaaattggtgggggtacaatgccctgcccacaacagttggtactggtgtagaattgtcaaagtaaaaaaagaagtgaagctgatatttactccagatcagtttactgcatctgatttcaaaatagcacatatgtacaagatgttaaatcaagaacaaagaagttttcatgttagcaagcaagtttggaggaggttaaatgttccaaagcacaattttcatctctggatagcagtgcagaatcggttgaaaacaaaggaaagacttcaaaaaaggcagattgttgatgatgcttcctgtatactgtgtaaaaatgcagtagaaaacactctgcatctgttctttgactgcaggtatgctcgatgctacttacaagaattaaaaacatggctacactggaggatcaaagctgaatccctgccaagtattctaagatggattgatcaagcaaaactgagcaaattcaaggcaagcagttacacagcttgcattgctgccttggtttacaagatttggcaatccatgaatcaaatgttatggtcccaggagactacacaaccgcaagctctcttgcaagaaactaaatggctgataaaaaatagaattacttgtgtaatgccaaaatgtatcgatcaaaaagaattagaatggtttcaagatttataagagtttttttgttttcttacagtaagatgtataggtgtttgctctttgaagagccataggttgtaacaaaaaaggttattgtgcaatgaaattcctaattcataaaaaaaaacaacttaaatatta

SEQ ID NO: 143987 - DNA, 749 bp, Cannabis sativa
ataatattttagtataaattaaagtttaacataatataatacaatacaataccacctaatacggcgttttaaacaaaccctttgagattgtattcactatcaaacaagccaacaacatatgataagatagccatataatatggcacaaaatatccaaaaaaaaaatggaacaaactagccaaaacgtatggcacagactataaaaatataacacaaactaacaacgataataattataaatttaatcaatattaatcaagcaatactaataaaagataattgactaaaacaaaactaaacaatagtaaacaaacataaataattttaaaattctacaataaataaatctctttatatttaggaataataatatttaagacaattaaattaacgagaaagaaaatttgtcatgagcataaatttatcataattaattctaaatcataaatactataacataaaatttacctaaaaagttagataattaattacaaataaattttttaaaagatatcaaaagatactaatataattgtaaaaacaagaatgtaaaatataccaatataattaaatataattattatttcaataaaacgcttataaaagcaaaattaaaattaaaattgactaattataaaaataaaaatattcataaaatagatttgataataataaatataaaaggaaaaaattacatagaacaattaaattaggtgccgtttggtaacatttttgttttttaatttttt

SEQ ID NO: 143988 - DNA, 620 bp, Cannabis sativa
gggtcaagatattgatgatgtagaattttttgtatttgggcatcgtagctcaatatgagtatggtttgtttttcttttttatcttttaataataaaaaaaaatgagtagttgcctaaaaaaaattggtgagtaaagcaaggtagcttaaaataatgataaaaacaaaattattaaagactttttatttctttgttagataaataaaacactagcttgtcataacttgtaatttttgccactctagtcattaactaaaatcttattattacaaataaacatattagatatgtatcaatctaattatgtttttgtcaagcatagactgtatcacttatatgtatcaatctagttatgtttttgtcaaacatagactctatcactaagattagaatgagaaaaattaatattacaaatatttagaagaatgttcataaaatagtcgatctaattcaatatgtaaagtgtggaatcgtggagattggattggaatggattagaaaattcaaaattcacacttgtgcagattagatatatattgattgacatgcaaaaatagacgatttaatccaatcaacacatatttataaaaatatttaaaaattatatacaattaatattt

SEQ ID NO: 143989 - DNA, 523 bp, Cannabis sativa
tgtgacagcatcgatcagtattttagccaacatacatttatcagtaatcaacacaactctatgtatactattacagctatcaatgtaatctaatagacaataacaacatgtacgcaaaacatgtaataacatatgcatgatattataccaatcttacctcaattttgaatttaggtgtgccggtcaaacttagtggaacaactactcggcgaattataggctcctaaatcacattaataataacacgaataagtgactcgctaaatcacaaccgggacttaggtttaaaaccaaaaccctatctactacaacttaatatggaaataccctaaactagcagggaaccaatcaacaaaaatcatgaaactgacgcgaaatgacaagctgaattttcgggtttccctgctggaaaattcgggtaaccggctttacccagaaaacccaaaaaccaaccaagcctaaccaaatcatttccaaactcaaccaaacttttgagacctgcatattataccccaataaacca

SEQ ID NO: 143990 - DNA, 685 bp, Cannabis sativa
gtcaatatgtacattactggagagaccgtcttctcatggctgctctaacttttccttgcccttaccagcaccacagagtaccgaagagtcacataaactcagcaagaaaagtaataaatagaggtacattaaataactaattatacatttcattatcataaaatgattaaaccataacattcaacaatagataatataactaacaatatgcatcgaaatagatatactcatatatttgcattgcctaatcaggcaagcccgtgttataatgcaatatcatatataatatcataaccataatattccacagtaaatataaccagccatatgcatagaaatagatatgctcattaatttacatttcctgatttaggcaagttcgtgtcataatacaatatcatatataatatcattgcactacctcatcaggtgagcccatgccacaacctgacaccaatatatcgcatcgtctaatcagatgagctcgtacctacgcccgatacttatcatatctcactgacgcccgtacctatgcatgatacgtcgtcaggaagaaacttaacaatagttgcaatctatgccataactaggggttttcatatcactgatgcctgtacctacgctcgatacgtagccaggaatattgcatcacctaatcaggtgagcccgtacctacactcggtac

SEQ ID NO: 143991 - DNA, 1740 bp, Cannabis sativa
taggacttgtcggagcggatggttagttaataccttgattgggtgggcctgaaagtagggtcttaactttcttgaggctattaagaggcaaaaaaatagtttttcgatcaccgaatatcgtgtctccacccctatcatgcgtttactgacatagtacacggggtgctaagtcttttcctcttcccgaactaaggcctcgctaaccgcattctcggagacggccaagtatagtaacaagtcttctccgaggatgggttttgataggattggaggtttagccatgtgttcttttagttttttgaatgtctcctcgcattcgtcggtccattcaaatttttggcatttcttcaggatgttgaagaagggaatgcacttgtgtgtggaccgggagataaaccggctcagggcggcgacctttccggttaagctgtgtacgtctttgtgcttcttgggagaaggcatattcaggagagcttggattttttccgagtttgcctctatcccccgctggctgacaataaatcccataaactttcctgatttgaccccaaaagtgcacttctttgggttaagtttcattccgtatctctgaaccactttaaagcattcctcgaggtcatctgcatggcttgcacatgcctttgacttgatcaatatgtcgtccacttacacctccatgtttcgtcccagaaggcctttaaacatccagttaaccatccgttgatatgttgcaccagcattttttagtccgaaaggcatgaccaggtgcagtatacccccttatcggtcttgaagctagtgcattcttgattcgcaacatgcatcttgatctggttgtagccgtcataggcgtccatgaaggacaatagcttgaattcggaggtggcgttcaccatttggtcgatccgtggtaggaggaagcaatcttttgggcaggccttgtttagatcagtaaaatctatacatacccgcaatgtcccatttagtttaggcaccaggaccggtttggccaaccattctagagaatacacatcccggatcatgccactagttagtagtttgtccacctctttctccagggcttctgccttcactgggtcgagaggacgtcgcttctgctgaactggtggtatatccgggttaacgttgaggacatgggtatgacatgcggacttatgccagtcatgtctccttggcaccacgaaaaaatatctgtggctgcccttagtgcttaaattaatttttctttttcctccggctctagtcttgttttattttcttttgcttatgtgcaaagacttcatgccttttgactttatgtgttggatgttatttttttttctttgtttgttttgttggatgttattttttttttctcttctttcttagttttgttggattttatgagtttgatattttttattttatgcatggtatgtgttactttatttttttttctctttattttgtgaattccttgccaccctttttgatgaatcaaaatgaggagaacatccatatgattatttttttttgggcacaaactcaatttttttttaggatatctaatttttcttaagtataaaattgaggttttcttccacacattaaggggagctaatccaatatacattgtttaaaaattttcctttccctttttaaaataatcaaatatttgatatcataaaaaagggggagattgttaactcaaacttttaggtctccttgttttgatgatta

SEQ ID NO: 143992 - DNA, 650 bp, Cannabis sativa
  modified_base (38)..(50): a, c, t, g, unknown or other
  modified_base (76)..(88): a, c, t, g, unknown or other
ttgtttattaattgcatgattactccactataaatatnnnnnnnnnnnnntccactataaatatagaattgaactnnnnnnnnnnnnngaattatatttactgagttttactccagtatccaatgatataatcaattccattaattagccctccttgtattgtttcgtaattaatttttgtcaaattaatattttatctttctaattacttctttatcctttagtaccgttaattcactagtgaaagtaaatttatgcaaaacttttcagctcttgaattatcacataaagggaaccaatatttgatttgttaggaaagtcaggattctataattgtagatcatattcccagccatccacattattaggatcccaaaattaaagctgtaagaagtatcttctctgagaaattttaacaagtgaatcaaaaaatctaataacatgaacatgagttcatgattacttaagatttaggctgatatctactattgatcatcattttgtgacatgaattaggtctttatagtaaacggtaagtttgataaagtcaagtttattcatattggtccttgtcatatataatctctattatatacatcaccttcacttagatgtcatactatataagtaatccgaatcgagattacttg

SEQ ID NO: 143993 - DNA, 1379 bp, Cannabis sativa
  modified_base (837)..(844): a, c, t, g, unknown or other
gtctttttgacaaattgggcaatgttcccagcttacactttcagacacttatgcttgacacagtttgtggtaaaattctcatgtctttgaaaatggtgttataaagttgttacatactgtttgaattgcctttaatattctaggtgattgagtccacttttttagaggctgcttgataaaataatttctgactattcttttgagtttgattttttgatcagggacaaagccaaacggacattgtgtattttttgttggcaaaaatatcaggttatgttatttttgtctgttttataaataataaaaatatttgtggccaattttgtcaattgagctttcttaaaaattcttgttatttttcttgttgtgttttattattttcttagacactattttttctctaatgtgttgattggtgctttatgtatctttgagtgttgtcttgttcgttctttgcaatttaatatgggaggcttattttgaaaaaattctagaaaaaggggagcataatttttcgaatttttcaaatttttggcctacttttttcttttattttttcatttatggaaacatgtttttattgcattttatctattgtgtttcttttacttttgttagggatttgcttttatttttttgtagtgtttttggaaacttatttttatttaattaattattttgttggtttcctttttggtagcattttcgaatgttatggggatttttaattcttagattttgtggggatatgttgtttcatttttccatttatggtaatctttgacaaatttttgaaatatctttttggtttcctattttctctcctcacgtggtgannnnnnnnaggaagttactttccttttttttttttgggtaattatgttcaagtgttatatatgctcaactacccacatttccacgatcatcactattcactcctctctcattttttttgttcaaaagtctaaccttcttcaagtttgagagtgtgtgcttcctagggtttcaaagaagaatggctaaaaccataaatgctcaaccgcctaagaagccctctcgtggctctgcttctgcatctctgatcaccccacctgcgccatttgctccagtgaccggagtccctggtttttcgtctgcttcgacaacctctgccagaaattcaaagaccgaagctcgaaagtcgacttacaacctcgattctcctccagtcattgcctctccgattgctactctaactcctggcttggtgatcatgatgaatctcattcatccaatcactcgttgtcaaagtcttcctcttcaaatggtgctccaaatgtcaagaaagcaatagtgcccttgcccacggtgcgtgtgggaaatattttaccaggatctag

SEQ ID NO: 143994 - DNA, 895 bp, Cannabis sativa
tagatctaagatcctagtaaaaattaattccaacagaaaccctccaggttgcactgccgcgatatgtacaatcacttgcaagctccatctcactgttcctccagcttcgcttttcctttacctagacaaggtagcaaactaatgaatcaacagactgagtaagctatgcaagacatatatataagcaatgctagaccagcttattgcttacgccgccctgagctcaacaacgagctcaccaaatggttaagaacgttcttaagggaagtacgactactgtaccaaatgcactaaagtactaaccctatactcgtgttggtagagccattattgtactccctggaattactaagtgttgtaccacatgcacgacgtaccccctggtactcgtgttggtaacatcgtaaccataccgatatcctacactatactaacacccttaaaatcacataaacaattagtgttagtcgtataaatagttaaaaacaagcatatattcatatatacgttattatgctatcttacctcgttccgtgctcaagtgtgctggtaagcctgagtggaaacgcagctcgacgctttacagggccctaaaccataacgtttcaaattcgatgagagacacgctaaatcacttatcggggatttaaaaacaaaactaaagataaccctatcgataaataggatactaacaacttaaataacacaaaaatggggaaaactagggttccggaaaaacccccaaccggcagaccggttcccaaccagaagcccgattattgggtaccaaccggtcgaccggttctatgagtcccccagaactggtcgaccggttctgtgctgggaacccgaaaaccgatccccacacctcaattcaaccccaaactttccaata

SEQ ID NO: 143995 - DNA, 1063 bp, Cannabis sativa
agtattgtaactaaaaatacatttagtcacaacacaacaaattataatttttgtaactaatacatttagctacggaccttttaatcacaacatagaactgataatttataattaatcacaattttttttacttttagtcacaagtttttttgtgactaaaaataagcttttttataatgataagaagtgaaattgaaagaataaacgtgtattaattattaaaattacaattctatcattcataacacaattatttattatttttttctttttttttttcagataaataccattttggactatatattttgtaaaaattattaattggatcatctgttttgttaaatgataaaatagatcctggattgatttttcgtcaaaataaaacttaataataatccgatctagagatgtcatgacaaaactagtcacattttctgtatctgttcgtattaaaaattgtcttaaagttagttttattaaaaaaaaaaaaaaaagagtaataattggcggcataaatacctaattttaactctcagttgcaaacaaatacttaagtttaatattttacgataataatacctaagttatatttctagaactatgtaggtacctaaccgttaaatgttaagtcattatatccacgtgtcattttcttattggtatatttgaactaatttttttaaataataaaaatttaataacttggactaatcagggattgccacgtggcaatttctatttaaccaggtacgtacctacagaagtttaaaattataacttttgtattattactgtcaaaaattaaacttagtatttatttgcaactgagagttaaacttaggtatttatgccacaaattagtcttaaaaaaataaattgttaaaaattaagttcagtgtcctatttttactattttaaaaaatataaggtctattttgtcatttaacaaaacggagagtcaaattgacaacttttacaaaacataggatctaaaatagtatttaccatttttttttaaaaaaaaaaataaattatgatattatataggctaattaggatt

SEQ ID NO: 143996 - DNA, 1322 bp, Cannabis sativa
aaaccacaaaggttcggccaattccatctctatttgccgatcaacctaacttgatatatatatttttttacataattttggaagtttgatctgtaattttcatattgtatatataattatgaaagaaagagaagaagaattttgtaaaatctctgcttttattcttaattaatacagaaatttattaaagcatgattcttccaaattctataatatgaatctaaaagtgatattatatgttcttacgaattaatttatattcggtaaatggtttagaaaaatataaataataattaattttcttataaggtcgaaactggtttcacagattttaaaggttttataatgtgatgacttcattttatgatttttttgttttaagtttttttatattatttttttttttctaaatttgaaactggtttcacatttatattatgttcttaaattatttttatgtgttgtttccgattaattttgttactgttttttttttaaaaaattattgttcgaaactggtttacatattttgagatttctttaatagggttgctctattttataatgttattacaaattttttattttaagttactctttttattattttatttctaggttcaaaacttacacttatattttatttaatttcaaattattggtatgattatatttgtcattaatatttttattttttatttttgtatgtgttttttatttttcatttgattgtttgatgaaactggttttagttaactttattatttaacatttattattttttatgatttttatagcgtcaaaattggttttacagggtcgaaactgatttcacaggttttaactgttctgtaatagggttgctctatttttatgatgttattgtatattttttaatttgtgtaaaattagttttattattgtaagatatttgaacaacaatttttgtattattttaaataatcagtttctaacacacattattttattatttttagaactggttttttaagtaactagttttcataactgtttttttttattgctgttcataattgagttttaagttttaattttttatttgattatttcaggaaactggtttttattttagttgttttactaactggtttctcatattctactattttttttagtcttttataatttttattgcattttgtctctttaattttctttgtttttttttttctctttgattttattttatgtttctctttgttatatgtgctgcatattgtatgcttaaatcaactctagttttttgagcaagtaaataaaaaattaaatgccaaaataaa

SEQ ID NO: 143997 - DNA, 516 bp, Cannabis sativa
  modified_base (34)..(70): a, c, t, g, unknown or other
  modified_base (433)..(435): a, c, t, g, unknown or other
atgcaacataaaagcgatttctgatctttattannnnnnnnnnnnnnnnnnnnnnnnnnnnnnnnnnnnnagggcacaaaacccaacaaggatacgaacttggagttttcaaaatttgtcctttgctgggagagtggttctcatcaactaagtgttgatggccattcactcttactggtgccaagttatagtgctgcccaaaagagttgtgtgtgaaattgaatctatctgtcgtgatttcttgtggaatggtaaccatgttcttacatggacaacaattgttgcttggagcaccctttgtctttctaaatctttacgaggaatggggtttagaagcatttcagattggaatgtgacagccatgttcaagtatgtttgggccattgccaaaaaaaagataacttgtgagtgaagtgttggaattattttaccnnnatctagatttactaccgtgtatgttattcaacatcctaaatatgaatttctaaaacaatttaaataaacacatataaagtt

SEQ ID NO: 143998 - DNA, 674 bp, Cannabis sativa
caagccataattagttcaatgaaacgcctgggaaataaaaatctttccataaccttgcgaatgaaaacccattcaacccgatcaaaggctttggccatatctagctttaatgccatccaacccaaccgaccggatttacgatgagagagagaatgcataacctcctgaccgatgataatgttatccgagattaaatgggaaggaagaaaagcactttgtgtgggagaaatgatacgactgagaatgggcttaagacgattgaccaagacccttgaaatgattttgtagaaggtggagcaaagactgatgggtcgatagtcagttatctgctcaggatttgtccgctttggtataagaacaatgagcgtctggttgatggccgctaaatctgcatccccgttgaggaagttgagagcaacaatggtaacgtcatgacccagtaagtgccaattcttttggaagaaactgccactaaagccatctaagcctggagctttatcatgagcgagttggaatgtagcagttttaacttcattagccgtaaaagtggcctgaagaaggtcaatttcagcaggggtaagactctcagaaatgcctgaaagaacatattcaatgacttcattgtcaggcgattgactttgaaaaaggttagtgaaatattgttcaatggttgc

SEQ ID NO: 143999 - DNA, 709 bp, Cannabis sativa
tttttagcacccttacccttacccttatccttatccgtaccattatctgtaggaatttcatcaagaggaggttgttcctcattaacaccattatcatcatttagtacctaatacaaagaccaaattataacaatatacaaagaccaaatcgtgatatcactcgatacaaaatttatttccaaacaaaatcaatagatttatgcaaattaacaaaatattaaatagtgtattagccaatagccatcaattgcaatatgtttaatcttaatttaaaaataaaaaatgagagtataggtttaccataatgtcttgacttttttttttgtcttaaatttcagtcactttcactcttttagtccaaaatggatatcttcaaatcttctctttgtaatctatattaacaaaaaattttacaatgttaatttatatacaatattgactaaaaaaatcatttacaaaaatatatataatattttttaatatatgttattctttgatagatttaaaagaaattaatttatttgaatttttctataaaaatttcgcattttaaactttaacataacccaactattattgtaaatgatattaattattgtaaatttataatattattgtaaaaatttctggattttaaaatttctccatttctacattacaaatttacaatatataatatatatatataatataactgttgggttttatg

SEQ ID NO: 144000 - DNA, 825 bp, Cannabis sativa
tttattttattttaaaatttaataatattcttaatatcaaaaaataaatactacttgtttttaaaaaaaaaaaataagagagatgcaatacttaattaccacagctgagtgaaccagtgcagtatatggaacatgattatcgaattgaagtgtcaatatcatgtgaaaattgttatgagcactggtttttttttaacaactaacatttagtttttgatattaaaattattaaattttcaaataaaataaaaataaatattgcaatgtatctgaaccctctatgtgtccatatttatgagttaacggaaatagtagtgacggtgtaagagaattgtaacattagttatttttgcctccaagaataaacattaggtatttaagtatataaaatttgaaacattagatatttatatcgcagtttacccttcttttgatgtcgcaatttacctttctttttaataattgactctaatttgtcacacaacacaaataacaaattttggaaagaactctaacgagtcacgtgcatgctttatctagtatatatatatatatatatactaggaagaaattacgtacgaggcacgtatacttaattttatactaagtatttacactattataaatatcaaaattcacgacggtcctaaaaataatttttttcggggaccgtcgctaaaaaaattaagtaactatttaaaactctcgcgacggtttaaaatcgtagtaaacaaaataggcgacgttttttaataaaatgcaaatttttaggagagccttataccctacggtttataagagcccattaaaaatcgtcacctactt

SEQ ID NO: 144001 - DNA, 1759 bp, Cannabis sativa
ggactgccaaaaagaaatttcttgtattccaagaattattcagtggacttgtagcagccagccgactttcaaaattttaaagactacaatttttgatgtctctaaagacaaggtatttctatttgtttttttagggttttttattagtacttgttttgttgttgttttatttttaaagagtcactcttattgatatttttccattttataatatgaaatccactgctgctgagttcaaatctttgaaattgagcagtttcaagtttgacactgattacaattcttacaagagtgtgcctattccagaacaaccttctgtggttgagagtgacatatctatcaagcttaatagtttttctgaaaaagttgatggtttggagattacgattgatttgttgcatacttcccaacagaagatttcatctgatttggttgagttgaaagagtttgtttcttttgctactcaaatgactacaatgcagacacagttatcttctgttttattgattctgttgctaaggtatgctagtttttttataattgttttatagtttatttttagttgtgttcatctggattttgattacattttcgttgcaggaccaagtgagtgactcttgcaatgatgatggtggaagtgataatgaagaagatattgattcagaggacaatgaagaagcatctgataatgaagaggaagatgctgaaggtgtagatttcgatgaaggtagtggtgatgaagaggaggagggtagtgacggagaggagaaggatgaggatgataatgaagattcagagtccaaaggaaaaaatggtaagggtagtgattatgaatgcgttgatagtgagaaaaaagtagataattagacaatgtaactaagttttagttactttctatgttttactttattgtaagtccatttagttgatggattagtatttttatgttgttgttatgttattttatattttgtcgtcttttttctgtattaatttgccactaatagtcatactcttaatttgtatttcttatgtttttgtaatagttatattatagattatggtgtttgcatttgatcatgatctttttatttttttcttatttttttgttggtttttagtttatttgaagttgtttttaagttttttcaaaaagaataactttattttttttccctttttttgtttgtatttttttattatcaagaattttgttgctttcaatgatggagccactcaaattgatgttgaggctactgttcagtcgggtgtgaaagcagttgagaattgagattatgataatgctatttgtttgatgttttttggttgtttaatggttgtgattgtttagatttttttttctaactatttttttataagaaaaaaatagatgtcttcaagtgggtttagtggtgattctggtaattaggttccacattttgaaaattttgagattaaggagggtcatggtcttggtgttgaggtatggttgtgttgcccttattttctcccaaaatacgtggacttggataaggctgacatctggatctgtgaggattaacacataaaaaatcgactaagtcctaggcgaaagggaagtatctcagggaggtgactccggaggagagcacaagacgtatttctactctccgagaggccggaggtatgataaggcagttctgggaggtgcagagatctcttgaacagtcacctcgcatttaatgccacatgggggaagacatattaaaatctccataaa

SEQ ID NO: 144002 - DNA, 700 bp, Cannabis sativa
ttaagcaagtaaatcaactcttttcttcttttattgaaaaatcaagaattagacaaaagttgtattttctctcaagtctctctctctctctctttcgaacccacctagcggcagctaggttttggttggttcttctgcatttcaagcttgttttagcaaggaattagtgatctcaagttcttggtaagattcttgtagctttttctttatttccttaagttgtaagaaatgaatttttgcatgctttgaagtgttgttgctgtagctgctgtagttagttgttgttgtgttctgaggtttagatatgggtttttatgttgatttatgcttaaattggaggttgttgaagggttagtcaagttttgagtttttgaagtcaatcttgaagctttaatggagaaattcgtttctgtgaatggatgactgtttaatcacttggaatatcttctttgtggtctatatagcaggtctggagagtttggtttgatttggggttgatttgcatgagatatgaatttttgaaaaattcctgcactgaatcagaattccgattcagggaggcctgtaggaactggaattccagttcgcttccaggaatttttcccagaactggaattccggttggggaaccagtctaccggtttgggcagtttttggaactctagtttttccatttttgtgatatttagggtattgccat

SEQ ID NO: 144003 - DNA, 842 bp, Cannabis sativa
  modified_base (49)..(54): a, c, t, g, unknown or other
cctgacatattgcttgtacatagaattgaccgctcgatgggatacatcnnnnnntactgcactggtccacctagtatggcttctttagggagatgcaaaactacgtgaaccattatattaaagaaaactggtgggaaaatagtttctaacttgcacaaaatagttagaacatttgtttacatttttctaaattagaaacattaagtgttcttgaacataattgtttgaaatacacatacaactcaatgattgtgtcccgaattttttttttcaagtacttacggatacctactgacaataaacgttgtaacaacacatgacaattatgggatttgagcccaaaaatcttgtcggtatccaagtttacatttttatctaagtttgctgcaaaaccgttcggaaattgtacaaactttataaattctacaaattcagtgagttcttgaacactaagtgtgttactagctagaggttttttccacttcccatttcggtcttcatacaaccacaacacacgtcatatttgcaagtcttgcaaattcattctcgccttctcagtatcctttgacttcccgtcgatacttagaagagtacctactaagccgtcacacacattttttgcttctccttcttggatcattcatttcgagaaaatgtttgtggccaatgtatccaatcttactgtttaggacaatggaaggagtgtgttcattgcaagtgggacacaccatgtaccatttcgtgttccaaccagacattagagcataagcagaaaaatcatttattgtccacaacactgtcgcatgcattgaaaatacaattttgttgtaggcatctcgggc

SEQ ID NO: 144004 - DNA, 1024 bp, Cannabis sativa
aaattttaatataaatttaaaatataaatattattgatattttaaatcatatttttaaatttattagtttaattttaagttaaaataaaagaaaaattatatatgttgatattttatataaaaaaattgaaatttaaaatattataaatatttttaaccatattttaaactttattattatttattttatattttaaattaaaatagttgtaataagaaattgattgctttcttttttagttatggtaaatcgattcatacaccatatttttcataaagtttgggaataaaaaacttttatatcaaatttacgtatccaacctgtatatagacacactcaaatttggttatgtgagttttgggtaagaatataataaattacaatatatgcaccatacgttatctaattaaaaaaataaaaaatttaaaaaatacgtacatatataatcacattcaaatgacacaccaatgtagcaatatagctaaaaaaatttcttaaagatcaaaatctcaaacgttcatttcaaaaattaaaaaaaaaaatacaatacataattaaaaaaataaagcatgcatgtattgcactaattaacatcacttaattgaacttaattaaaaaaaaaaactaattagacgtgcattatatatacgtaacatcaacctagtatatatatatatatatatataaataattaacctgaagtgaccgttaaaagtaaaaataaatataataaataaaatgaggatagccaaattattgttagagattttattacaatggaagataaatcaagatatgtacaactcaattataaaataatacaaggatcaacaaagagattaaattaatgttacaatacataatatacaatatatatatacactatatatattatatatataagaaaggtagaagaagataagaacaacacatgtaatataatatatatatatatagcaagagaagaatatatatatactaactcacaactttgcgtgtagattagtggggatcaccatgact

SEQ ID NO: 144005 - DNA, 679 bp, Cannabis sativa
actcaagtagacaacaatcacaaatatatctcttttatattaaatgtggctatatcatgaaaattgttggtttaacggtttatttttatttttccattaaagttaatgattaaaattaactaaatcaatcaatgaattattattttttaagaaaataaataaaataattttaaatatttaaatttaatttatttattaaatataacttaaataattatttaaatttattaacaaaattagataattatttttatacaaatcttaatttaaattataaaggaaaaaaaaaacattaaccaccattgaaaatcgaggatgtcataaccctcatattttacaggcagttaaaaattagtatcaaataaaaaaagttgtttagtagttgttgtagagttgtaaacacgttgtatgcttttatttattttaaaaatatgttgttttcgtgttgtttttacgtaaaattttagttgttaaaattcaaaaatttcttaaattttaatatatataaatatatatatattgaaggtaaaaaatataaacaaacattaactattacaattgaactaatactcgatacataaactttagtaattctttgttataattgttaacatctatataaaaacatgaaaacaagagtatataaaatttaaagattctacaaattttaactactgaa

SEQ ID NO: 144006 - DNA, 576 bp, Cannabis sativa
  modified_base (530)..(537): a, c, t, g, unknown or other
aacacacatattaaatgcctattcgaactaggaaacccccaacacccacatgagagaaaaatatgatttttgtgctgtttaggggggcgggccgcgccccctgttggagttcaacagtgatttttctgctgcatcgattgatagtattttggcaataactttcttgttattgctcggaattggacgattcaagatgttctggacagataaaatggagatatagaacttttatgttttaactttttccaaaatctaatcagaaggtagtctaattcaggattgaagttttagctttattttcttgcaaaattttctctattttaaatatcatctttttgttagatatttttatcttttttttcatctttttcctttggtattttctaatcttgttctactttaaacctgcaaaaataaaagataaaaagcgtgaaaatgctccaaacatgattaaaactaaattaaaataacctaacatctgacattatacactttaccaatgcactctgtaccgcaaccgtacaagtgtnnnnnnnntatgaatcacaacatataagcatgcatatacactaaaca

SEQ ID NO: 144007 - DNA, 561 bp, Cannabis sativa
agtctagattattaaattcaagagtgttatcttttttttttattttatcataaaaacatatgcaattttttttgttcattccactatttaatatttgtcacaaatttgtcacatttctctgtattataaaataataaattatgtttttaatttcaaccattttactagatttataatgcacacatcaaaatattatattttcgattatatcattgaataagtaaaaaaaaattataaaatatttataaaaattgagcaacaccgcgcgaagcgcggcttagtttcctagatcattgacaactgtaataaaatgaaaaatatactttatagtaaaatgaacgtacatttaaaatattgtacgtacattaaaaagataaataactacttttttttatattttatttaagaaaacaaagtagcaaattaatatatgtacaacgctcgacttagttctattttatcacatttcctattttgtttgaaaacctaatcatatgtacaaactaaaagtctcacattgtttaaagattgtttaggtttaatatatgtaggttataaata

SEQ ID NO: 144008 - DNA, 691 bp, Cannabis sativa
taggacccaagactgggatcctgatctggacccagggcttggacctgacccgtagtctatgtttggatttgggatccatacccgaactcaaacccatagccgaactcaaacccaaacccagacccaaacctccgtaccccttgacttgaaattggaactggaaccgaaagtggactgggacatgggaataagaccagggaactaggacccaacctcagacttggaccaggacgtggacccaaatcaaaactttgattatgactaaggacacgaacaaaaaccagacatgaacttggacccagacccagacgcaggacctgaaacgagattggagactcagacttggacccaggtcccagacctagattgggaacccaaacccgaaattagaaccagaatcgggacccaggactgggatggggacccaacacccgaccccggtctccactacaacaaaaagtacaattctcgtcaatttttaagtgtcatttaaagaatttgcgtcggtttaaaaaccgaggtatatactttagtcgcaaatagttttttataagcgtcattttttaaacgacgcaaaaaaccattatcttcatttaaaaaccgacgcaaaatatacactcttctttttcatcttctgcgtcagtttaaaaatgacgcaaaatcgtttgttataaaatgacatataaattgc

SEQ ID NO: 144009 - DNA, 1357 bp, Cannabis sativa
  modified_base (39)..(42): a, c, t, g, unknown or other
  modified_base (69)..(72): a, c, t, g, unknown or other
tattttctaaaatcttacaaataggatcctgaactgatnnnnacaaataggatcctgaactgatttttnnnnaaaataaaatttaataataatctcatgcaagccgataggttgcatggccaattttctcagcgataaggtatgggccttcccaatcgtcaccaagaactccatgtgctgggttcttcgtgtttggcatgactttttgcagaaccaaatcccctactcgcaggcttcgctctttgaccttcgaattgaaatagcgagcagttcactattaataggttgcgttctttagatgagcatgatcccgcttttcttctaagagatcaagttcaaggagctgtttatctacattttcactaaggttgaacacatctcttcgtagggatcctgccccgacttcgactggtaccatgacttcgcactcataggagagcgagaagggggtttcaccagttgtggatcagggagcttgtattatatgaccataaaacttatggaagctcttttggccatacccctttacgctcttcgagtattcccttgatggtgtgcttaattatcttattcactgcctctgtttgtccattgctttgtggataggcaaccgctgaaaatgcctttttaattcccaactcatcacaaagctggcgcatctccttacagtcgaattattttccattatctgagattaatttgtaaggtatgccgaatctacagatgatggaattgtacacaaactctcgcaatttaacagctgtaatagtcgcatgggcttttgcttcagcccacttggtgagataatcgactgcgactacggcgtattttactccgcccttcccttttcgtaattctccaatcaagtctatgccccagactgcgaaaggccagggacttgttatggagattagttgacttggtggttggttggcatacgtggctatccaataacatttgtcacactttttagcaaagtttgaagcgtctactcgtagtgtcgaccagtagtatccttgcaacattgtttttaaagcaagggaattatcccttgtatggttgccgcagatgccaccatgcacttcgcggagtatgtagtcacacgcagttccatctacacatttgagcaacggatgactgaaacttctacgatagagcctaccaacataaatgacatatcgagcagctcgataccccaattttctagcctctattttatcttcagggaggacttctttttccaagtaatccattatctgggtcatccaggtgacttctttgactgtatctacctccattacctcgctccgactcactgttggatgagttagtgttggaagttattttaccaggaact

SEQ ID NO: 144010 - DNA, 543 bp, Cannabis sativa
caattttaaaatagatatggttacataattattattttaacaataaaataacaaataaataataattatcaaattatgtatatcaaaatatctcaaattaagcatttttcaaatttctaccaaaatatctaagttatttaaatattttaaatattatttataaatatctaataagtaaaatgatataacatatcatttttctaacttataatttataaacaataaaatatttaacataataataatttattctgagaatattatggttagaatatctataaaaatatcttggtgaattttaaatttattaattatttaatttatcatataagattattttactataatattttaaattaaaaggataatgctatcttttagtttaatatatacctaatattaaaatacataaccttataattaaataatatataaatattaaaggaattaacaaattaataataataataattaataaaacatttattgataaaaaaaattaacaattaataaaacaataattaattaaacaatacttcataa

SEQ ID NO: 144011 - DNA, 690 bp, Cannabis sativa
actagtaaacaactcgcgcttcgcagcagatatttaaaaaatataaaaaattatttacataaaataaattatgtcttttatttaatgataattaagtcttaaaattgtataaacttttaacataattaatttttcatagaattcatagaagacgccacgtcactactttatgttttattctttatgtaactatatattgataaatatagattactaaaattaacacctgttatttttttattagttatatgttttttttgaattttttagttttatattaaatattaagttttaacataaaaaatttaattaaatgataagcagaattattatgataaaaatagtcatataaattatgttttgctttatatatatagatatatacttataaattattgtgtatatttatattttaaattatttgaaacattgttaaaatatttagatatttattaaataataatgaaaacaaaattaaaaaaattatcgaaatttaataaaatatttctgtttgttaaaaataattaaaacaaattaaagttttgacaaaatttcaaaaattcagttatatatgtttcattaatctaaaaattataactaattataagcaagaatcatcaattacacatacaaaaactatgtaatattaattttgcacaaactaatataaaagaaaggctaattaggatt

SEQ ID NO: 144012 - DNA, 543 bp, Cannabis sativa
tattctaattcacaaaacacctatttaaaacaaattgtttttaaacttaaaacaaaattaaaccatacattaagctttccctcttcaaggatttgctatcttggtactattggagcttaggtcgctacgttttcgattgaaaatcgaagaaaatgaatatatggggagaaggttttatcgaaggagggagaacgagggtttcgttcattcattcgttataatatatatatataaacatgagcgtgaaagttaaaattgtaataatatagtaataatataataatataatattaataaaaactttattattaatagttatcttactattttttagccactaagaaacttctatttctagggtaattggccaactctgagtaccccaaaatactctggtatttctaaaatcaacttatcccaataatcgtatcaatatttctaactaaaataattgtgacatttttggcctccaatcgggtctctagggtcgccaaacttgaaaatatttttattccacatatagttcatattacattcacacat

SEQ ID NO: 144013 - DNA, 1338 bp, Cannabis sativa
  modified_base (1301)..(1308): a, c, t, g, unknown or other
tatttgtatgtggactgtataaatgtttaatgggccggcccatagtatttttgtaaatttttttctttttttgtatttttctgttttttccctaaatataatttattttaatttttacaattaatattctaacactttctcttaaaagagagcatagatgttaatcatgtccaacttattacaaagataattaacgtacaccttattcaaagttattgtaaaaatatctcctaattattccccgatcttcacatattttgtggagatcagactttgttgagttttctcacgaataaataacaatcaatctcaatgtgtttagttcgctcgtagaatacgagatttgagacaatatgaagagcatcttgattatcacaccacagttttactgaaatagaagtcttaaacccgatttcaatcaaaagctgataaattcatattacctcacgcacagacggtaccataactctataaattgattcagcactggacctagacacaacattttgtttcttactctttcaagaaatcagattgcccctaacaaatacacaatatcttgaagtggaccgtctatctaccttggaacttgcctaatctacataagagaatcactcaatctgggcatgtccatgattcttgtaaactatacctcgtttggtgcccctttcaagtaatataaaatttgttctaatgctgcccaatgatgaattgttagagaagacataaattgtctaatgacactaactgggaatgcaatatctggacgagtcacagttaaataattcaactttccaaccaatttgcgatatttctcaagatcttcaaatggttttccatcatgtgtaagatgcataaccgaattcattggagcattacaaggttttgctctaaattttcctgtcttagttaacaaatcaagtacatacttcctttaagatagaaaaatatcttgtttactccgagtaacgtcatcacctaagaaatacttgagcacccctaaacccaaaaaatggacatgaaagctgtgtccctagttttcactattttggccattttttagcttttaaaaattgtttttacatgaaataaaatttaaatttcggtagaattttgcgtagaatcttaattttcaaataaaaaatttaattatcagattaaaattaatttttattaatctatattagttttaggtattagtaggctttaaatttaaaaaattaatttatcaacaaacttgttatttttgaaagttgattattttattttggtttattaattttaattataagatcaaatannnnnnnnttttattaataaaatttgaaatgatcttat

SEQ ID NO: 144014 - DNA, 614 bp, Cannabis sativa
aaggggttggattagagtggaggaggagcctccttgggctcctatccaagttgagttagaagcgaactcgaagactggaagctccgatacagagttcgagttagagaaggccgctccagtgaggggaaggagataaatgacatgttttatcctccctaaccatcttttaggtcattatgacatgcgaggcaattcgatgaatggtcttggcgcgccttcagtagtaggactagatcatgtcctaaaagaatctcccatgccggacatattggatttgaagccacctaagacaaggtgggttttgccagctttcgctctttctagtgaggcctttgacaaggtcattactagtggccttattgggggtgttcattgtgagattcctcgcaagaactgtagggcacacaggccccctgtgggctagctggcatggtcagggtgccacatagagcatggggcagtgtttccacttcatcattacttcttggatgtcgcagcctacttcgagatgtgcccaacacagctcatgccgaagagcattaaatatctgtcgacgatgttcattttgtacagggatcttggttggcctttgcctaccccttatgagattgggt

SEQ ID NO: 144015 - DNA, 539 bp, Cannabis sativa
gagtaattttgtgtgtttttttataagaaaaatgtaatacatttgaataaaatagtgggaaaattggcaataaagaacagcaagggtggtatacgtttttttatcattagactattcactgcaaaaaaaaatgataatggttgtactctaaaactactgcataattaattaagcattaggtcgatatcaatatctctgtaaaaaaaaataacatatgtatttcttgctttctcttgttattaatcatcttttcttttaatttgttattaatcatcatagaatcttggtactatatttaaaatccttgtgcaagcccctatttcgtgtgttaagtcttaattgtaattggttcttgtagctttatatttgtgtgcattgatactgagctggaagtgtgttttcggtttatgaagataaatatttaatcattgatactgttgtatttatttatttatttatgtaatgcagacttggatttacaggataggaagaaattctaaaataagttgatgagttcttgaacaccaaggttgcacctc

SEQ ID NO: 144016 - DNA, 962 bp, Cannabis sativa
gagggttggtggtggtggtagtcatggtgtgcattttggtaggggttttttttttaatttttaaagaattttttttttattttttatttttaaaataattaattttattataattttaaatattagttacgcggaccaataaaattgtgccacgtgtacattgtgtacacacagacattccaccataacagttaacaactaaaaatggatggaaatattaaactgctaacaaaacacgagtttagggagttttaccaccaaaattgtagaattggcagttagttgcaaaaaacctggtcacttaaggaggttatgccgcaaattactttatttaaaattaattatgatgtagtttttaagagttaatttgcgtcgttagattaaatcaaagactataaattactatccttattaataggtattttactcaatctctattgtaatagctcccattttatgtatattgtatctatgttaaaaaatattattttaatagtgcaaaaaaatgaaaaagtaatattaatttaatgatgtagagaaaaatataaagaaattgatgtatgttgtaatgtaaaattatgttgtgaaatagagaaaataaaattttgatgatgtattttaaatgataagtgtagctgttggagtgctcttaggcactaatagtatctagtaccatttagagttatcaccctgtaaatagttagtgatataatacttattaaattaattatgtgggaatagatatttagttacgctattactttacgtgggagaattgctatattattgatgtccaataataaatctctttatgtggtgctacctttgtgtttttagatttgttttttctttttctagctatcttagagcatctccaatagtagtatttttaaggatgttaaaaatttgctcattatctaaaaatataatattttattttatttttcttccacattattttt

SEQ ID NO: 144017 - DNA, 1068 bp, Cannabis sativa
atatttcttacatattaaaatgatcacgaatgtatttttttttttttttttgagctaaaataactagaggtgcaataaaaattatttttaaagaaaatctattaataaagaaaaattaatatttttttaaaggaaatttaaaaaagacacctacttttagcttgggaagataactaaaaaaagaagaataataaaaacaaaaagtgcaagagtccatttttaaagttttacttttataattgaatacaaagtattcttgcctgatattgaatacacggtattatttgctacatgtaactttaattttgaatgattatttatttaaggttattattgtaaataattttgtaattatgtatattaatgtaaaactcccttatttttatagtaagggcctaaaaatttttttttacctatggttcatttcaactcaggatcggtcctgggtatggttatatttattggggtatattcattttattttctatggtatatgaaaaagaaaaggaaaaaaaaattgtggaattaattgttttgagatttaaaaattgtgttttctaaactagtgttttcgatataaaaatttgaattttgtatgtgaaaaattgtttctaaaaatgtgatcagttgtagtgtaattttgtgtttttgagttttaaaaagttgaatttgtgattggttgaggatctcaaaataaaaaagtaagagagtatttgaagggtttttagattcaatgatttgaaaatatagaaaacataaaattattgttttcatttttaagcttaaaactcaaaatcatattcagatttagtttttaaaaacaccaaatcaatcaagtacatttatgtggacctccactttttaagatttcaaaaacataaaattgttttcaaatctcaaaccaatcaagccttaagtatctcgcagactaaattttaatgtaaatataaaacttaagggtgcgtttggaaagccaccatgtaattagatttgtgtgtaattggaggtaattacacaatttgacatgtttgtctgaccatataattagaagtaattgtgtaattacta

SEQ ID NO: 144018 - DNA, 655 bp, Cannabis sativa
tcatacacgaagaataatgtgcatgcgacagtcatgttgaatttttgtgaagcaagctctagcttccgtgaggaaaggctaaagttgcataaaaattcaaacgatgactttgcttaaaagagaccaaagggtaaaacatcactgggcgtgtgatagaattcaagcagtccttctctttcaggaaggatggttgaagacatgacgtacccccagtgatctttcatgcatgaagaacaacgtgcatgcgagtgttatgtttaatttttatgaagcaagctctggcttccgtgagggaatgctaaagttgcataaaaattcaagcgatgactttgcttaaaagagaccaaagggtgaaacatcactgggtgtgtgacagactttaagcagtccttctctttcgggaagggtgtttgaagatgtaccgtacccctagtgatctttgatgcacgaagaataatgtgcatgggagagtcatgttgaatttttatgaagcaagctctagctttcatgacggaaggctaaagttgcatagaaaatcaagcgatgacttcgcttaaaagagactaaagggtgaagcatcactgggcatgtgatagacttcaattagtccttctctttcgggaaggagggttgaagatgtgtcgtacccttagtg

SEQ ID NO: 144019 - DNA, 749 bp, Cannabis sativa
  modified_base (474)..(491): a, c, t, g, unknown or other
aaagcgaatatgggaaatcaaaagcaatcaagtgcagccatcaaccgtggtgagagaaaatcagattttgaaatattaattgcattagagcatttattagccaaaaactgaaccgatgcctagttagcctcacatcgagtcgcgaacaaacgcgcctgacatgtgtcacccattcaaacgcaaagatagctcgaatgaagtctacacacaacttcaaaggtcccgtacagacttggggggaaaatgttatcccaatttatgcactctgacgtggcatcacacgatggtgacacgtggaatcaactccgggtatctgctcggaggatacaagccgaacaggatacctcatatgcatgctcttgacgaagtagtaagcaacccgctcagaacgacaaacacttaggaaatttggcttccgcatcgtgagtcatcaagaaaatccctataacttggggatcagattacagagatatnnnnnnnnnnnnnnnnnncacgatcagtgtattctgtatttaatatgcaatctttctgcttatagaaattgtaacgagaagggaaatacttcctctccaagctcatagccctatatatagtgatgcatattcactgggcaaagggtcgaaaaacgttctaattgacagattttgtctaagaatttgtattcagagatactatttgaagagatataagaaaaggaacctttctccttgttcttaagtcaatacaattaacgaggattaggctattac

SEQ ID NO: 144020 - DNA, 1302 bp, Cannabis sativa
gcacgtctatagttgaacctcatagtgtgaaaccaatgctttatactaattatacatttttttttattaaacatccattttatttttaagaaaccatcatatataactcaactattttattttatctgtcaaatattataatgtgcgcaattatttagtatcggtaatagttacgattttattgggcaaatgttcaagagagaaaaaaaaaataaaaatttattaccattataataaattaagttatataaccataaagttcaccatgaatttcaatagtagtaaaataactttttttttatagagtagtaaagttactttaaataataataataatgggggattgtagcctcaagtataaaatatatatttttaaaaaaattaagaaaaatattaaaaaatatataaaattcaataaatatatgcaattctcaattgtcagaattgtacaatatttatgcaaatttggaataataacagtattacaacaatatatgtaagtattttttttttcattacatgagttacattcatacatgtattacattcttttttttttttttttgaagcatgtataaaggtttcacaaataaatagtgttagatatactaacctttgttgaattgggagaatctcgatgaatcaagtagtatttgtcatggagattattaaagccgggaggagtttactctcttgatcacttgtacaaaattctactaattaaaatatagttgtatgagatttatatgtatacatattgtttgtgtcttcaatttgaatttttttcataaaaaatagtactaaagagtaataataacttaaaagaaaaatagaaaatgagtgttaatgtaccttcatagaattataagggatgtcttgaagatttacatattctcattcattagcacatattatcatgaaaagaaaacaataattattttttttttaaaagaaatttgtttataatatagtaaaattaattacaattaaaagaaattgtaatgtacttacaggtattacttcaaatgtgggtgaccaaaaataaagttagtattgtccttgaaatatgtgtatccaaaaccagtgtgatgtttctttaaatgtaaaagaaagaataataaaattgttgttcgataaaatattaccagacaataaaatgaataaaaattaattaagggcaatgttgtacatagtaaaccaaattaataagaatctacaaaatctaccaatttcataattatatattttatatacacaattaactattagtatagtcattgtatgatttatcaatacaatttt

SEQ ID NO: 144021 - DNA, 559 bp, Cannabis sativa
  modified_base (45)..(45): a, c, t, g, unknown or other
aaaagaggtatgtttcaattaaatataaaattaagggtaaatttnaataattgattaataaaagtggtatttttcaacatacccctaaaaattatgaaaaataacgagaaaaatagaggaattatttcacaaatacaccacaaaaaaattacaaaaatacagcttcacagaatttttgaatatttttacgatttttatgattttatttacagaaaatacgatttttttatgttgtactcttattaatttatattgttatttgtatgttgttttgatgttgtttgaatgatattttcctgttacttttatgtagtttttttgctatttttatattgtttctatagaaaaccgtaaaattgtaaaaaaaaaaaaatctttaaacgttaaattgtaatttttttttttataaaaaaatagtactttatgcgtatgccaaaaatagaaggagcttttacaaaaatactggattttagacaaaaatttacaattttaatgtcacacagaatttttttaaaaaatactatctttttataaaactaccgtaaaataacaaaataga

SEQ ID NO: 144022 - DNA, 722 bp, Cannabis sativa
atatatggagagaaaatatattttttggacagaatttggccatcgatccgatcacgtagccgaatttggtcgttcacctggccgtcgatctgcttggtcgtccacctggccgtcgatcttcttggtcgtccaccttctttctgcccagatcgagagaggaaaaaagagagagggggaggcagccttctttctgcccagaccgagagaggaagaaaaagagagggggaggtagctgggaataagatgggctagggtttcttattttttgaattgttaagggtattaattagaaaaatggaaaaaaaaaaaaaaaagttataaagagtattaataaatgtgatgctcagtaaatggaatgaaacttttcttctttttttatttttttaatttattttgatatccccaataaatggtacagctagcatttatatatttataaaaataaaagaataaaaatatatttatgatatagtgacacgctaaatgggtggggatatatttattcattcacgcctggcgtgtcattatatgttaatattttttatattaataaaaattagaaaattttggattttagtctttagtgacacttcatattttaagtgactcacattacaatagactaatactgaatatttagagtctaattgtgcatgtcactaaaaatcactcttgactctttagtgacatgcacttttctgcgtgtcactatatagtgtcac

SEQ ID NO: 144023 - DNA, 1564 bp, Cannabis sativa
aacttttaccacacaatttgagagcaatttatgaaattgtatcaacatggcctaaaggagaagttgcagatgtgataatctcaaacggtgtatttcacgaagatatgatgggctttttcatagaaaatgacgatatatttgagtttcttgtagaggataaaatagggcagtgtgtgatttgctgctacttaaggtatcatagatcaaacttaatctagttctgtttatttatttaatttgacaaataaaattagctaactatatttgaatattttttcttatgtagttatttatatacttggcttgtcaataataatagacaacacttatggatgtttgtaaatccaaattaagttgcaattttgacaactaagcatgacgaccgagttagtttcttggtggaatttttttttacttatcaaccaacaacaattcacggttgttccttggaatcatgggtaaatttaattaataagcatatatatgtattatatatattgtaagcatgatagtataatatatgttcaatatacataatttattttttataggaaacattgggtgtgtgttatattggtaccccaagtaaaccacgtatattacttagaccctcttaatgcacccataacaaatcgtcctgtcattctaagaacgatcaaggaagcatatgacacatacttaatgaaaaggagcatggagatctcaaaaaacttaagtatcaaggaactcgtagtaagtatatgtaaattttaataataatttagaatttaataaattattaatgtatttgtttaaattataaattattgtagtgtcctcatcaactaagtaatgtaaagtgtggctattatgttatgaggatgataaaagatctagttcaatcgcctaatcgatgcgactatattaagaaagaggtacataaatatttgtaaaataattatcaaatataaatttatgttttatttatatttattatataatttatttatttctcttttaggttttgtagctaatagacaaaaagtcttatccaaaagctatgattgacgagatgagagaagagtgggcgatagatatgcttccacagttgtagagtcatcgcattatggatcattagttaatttttttaaataaaatttattcatgacaaatatttagttacaataccagttaaatatatattcttttttctaatacaatatttgttaattttgttacgtatatatctctatcaaatattgtaaactttgtgatatttatgataattaattttttttatatatatttactcttttttatgtgtattaattgaggtaagttatttgtaaatagtttgttgaaaaaaatatattatataatataaataattatttataatataatataaaaataaagaaataaaattaattttgcagcatttaatttttttaaaaaaacacaaaatgtctctaaatctatttttaagcccaacttagctggactagaaagggaccaagatgtaaaatggccctaaatctaataataaagttaataaatgttcttttttaaaaaaaaaaatcaacaa

SEQ ID NO: 144024 - DNA, 1029 bp, Cannabis sativa
taccaactggtcagagatagagttagaagagaagtaaggccaccagaaagatttggatatgctgactgcattgcttttgcacttacagcagctgaagaaattgaaaactgtgaacctactacctatacagaagctgtcactggaaagaatagaaaaaaaatggcttggtgccattaatgatgaaatggggtcacttgaaagaaataagacatggattagagtacgtagacctaaaggacaaagggtaataggatgcaaatggatatttaaacacaaagaagggttacctggtgaagaggtcagatacaaagcaaggttagtagctaagggatttaatcagagagaagggattgattacaatgacatcttctcccctgtggtgaaacaaacctcaattagaatcatgatggcaaatgtggctatgtttgatcttgaaatggatcaaatggatgtcaagacagcatttttgcatggaaatttagaagagaaaatctatatggaagaacctgagggatttaagaatatgaagactgatcaagtgtgtttgctacagaaatccctatatggtctgaaataggcagcaaggcaatggaacctgagattccatgaattcatgctgcaaattggatactcaagaagtgagtatgatccttgtgtttactacaacaagactcctatctggttattgctttatgtagatgacatcctgataattgggaaggacagaaaggctatagacatgctgaaagaacaactaagctctgaatttgagatgaaaaatcttggtgaagcaaaaaggatactagggatagatatcaagagacaaagacctggttatgttttcttgtctcaggaaggatatattcagaaaattattgacaagttttgcataagtgaggccaagatagtcactactcctcttgcctcacacttcaaacttgctcaaaatcaagcaccagataatgaagaagacagactatacatggacaatgtaccctatgcttcctgtgttggaagtctaatgtactg

SEQ ID NO: 144025 - DNA, 986 bp, Cannabis sativa
  modified_base (933)..(940): a, c, t, g, unknown or other
tggttggttttggttgtgaaattgcaagttttagttgtgattatattgttaattattggatgagattatgagggtattatttaggtctgaattcatgtgtttaatgggggttttgctgctgaaaattttatgagttaggtgtgtttgaagctcaagtttatgagcttgagtattgcttagttaagcttgaattttgtgatttttatgtaatctgaattgagggtttattgttggattttgatgcataattatgtgttttaaatccctagtgtttgctagcaactctggtttatgatttggaagttttggttatgaatttgaatgattttggttgagatttatgctgaaaattcgtgttcttggtggttggtttctgggttttgaacccaggtgtcgcgacatcggttgggcatgccgcggcccacccttaagtttttgggcatttttgagtttgaactttgaaaattcataacttttgatttcgaactccgatttgagagttctttatatcgttggaaagctcgttccaagctctatgtgattatctcaattttaaatgtcataaaaaaattttatgagtttgaaatcaggggttaaccctagttgtgaaaatctcagatttgtgtgactaggattaccggcacctgatcaggagtacctggggatttggaatctatgcttttgcgggacaacaggtaagacagtggttagcacgcagagtatgtgcagtggagcttatatcgaaagtgatatgtatgattgtttagtaaccgggattagggttattaccctaataggaactgtttaatagcctagggttattaccctagttatatatgtgtgtaaatatcatgtcatgttaaatgtaatgagattcaaggattacgcacttaaggcatattcaagtttgactcggtaaccataaccgagatnnnnnnnnctaaggccttattgtatttagacatgtgagagcaacacgtaggtct

SEQ ID NO: 144026 - DNA, 1001 bp, Cannabis sativa
  modified_base (46)..(53): a, c, t, g, unknown or other
agttcatatttagggtgttaacaaacatacttgtgagtagatctannnnnnnngtaaaataatttccaacaaaagatactatcaaaataatacttgaattcaccatcaataaaggctctagaactgatccagattccattcttatcaaggatagttttaatagcattttgacagatattgatagtggtcgagacaaagaagaatttagaacacttatatccttgatctaagacacacgagacctttgccgccaatacaaggccttcttacgaagaagctcattcaaagaatctctcaggttcttctccctaccccagtttccgctccccactagaaatagttgcatcaaattcaattattttccatgtcccggatggaaacgtctaggctaccatattactttccattccaagagagaaagacaattctcactgcccctaactcttcaaacaatcgggcagtggcccaatggtgatatatagatgttcaagcatgctccacaaccaacttgttgcgctcatcaagagtctattacaattcaaatttgagtaaggaccgagttggatggaccccatcatcaaatacgtaacacaaggagaattacctcagaaaatgacaatatccaggaggttacagtatcaggcacatcgatacgtaatgatggacaatatcctttatcggagagggctcagcatgccgtacttaaggtgtgtgtcagaccctgaagccagtcagatcatgcaggaggtccatgaagggttttgtggagaccacactagaggtccgagtctctcaaagaaaatattgagacaaggatacttttggccaacataaagaaggattgcaaacataccaagagccccacccaatgaaattaccctgatgactagcccctagctctttgcagtggggggtagatctcattggatccttaccaacgggaaaaggaggggtaaagtatgccacagtggctggagattacttcacaaaataggcagagg

SEQ ID NO: 144027 - DNA, 771 bp, Cannabis sativa
ctagaaattttcactctgcacacgaaatgttgccaactacacagttattaccatccagtactacaaaaacaccctctagaggcagtttttaaggcctttcagcgtcagttttggcaaaattcactaccgacgctgataagggcgacactgtagggttgaaaacaaccgacgctatatggtaccctatggcgtcggttattagctaggttctaatgccatatgggtatatatggcatcgcttcctagcaaataacacacgccatatataccactaggaactgatgctaaaagccataaggattatttttttaagattatttaatttaatttaacttaatttatttaaattatatattattttatttaatttaaatttaaataagatatttattttttaaaaggtaaattaaatattatttaaattgattttaggattggctaaaataactaattttaattcatagaaataattaaatattacacaaatattgtaaaattagtccaagtattaataagttagtaaatctaactacaagttaacctaaaaaaataagctagggaagaaaaattcttaggcctttcaacatcaatcgtccaagccatcgtgaatcaccgccatcaaccgttctatccgctgtcactgtattggtaacaattcagtttttgaattgtattgcttcttttctccaaactgttaaaaaaagtaaaaatttatattagtttatatatattatttgttattataacaaatactataatcaataattaaaa

SEQ ID NO: 144028 - DNA, 1091 bp, Cannabis sativa
gctagggttagctctgatttcactgagttttgttcaaggcagaacgacaaatcgtttggttaaaacgatttgtcgtgcaggtgaatacgacagtgtttctttgtcgtttgatattgggtttaagttgaattttctaggacaattttgtccctgtcatttttgactgaatacttgagttggtgtagggcattcttggaatttcaccaagaaaaatcctacatatatatataaattttatgtatatttataaatatataaagaagagatatgaaacgttaatgtgatattttaaaatctttttaattagtattgttttttctctctttagttctcttattgttttttttttattttttattagctttataaatattaattgatattaaatatgtattttaatttattttcttcataattcttttatacttttcttttattttttcaaaaaaataataactttttttctttgactttttggcttttttttcagtacatttttttaaattaaaaaatttaaaaataatatttttttaaaaaaagaaatgataactcaaactttggttataacgttttttgtgctttcggcagttttaaaaaaaaaaattaaaatatttaaaaataattttttcttaaaaaaaataataactaaagtttttggctataacgtctataacgttttttgtgcttttgacttttgacttttctttttttttttttcatttttttaaatgaagatattcaaaaatgatatgtatgataactctaaaattagacacttattatgtggtgaatcctcaccctcaaaacaagttgttacaacagtaacaatgtttaaaaaacacaaatcaaaactaaaaccaatcacaaaactaaaacttgaacttaattgaaaattagacaaagaaaacttagcttgataatgaatgaataatggatctttattgaataggaatagtcagtagtacaatggaatgagcctaagattacagctcaacacagtaagtaattacaaagaaatgcctcacattgagggaaatcacttcaagagtgatactccatttttacatccttccacacacactcactatgat

SEQ ID NO: 144029 - DNA, 759 bp, Cannabis sativa
  modified_base (705)..(717): a, c, t, g, unknown or other
ttggttcccctcatacccaacccctctctctctctctgtctctcgcaaaccctcttgcttttcaaagtttgtttgttgggtgaattgcttgaatttggccaaaagtgaagctttgagattgtgaatctttgagcttgtaattgaggtagtttttctattgtttttatttgaaattcttggtgagttcattatggaaaaaatatgttttgggttgttttgctcttgatttgcatgtaagaggagtgagtgttaattttgattagattaatgttagtagattcatgctaggaacttttatgatgatattgattatcttgattagttaaggtgtgatttgaagctttaatttctggggttatgttctgaaatttgtgggcaaatattattgatttaaatgatttgataattgatattcaacttggtgattatggtgagattgcttgatatttcctttttgtgtatctttggtatcaagttagcttggtttattttaatttaaaaatctgagtttatgaatggttttgattgaattttgggtatggtttgattgacgttcgaatttatggaaaagttagcatttttaggccttaaaatggggtttttgggtgttctgaacccagtcgccgcgacgggatttttagccgtctcggctgggtttggcagtgagaaagtttgtttttcccgattttgttttggccataactnnnnnnnnnnnnntccgtttgggacgttctttatattgttggaaatctcgttccg

SEQ ID NO: 144030 - DNA, 1476 bp, Cannabis sativa
ttcaaaatgcattttatatggcatatatggaatttcataatttggcatgttttgtgtctgacaacattggaacgtggtgtttggctattagaatcacattttagtattgttagtatagcggcgtaatatagttagacattgagaatgtcaggaatagtcgagattttagaaatgaccaaattacccctaagtgtttttatgactttttgactaagtggagggcaaaatagttatttttcctaattgtgatttggtcctttagttcacattattgggatttatgttctgagtttatcctttagttaattagataaaacctaattctattattcattttattaaaataagaaaaaagatcaatacactctctttccattttcttctttctgtctctcatgagccctagaaaccagcaagaactctggattttcttcaccaattctaggaattcctgcaagtgtttagtgatttcaagtcaaggtaaggtcccttgcacctctctctttagttttcttaagctttaagttatgaattttgcatgatttgagtgttagagttctatggttgctgttagtgtttgttgtagttttctgaagttaaattatcgttagaaatattgttttgagatggtttagtggttgtttgtgaggtgtgttcaaggtttgaggttaagagctcaaactctgctctcacatggtgaattttgtttctgtgcattttatggtgctttgttgccttgaatatattctttatggtctaaataacaggtttggaaggtttggtttgatttgggtttgatttgagtgagttaggaatttttgaagttttcctgcactgaaccagtcgaccagttcagtgggacttgtaggaattggaattccggttggtccctaggaaaacccaaagaactagaattctggttggggaaccggtctaccggttggggcaattttgggaaccctaatttttctaatttttgtgatatttagggtattgccatgttagttatcaatagagaaacttttagtttctagtttaagtccccgaaaagtgatttcgtgtgtcacttatctatgttgtgaatgatgtgatttaggggtctataattcgccgagcagttgttcctctcagattggccagcacacctgaattcagaaacgaggtaaaattagtataatgatgtaataaccgcattagtaatttggattagtaaagacaattaacactaatttctgatatttttataattatttatgaatttaattatgcgtggaccccattgctagaaatgggcattagagttataatttctcaattccggaaattttattaaactctagtagtattatttgacttatatgtgaaatatgttatttttacaattttttctcggaaacaacgcaaaatgtgatggctggctagtttgatcacatgggcaagtctaaaaccttatttcttagtgttgggttttatgcc

SEQ ID NO: 144031 - DNA, 653 bp, Cannabis sativa
tgaattattatttgaacgacttgataagtataccatgtgtatataagctaatcttaatatattcatactcatatagtaagttaatctcaatttgaaaacatgtgatgaacattatttgactgaaactattataggaaagatgtatctatctttcttatcacttttaaacacaaaaaaaaaagaataaaatgtaataccttaccaattttgtgcagttataaggatgtctaaaaatacaattaaaacttttaactttttatagaatgacaaaagtaattaaaattcatgatacaatcaacttacctttgaataatttagtgctcgaataatttagaactataaactgatgaagttagagcagtcattattattaaatacaggaatactcttcgttctttgaagagttttgcgaggtgaaaagacaagtaggtgtttatatctaatacattatatacaaaagtaattattcagttttaaaaaagagatatagaaaaaaaaaagcaaaaaaaattataccttaaggattataatatgttcagaactttatattatctcatttcttccaaacacaaccttgactttcttgttctttgtttatttttctcaatgaaataaagaaaaatggaatgtattgttatatatttgttatttaa

SEQ ID NO: 144032 - DNA, 925 bp, Cannabis sativa
tattgttaggtgtgtttttctaattaattgtgcttgtttgttgttgaaaaaggaagaattaaattgataggaaaaagaaaaggaaggaaggaagaagtgggaacaaaagttgaaattggggcagattgctgaagcaatgctgaagcgaattcaacattctggcagtgacgtggaaacacgagattcagctgtctacatcagcaggagtgtatttgtcactaaaaatgagactagctggaagctttgtaaagggggaactaaacctagtgggccaacgtgcaaaaaggattgagcttctaattttagggtgagattttgtacccttgggacccaacaactaaaaaaagaaaatagctaagtacaccatcatcacctctatcatgtaaggaaggagctgcaattttcggaagggaattaagtccagaaaaagtacagcagaggaggaagaaaaggggaccaagctttagtgtttgatttttcttttaccctctcttaatagttttctttctctttctcttttcttgtttcttttacttaaatattaaaacttgttgaattgtaaacaaagggcaacaaccatgaatgaatgttttttactttggatttactttcttacttgaatatgagctagacttttgaggcttgaatggatatgaatttctatgtgggtatgattaatttttaagcttactttagcattttttttttttgcctttgttcattcaagtgagtttcatttttatttgattgttgttccttggccatgaataacaatttactaagctagatcttgtgccggaaggctagatcttgtagtttaacttgattggagcaagtgaaaacctagatttggatttttctttgtaagtggaataggaatatttcatttaccttgcataacttaaaaaattgatgtttgaatagt

SEQ ID NO: 144033 - DNA, 744 bp, Cannabis sativa
gccttcttggatcttctctcggacaacgtggcagtcaatctcgatgtgctttgtgcgttcatagaatacgggattttcagagatgtgaatggtggcagtgttgtcactataaaggatggcgggatctttgtgtgggattccaaagtctcgaagaagtgccaacatccaagtgatctcacaagtggcatgagccatagcccggtattcagcttcagcggaagaacgagaaacggtggactgcttttttaatttccaagagattagagatctgccaagaaagacacagtaacccgaaatagaccttttagtgtcactgcaagaggcccaatcatcatctaaaaaaaaattagatgaaagtctttgtttgacatatcagtttcagcatgagcagataggttagtggaagatgctgagtaaaagaatagtccttgtccagaggtacccttgagatattgtaatattctgtgagcagcagtgaggtggggaaccctcggattggataaaaattgacttagtttgtttacggcaaaagagatatcaggcctcgtgtaatagttaagtaaaggagtttaccaatgaggctgtggtagattttgggattctctaatagttttccaacatcggatgagagccgaatgttggattccattggggtgggagcagtagaagctcctaaaaaacctgtgtcagttaagagttgaagggtaaaaggtcgttggaagacagatattccggaggaagaac

SEQ ID NO: 144034 - DNA, 679 bp, Cannabis sativa
caaaaatactttatcttacgattttgttgcagtcgtatcttttttgggcattaggtgtcaactcaaaaacacgtggcaacatattattagattatgttttaaataagctaaaaaaatatgtcgtcacatatttttgagttgacacttaacgaagttaattgtcacttaacaacggaaaaaataacaaaattttaaaataagatattttgacatcactttttttaattaaaatactatatgtaacaattataaatctatctatatataatatatggctattgaattgaatttgttgtgtttaacagatttgttgtgtatattttgtttattttaacagtttaaaattaacactgttaattagtaattatctatattacaaatatttataaatggctatttgatggaatttgttgtgtatattctgtctattttaatagtttaaaattaacactgttaattagtaattatctatattacaaatatttgtgactattcaaaacagtgcaatatcaattttattattattattattaaggagactattcaaaacaatacaatatcaagtttttttttttattattatcaaagagatgtgttaacagagacaccaattcatccaacaaaataataagttcaaaggcaataaagaaacaacgaccaaggacagaacatagagaaa

SEQ ID NO: 144035 - DNA, 881 bp, Cannabis sativa
gacgtgggcgtcgtaaattcatgagtgattctaatcactttgtcaaaaaaaaattgaataattggttaagatactttaaatttatatgagagaccatgttttgaattttcttgcccgtttttatttattaaaaaataaatgaagtataaggttcaaactaggatcaaacttatgaccactagaataggggatgctgctaaactatcattccaattaaatttagctagttatttattgttttgaattatattaaatgtataactaagctcaccttaaaatttaatcttgggtctgccatagggtattggtgtaatattattggatttttgtattttttatgtaaattttcatataattttacacatttttcctaaacgtgttattgtacggtaatggtaaaagaaaatgtaccggtgtattcttttcattgtggcaccaatataacttcaatacaaatctgatttcaccactcttcctaaatgactacaataaatccgaataaaaaaatatatgattataatttttttcatgtaaacataaataatgatataatgtgaaaaaagtaaagcaaaaaaaaatataatgtgaaaaagtatatcttataagtgaaaattacatcaaatatgggattttataaaaaaagttacaaaaatatggcatttataggtttgtcactcttctatggcattttttcacttttaagattttttatggtatttgatatgccatatttttgtaaacctattatccaaacccatattttatgtttgggccaaaattcaaaatggccctaaatctaacaattaagttaataaatgtccattttttaaaaaaattaacaaaatatcccttcaattaaaaatttgatgataaaattacaa

SEQ ID NO: 144036 - DNA, 632 bp, Cannabis sativa
  modified_base (94)..(103): a, c, t, g, unknown or other
  modified_base (165)..(166): a, c, t, g, unknown or other
aagaaaactacataaaagaaacatcaaaataacaacaaaaaaataacacaaatataacaacaaattaacaagattacaacataaaaagaccgtnnnnnnnnnnaataaaatcaaaaaaatcataaataggtttaaaattccgtaaaaccgtatttttgtaatttnnttgttgtttttatgtttttgtgaaataatcccttaaacaaattagaattagtaatgggattttttaattattgtatctaaaattaatcttatttacaaaaatactttgatatgttctctatttatggttgcttaattgaattggtatatatgatatgttatctgatttatggttacttacttaagttttgcatatcgaataaagtattcttccaaattaaataaagtctcatacttatgcatccgcataattatcaataatttaagataattatgtaataatcactttttaaacaacttaatattgtaatatgtatcaatattaattgatttttatttatgatcccaaataattaaacatgacgcatactcatcatttagcaaatggaagatcattgccttatagctgatgttaccgcattacatccaataagcacagatgtttccgcttacaacccaatggagaa

SEQ ID NO: 144037 - DNA, 606 bp, Cannabis sativa
actcagaaatgggacctgagacctgaaccagaaccagaccgagacccgtgacagtgatccagatctcggactcgggattcggaccataacccagacgaagacccaaacccgaggccagacctggaccatggacccaaaattagaacgtgaacaagaatcgccgaaccatgaccctagaacaagactaggatcgtgaccaggacctggacacagacctagaaccgaatacagaccaagcctcatacccaaactgagactggaactcaggcccgaacacagtcgtgtaccaagaccggaactgagacacgaacatggacctaaatctagcacccgatcccaaacacagactcggacctagatagggatctgaatacgaaccaagactcggacgaagaccccgactgggatcgaaatgcttgacctagatctagacagagatcctgacccaaacccaaacttggacctgcattcgggacctgaacttggagctggacccgaacctagacccagatcgtggtctaaacctggaaacaaacccggacacaaactcaccaagaccagtatcagaacaaaggacttagacccagaactgaatccagactcaga

SEQ ID NO: 144038 - DNA, 730 bp, Cannabis sativa
tatttattcacataattagcagcaaaatttgactcaaaattttcaaaaaggtaagaaatttatcgaacttaacacaagaatatactcagttgccccaactaaaatgagatagtatccttaatgtctaaatatgtatatgataagaacattagatgagaaccaaaaaaatatataatatgcacattaataaatagaagttgattttcttaaaaaaaaaacaaatgatagaaaataaactaaaatgttgaatataaagaaagcaattaaagataggaccagtagtgaaagaattcactaacctttgtaaatcgagccgtgaaggggcattttgtccactttaggtggtgttaattctaaaaatagtttcaacctttggccattgactttgaatatgttactagctttagaatttttaatctcaacagctccgcgaggaaaaacagtatgaacagtaaatggactagtccatttagaacataacttaccaggaaatagatgaagatgagagttgtataaaagaactttctgatgagaggagaaatcttttcgcaagatgttcttatcatgatacaactttgtatgatctttgtaactttttgcactatcgtcggcatcgtttctcagttcttcaaattcatttaattggagctttcttttctcactcactttgtctagagcaaaattcagttgtttaattgcccaaaaggctctatgctctaactctacaggt

SEQ ID NO: 144039 - DNA, 764 bp, Cannabis sativa
  modified_base (665)..(665): a, c, t, g, unknown or other
gttaaaccaagaaatgtcgttagataggcacttttaatatataaagatatattgagagagagagagagttttgagaagagtggttagagagagataaagaggagaggatccgtgatcaaggagagaactcgatcaccattgattgatgaaaaagactatctaccaaactaacatggcatgaagtcttagaattgctataacattatcttccatttgatacagtgcagattgagcttgtcatttttgaggagagcttgaaaaagaggaagtactccactgcattgggaggaacctctaaaaattttgtgtttacttctcttttccctatctcttttcaagttttctgttttctagtttgaattgattctgttacgatttcttctttatgtttcacattgttaaaaatctaatatgttcatgtgctacttgaagatggttctagagttattgacattaagtagaagaaggtaaaactggtatagtattgtactaggaatggtgtttgtgaaactagctttaagtcttgataaagaaaaggttaattaaatttatttaactaattcttatttatgatgatttatctcatatatttaatattttttttcaaaaaaaaaaacatattttgtgtaattaaatttgcatgtcatatctttatatattaaaantgtctatctaacggcaattcttggtttaacgattcttggtttagtttaacgattcctttagccttacacgattaacttaacagactgttaacgttaaac

SEQ ID NO: 144040 - DNA, 550 bp, Cannabis sativa
aaaacacatcaaatttatacaaaagtaaatactaatctatctaataattaactaagaatgagtgtacaaatgtgcactcatcatattctctataaaattaaaagaagtaaacaaaaatcaaaccctgacctaaaggtaaaagagtaaataccttgccattattggtctcacacgcctacaccattaaaggtgtgtatgagattgaacaatcctatccattacagtatctcatgagttgattacacactataatacctagattgattcatcctttaagatctaatagtccactctgttcttgagtgttgaggctggcttggaagattgcggtgtaaattcttcaataatagttcttgaattggatgatcgtttattgtactaaaagatagtgaggataccctaataggcttcaagaggtattattttttttttcattagtttagatttaatatatatattatgttgacatccttaagcttatgcttcatattcgataatgttatacccaaaatttagctggcacttcagaggaggacacgtgtcaatcttg

SEQ ID NO: 144041 - DNA, 576 bp, Cannabis sativa
aatcaaacctgaaacgcaaaaggaaaatcacacaacttgtacgtcttactattgtaatccttttctttacccttattgttctttcttgccttggaagcaactgtacccttcgtctcattaacaactttcttcttgtttttatccttcaaaacagtcctcaaactatacaaagtagtatcatacgcaaccttaccccatggaaaattgttaaattcaccagatcctattaaatgaagtaacccatcatctactttcttgcgaccaggcttacttagcaagaaattcataacaaaataaagcacaaccattctaaaagcaaacacatcatctttgaaaatactattcaagaatcgttgtttaacaacaacatagttaacagtcatgtcactaaaatacttgtccacaaaagtatctccccttcctatatatttttccataatactgtcacccttacacaacaaaccactcataatagcaaattcacctaacccaaactgagtcctagaattacgaaaatcaaaccaaatttccttaacatttacttgacgaacctccctacacaaagcagtatgtata

SEQ ID NO: 144042 - DNA, 621 bp, Cannabis sativa
ggagtacattagtgtactacttttaaagaggtacattattttcagcgtgttaaatttaatctgattttttttaaaattgtacataatatcttaaataactatactgtacaagtgccaaaataaataagaatatatcagtacaacacttttaaaaaaatatattgtagaatttttcaaacttaaattcttaatttcataaatacatctaataatataaatattaattaaatatatataaaaatattgtatctacagtgcacacaacatatatgttgtacactatagcattaacctccaattagtgtgcaatatggtgtctttctggagaagaagcccactttatatacaatatggagtctccttagaattggaattggccttagttcaagagaattttaaaaaaaaaatttacactttattttttttattttttatttttacagaaattcacataataacacacataacaattaaatgagtaatttaaatcgcaataaaaatttacataataatcctcataaaaattactggagtaactcaaactataaatttaaaaaaaaaattaaaaaatagtatattaagtaattcccaataaaaaatgggattcttatatcttgaaat

SEQ ID NO: 144043 - DNA, 561 bp, Cannabis sativa
tctttgagcatatggggattcccaagtacctgaaagggagggtacttctcttaaatttagatgcatcaagtatcctgttaacatctccatcttccatacctgaccagtaaatagcagttttctgctaatttggaaggagaccaaaagttgcagaaaacaatttcagtccctttagcgtcaacatgatggagacaaaatctccattactgaaaattaagaggtcatccgcaaaacataggtggtttaacttcagacttgagcgcctatcatgaaatttgaaacctggccattccccaaccttcttaagtattctagacaaatattccatgcctaaaacaaagagcaaaggggacatgggatccccttgcctcaaacctcttttggcattaaaaaatctacacatggacccattgaagagcaaggaaaactttggggttcttatgcaattcattataagagaaatgaactgacttgggaacccaaaagctaccatcattttctcaataaagtcccattcaactgtatcgtatgccttcctgaggtcgattttgatcatacaac

SEQ ID NO: 144044 - DNA, 995 bp, Cannabis sativa
tttagggaagatagaagatatataaattacaattttaactgcattcaacttgaactcctccctccgttaaaaaaataaaattattcttttttttttagaagaattgtgtgtttttaaaagtgagaataaaaaataacttttatcattttaaaagttaaatattatttggcaaagtatgttaacactattttaagatttttacttactaaaaaaaattaatattctacactataccatgacatgaatccatcctacccaggacccaacttgaacttggactccagcccgaacccggacccgaacgcagactcagacccagacccgaacccaaccaccagaccccgcacctgagcctcggacctagacttagactctcacctcggaccctagacccgaacttaaaccttagaccaagatcctgtcccggacctcgaacctagacttgaacttgaacacgaacctgaacccgtatccaaaaccctaggccaggtctgaggtctttggctgggttcggggttcgagttcgggtctggggtttggggttcgggtcggggtttaaggttcgggattcgggtctaggatttgggttggggtcagggtcggggtctggggtccggggtttgggttcgggttctagtttgggtttggcattctggtctagggtctgatgtctgggttcgggtctggatccggatttagtattattgtaattttataattttattaagggtaaaaatggtatagtcaatatgcacaccattaccacacttttataatagtaagatattaaagtattattataattaaggttattaaaaaaaagggatattggtggttaaatcacctaaactttaaattttttaacacttaaccacaaaaattgatttttggggggcaaaaccacccgaactcccattctattttgctttgtacctctccgtccaaaaatcacagttaagtgtcacggtggtctgcccacgtgtacacacttgtac

SEQ ID NO: 144045 - DNA, 528 bp, Cannabis sativa
tacaatttaagttgcagcgctagttgcaataagagtttctgtaaactgttttgaagtgtaaaaatgaaaaaaaaaaatcctttaatttttactgatatttagagatattttaatttttattttaatttaagatattctgtaaaaaatttagaaatttaaaataatttataaaatagaaagcattattcaaactagtgacagttccaaaaaatttgttagcggggcaaaagatttaggaaaaataaatagtacattcctttaaaatggtgtttatgtagacttgctatttatttcagcatctaagagagcttttcattctaatattttttcatgatcgtgtacattacaactatttaagatcgatcacctataagttttaaaaaaattctaaatagttttctgtagcaaataataagcttcaaatagttgtttactacgcgcataagaaaaacagtcgcgcatacaacaaaatacttatattttatttttagcattgtaaactacttataatttttttaaaaaaaaatt

SEQ ID NO: 144046 - DNA, 542 bp, Cannabis sativa
ggtaaaatatttccaacatttatactggctcggggttgctttttgatatgctttcttttttgcttgtgtattctaccacaaagtctgctagggcttggcctttgattgttgttcagggttgaaagttatttcgtactgactcaactctaccgcccacttgagtaaacgttcagaagcatatggcatttgcagtatttgtcgtagtggctggtcggtatatacccgaacaggataagctttcaagtaaggcctcaacttcattgttgctaaaatgagcgagtaggcaagtttttctatcaatggatatcggccctctgcctcaatgagtcttttactgatgtaatagactgggtattgtacgttgttttttttttttttgatcagcacggcactcacggtatgttccgtgatagcatattccgtcctcaccgtccaaaggttttgaaagtacgagagatttagcaagttgtgcctttagctcttggaaagctttttcacactcttctgtccactcgaactacttatttcctcgcaggatgttg

SEQ ID NO: 144047 - DNA, 950 bp, Cannabis sativa
agaaaggagttccacgtgctcggtccagctcgagatcattgtttctctgtccagccatgccttggaacatatttttcagtttggactatcctgctcagcattctagtcgatttgaatcacaccagtatctttttgagcggggatttgagcacgggctccgggctgtacgatcgtcgtgacaatctgatcgtctactcctctccttctattcaaatcactccttaggtcatgagtcgtccccaacctatcgaatatagaagcgcctggctgccttagtgattgatttgtttggttgacaggtggaatgacaccattaacctggttgaaactatcgggtatgacctttcttgatgaattactagacaaggtcttcccgcctaccgctaggcccacaagcggaactcgtgatcgcggatttggcggctgaccatttgtagtctcgaaagtattcatcgctggatcttcgtccgtcccacctagggggatgacattcgcaggttgttgtacgaaagtttggtaggctttttgtatcagcatagtagcttgccgactacgattttcaatctatgtatgatgagcccttaatgcttccatctctttgtctctccacttggcaaacatacgtctttgttcctcgaatgcgagatttaccgcagcgcagagttcttcctgatcatgatgtagcgtattggtgcacagcggtatggattgcatacccctgcacccgcggaatggcccatctgaccgagcatcaaggctgcatgcagcctacttgaccgagggacatgggcgggacaggggcaagcttcggttttgtaactaattcataaaaaatccaaattaggttttgtaaaagcctaaatttattaattttttgtctactttctagtaaaaataattctagatcgaaataaaaaatattttattaacatacattgtgatttctaaac

SEQ ID NO: 144048 - DNA, 587 bp, Cannabis sativa
  modified_base (100)..(106): a, c, t, g, unknown or other
  modified_base (286)..(293): a, c, t, g, unknown or other
  modified_base (452)..(466): a, c, t, g, unknown or other
aatttttcattagattattttaattaatttagataaatacacttagtttaatgaaatattctagattgaaatttatagtaactaatttatattttctaannnnnnnttaagtagaaaaatatatttaaatatatttatttaaatagaccaacttaaattagaatatttttcttagaacttagaatttaaatagaattaataataaagttgattttattcaagatacttaattatttgtttctatttcatgaaatttaattaaagtagaaaatatatttaagttgannnnnnnntttggaccaacttaaattagaataatttcttacatattaagttagaattaataattcagttgattttattcaagatacttaattatttcaaattttaatgaatttaattagacaggaaaattatatttaagttggaaattttttcaatttcagatcaannnnnnnnnnnnnnnttttcaaaatatattttaatttattttaataattattttcccatataatttcgaattgtatttatttattttaaatgcagatctttcgaaattttttaattttgaaaattagattaaagtt

SEQ ID NO: 144049 - DNA, 752 bp, Cannabis sativa
tttgccttctcggcttcctctttcactttctcggcttcttgcttaaggcggggattttcctgttgggcgtcgtcccggtgcttactcacaaccttaaattgtaataatagcttgtggacctcgccctccaagtattcaagtcgctcagagagtaatcgatgagaagcaaaagaagcctggagaattgcaaacagatgaatacgaaagaggtataaaaagaataatataattataataacaaagccaacgtaccatgaagtgatagtccaagctccttaaagcatctcttttggactcctaagattgagaaaatcccaatcatggggaagaagattttgaagtttgtgccaacaagcaactccatatgcttgggcaaattcagacccggcctcccctgctgcgaccgacaaggtctcaatggccttgctcaaagaagcggtagcgggagttgcctcaggacgaggagcattagagtcggaaacgattggaggaggaacttgttcttggatctcgttgttagaaacctcgagatcaatgggctcggccagagatttcttcttatgggcggtagttttcctttgcctcttaggaggaaccacttcggcagcagtagggactccacggttggttgtcattttcttctccttccgctccatgatatcttcataacccatgtctgaaaaacaagacaaagcgttacaattattaaaaaggccgatgaaaaagggaagaatataattttccacctaagg

SEQ ID NO: 144050 - DNA, 578 bp, Cannabis sativa
aaatatttgcttcatttcatagctgaagcaaaaaacaattagcgttagtgtactggttttttgcttcggttatgaactgaagcaaaaaccttcttttttgcttcgtttcataatgaagcaaataactaattaacgtcggctcataactgaagcaaaaaaattagtattttcatctattgttatagcgtcagttacaccaactaaagcaaatactttatatgtcacttaaaaactgaagcaaaaaactctttttgtagtagtgtatttctttcaaatggatacatccatctcccccaaaacggcctgcacaaccttgcttctctcactagatgaataattaaatgtatcatgatgtcgaaaaaagatggcggaaaagaattttccaggttgcacaatgttttgactacatgttcatgtaatcaatctaacttatccagttctaattcatgttcatgttcattctacttttttagagaatttgtttccctgacagtggtaaaggagccatatctccctcttcagtaccatcgaatgctttcttcttctgtctatcaggatgatttataggcaagtaccgt

SEQ ID NO: 144051 - DNA, 1256 bp, Cannabis sativa
aagagcttgaagtatctttttactcaaagggacttgaacttgaggcaaagaagatgggttgagtatatggaggactatgatttcactttgcagtaccaccccaggaaagctaatgttttagccgatgcactaagtagaaagcctcatggtactttggcatgtttgggtcttgaggactagaaaaagacaatcacaatgggtgattataacttgtaatgctatgaaggggaagaagtagcttgcatctctaacatagtggctacaccagtgctaattcaacaagttaagcaacatcagtggcaaaatgaaaagctaagacttatttagaactgaatccaacatggtgagcaactagatgggtggacagttaacggtgaagagtacctataccatatgagaagactacttgttgaagatatccttgatcttaaggagtccattttgattgatgctcatatatccaagttttctgtgcatcctggaagtacaaagatgtatcaagacttaaagagacaatattggtgggaaggtatgaaaagagatgtggctagctttctacctaagtgtatagtttgtcagcaagttaaggctgagcatcaaagacctttaggtttacttcaacctttgcctatactagaatggaagtgggacaagatttcaatggactttgttattggattgccattgacacctttgaagcatgacgttgtttgggtgattgtcaatcgtttgactaagtctaccaattttattccaattagaaaggataacaagcttaccaggctagctcaactttatgtagacaatatagtccgactacatggagtgccttcaagcattttttctgatagagattctcgatttacatcaaggttttggaaggccttgcaacaagccttaggaactgaacttcacttgagtactgcccatcatccacagacagatggatagtctgagaggaccatacagactttggaagacatgcttcgctcttgtgttttggattttagaggtagttggggagaacacttatcactggtggaattcacatacaataataactatcaagccataggaatggctccttgtgaggctttatatgggagaccatacagatcgccattgtgtaggatagaactatatgagcatatcactaatggagcccaaattatcaccagtaccattgaaaagattaagagaatccaagaaagacttaaggctattcaaagtcgtcagaaaagctatgccaatctcca

SEQ ID NO: 144052 - DNA, 721 bp, Cannabis sativa
ttgaggtaggctgctattggtgttatccagtttggggacgtatcaatcatttcaacctcttccgcgtcagtgatactgtgtttttccagaaattggatggggattagatttgctttatcatttatgttgacgctcgcgagtcgagctagtgcatcaacagttgtttttttgttctcttggaatttgcttgagagcataacttttgaattgttcgagcaaatcgagtatttttcttagatatgctatcatcttttcccccgagcctcgtactccccagatacatgatttaccaccaactgtgagtcactgcagatcacaatgtgttcggctttcatctctcgagcaagtcttaggccagcgataagagcttcatattcagcttcattattggttttcttaaatctaaatttgaccgcagtgtgcaggtgtttcccctctggtgtgacaagggcaattcttgggccagacagctgacccgtccacatgtagcttccaagttggcttgtctttactattgctcggcagaggtacttgtacaggctctaggttgttttctaaaatgctctcttctttacccgtacattcaacaaaaaaatctcctaaggcgtgaccctttatcgctgttcggggctcacagacaatttcattttggcccaactccactgtgttgggttttatgccttaaataaaactctttacgatctgattagttatcaatata

SEQ ID NO: 144053 - DNA, 1052 bp, Cannabis sativa
ggcataaaacccaacaccttagtggtatgccctatatccttatggaatcgacaatatttagttgaatctcgcttgtgccttgcatgcctcaatggctttggtttgcgaaatgccaccctattttcattggcgaggaagatattctcgcgagtttcatttaactcagtatataccgagtaaatggatacatacttctcatattttttctatttctttttgttcttttgactcatcctttctttttgtatttgaccatcaagattatttaattttgttatgattgtgctcgctgttgtcgtacttgtgctgagttttcttcctgagctagtctttaacagcttcatttcagtcctcgcttcctctttacgcacaaagacttgtgctctttcattaaactcgttaatattcctcacatggcgaccttgaagatcatcacataactctccccctgttgtagataagtcaattgtgattcatgcctgaagtgttgttagttgaatactatcattcatgtttctgacttctacatcagccgtactgaaccgattcaagtacgctttaagagatcctcggttgttattttatgttggtcaaagatgacgcttcgggtcgacggtctcttgcagcctaaaaataaaatacaacgcaagttatttgaaacattacttgctcgcataatagtattaaagttatttaaatgagcgactggatctatggttccatcattatctgagacatgcgggttcttaaatccctgaggaaattctgaatttaagatatctggatgaaatggctcgatttcttcgtctgaattgtatcccaacaacttgccatattctccatcttgatattttttgattttattttctaattgaatactcgtaattggatgggatccactagttgctgattttcattttggttaagttgattacgcaaatcaggcgcatttcgattgaggtgcttgcgaaggtcaagcttcctttggtttaatctctcctacaaatcatgttcacgatagggctgagcatcgatcggtttggtcggttttt

SEQ ID NO: 144054 - DNA, 1446 bp, Cannabis sativa
gcctgatgcaactcctctaaggacttcaccttggcagccatctcgtccatagcttccttggcttcccgaagctcgcatttggccctggctgcggcctcgccctccaccttcaacgcctcatggtgcctcgcctccgcctcagcctccctttgcttggcctcctctcggaactttgcctctgcaagggcctccctttgttgagcctcctcctggaacgcccgcctttcggcagacaagtcttgcaggatcctcacggcctcatctatgcccccaaattcggacatgacgaagccatggtcgatcagggtcttggaaaggcggctggtctcggtagtaatctgaaaaaagaaacaagagtgagattagatgccttagacaaaatatcaaaggagggaataaattacaagtactcaccgcggccatggtagagctgatgtcttggacttggtaaatagagttcaaggaggcacaagccgcatatcttttggctgggaactaagtcaggtgggagacaaactggctggtcatctccgaggcaaagggagctagggtgggcccaacaaagcgattgaactaatccgttaaagggtccatgttcaggtcccaaggatttcagaaggcgtcctcgtgtaaagtgttctgctactcttcccgcagaatcttctttaaggcctccacctcagcgtgcccccgactatactagtccagggcgtagttgtgcttggcgacttggagattttacctctcctcatccgcaggaaccggggtcagcacaatgccgtgcgacacagtgtattcctccacttcagaaggaatcccggagtcgttgctcaccgccggagtgtcccccctctgggtccgcttgggaggctcagtctcaaccatcttgcccttccgcttgcgctcaagggcggtcacatcctccacctcgccttcctcgacttccccctccccgtctatcaagaagatcgtgcctaaaggggcactgaacgaggacctcccggtcgtcaccagctaggagggagccagaggcagagaggcatcagggctgtatgcctcggcaagagtagctaggagatcttccataggcctgactgctgcaacaaagaaataagctaagtgttagaataatcatgagaaaggcatacgcccaacaaaaaagcaataaaactaatcctaccctgactctctaattcagccctagcaaagtcttggatcacagtgctgccttcatcatccccgagaaaactgtctgaggggagaaaccagctggaagacaaatgggctgaatggtccagggggataggcgccggaggtccagagcctatctgggatcgacccaaaaaatggccttagtgggaaaaataatattctttggcgtgattcccccaccgggtggaaggcattctaaacctacgaaggctctcatcgaaccctataggtgta

SEQ ID NO: 144055 - DNA, 549 bp, Cannabis sativa
aaaaaccaacatatttgtttactccaagtacagtactacaagatcggaccacctatctaatcaaaatacatcaccagccctgaataatataaactatatgtctctctctttggctttcatgtatttgttgcatatttatttacaaatttgagactggaaatggatgaaatcagagtttgctagcatgttttccaaacaatgaatgtcgaccttcagcaattagctcaccagacactttgttcttcaatagcactaaagttccagaataacctccttttctacctaaaagccttgatgtaatctccaattcatcctgcaaattccaatccagctatcacatattagtacccagaaaacacctatatggaaatctcaacccaaaatctactaattcatgacaattaacaaataaatgtaaaagtgattgaaaatgcaatcattattgcccccaggtctaagctcttatcacttatgacttgaaccaaccattcaaacacataaccacttgagctagtataaatctaatcataactggtctaatctcattcc

SEQ ID NO: 144056 - DNA, 1088 bp, Cannabis sativa
  modified_base (345)..(354): a, c, t, g, unknown or other
  modified_base (583)..(586): a, c, t, g, unknown or other
ctcaaacctataatactaggatcgagaagttttgttaagtccattgaatagatttataatcaaaatttcccttcttgtccttgtaataaaaaactttttggtaattccatatgaatggttttaaccatagttctcttagctttgcttcttagtttcttattctgaccatccattacttgtttaaactaataatggattttaatcacaagtgtctcccaagtcataacagggtgggttccttgaaaccctcccactacgacaattaactgtgactttctatctaagaacaataatggtattaacctcatcagttgtatcaagaaaacagaggcagtgggaccatcnnnnnnnnnntaagatgatagaacactttggaaaaaataatatctcttctactttgctactttcagatttagtcattttcttagaaaagtagtatttattgaaacaaagactttcttatcttaatgaccataggatgatccacccctaattacttagaatagttatcaaacatgtaaaccttagttaatagtttagcttttcttaagttcatgatcagaacatccatgaatctagtaannnnttacactaagtacacaaccatttcataattcggaagttcctatcactagggtattcccttagaaggacttaggcaactgctagtaactaaccataaacctttcactttcatcaatgcagctccttcttatgtaacacatctaagtagcggcatggagaatccctttctatacatgactccttctacgatgatatactgtacaactttcattctcatcttccgagctttgtttctatcatttggaagttctctagtattgaggtaggctactattggtgtcatccagtttggagctgtgtcaatcatctcaatttcttccgcataggtgatgctgggctcttcaaggaattggattgggactaaattagccttatcaactatgttgctactcacaagtcgggctaaggcatcaacagttgtgtttttttctcttggaatttgcctgagagtatagcccttgaattgtgcaagcagatcttgtatttttcttagataggctatc

SEQ ID NO: 144057 - DNA, 1006 bp, Cannabis sativa
gtaagggggaatgtggattcataataaaataccatctcgagaatgaaatgtaaagaccgcttagttttatggagctttatttgaacttagagtgtattatttatgtcatatatgaaattttgtatttttgcttattttgtactcggcaacattagaacgcgacgtttggccaatagaatcacatcttagtattttagaagtagcggggcaacctagttagatattgggaatgtcaggtatacccgaggttttaaaaatgaccattttacccctagaccattttattagttaaacttgtaggaagggtatttttgtcattttgccttgggtgagatggctggtttttagtgtggcagctggccactatttgattaaataatttaggtttattttccatctagtgaattattggaaatagaagaaattaaggaaaatcaagataatcatcgctcttcactccctctctctcgaatcctttggagaaccagtagcaagttggtgtttctttagttgattcttagtagtttagcaagcttcttattgttcaacacaaggtaaaaatccctagcctcttcctttatgttttcttaagcttaagttaaggtgtttgcatgattttttagaattagggttatgtgattgtttcaattgtttgaattggtgttttgaagttaaaataatgttatttgagttgaattagagtttttttgtggcttggttttgttgttggacttgagttttaagaatcaaactttgctctttaatggtgatttgagtttcagggattgtttctaatttttgttgcatgaattctcttcattgtgatgttattagcaggtgtggaaggtttggtaacattaggggttcaattgaattgtttggagtcaagcatcccctgaagttggatcttcaattctttaagttttgtcagatccattctataaggtgctttagagactggctcaactccaggtgctaaatcgataacaaaattttatttctcgct

SEQ ID NO: 144058 - DNA, 579 bp, Cannabis sativa
agagaatttaaatagaacaaaaaaattacaaaaaaaagagagaattaaaaagaatagatatttacaaatttaattttttaatttttttaattactaattaattatagtaaatatttttgtgtaatggagatatatgaagttaaattagatataataatactaataatcataataagaagaaaaacgtgtatgtattatatttattgtgttttttttttataaaaaaataagtttatattagatatttttatggaaatttattaaaataatcgtattatattaatttgtaaatttatgctttaataaaatattaacaaattgagaaaattaaggagaaaaaagaaaaatagctttgaagagattttagaccgccatatcactgcctcatacttttcctctatatatatatactagcaaaaaattacgtgcgatgcacgtatactaaattttatactaatatatttctatgttatttaaaagtattacaattaaaaattaaaaaatatatattattagttattaggtgagattattattatgtgtatctaaatattatagtgtttaagaaagcttgatgat

SEQ ID NO: 144059 - DNA, 645 bp, Cannabis sativa
tttagttgtattgatatcgagagacaacgctattcgaatttctataggtgggatctgatatagctctcttgaggtaacaaagtatgaatcagtaagaagatctcttaataagagagagatgaagtcttagaggcatgtgagagaaagaggtagagaggactagggtttcagacttagagcttcatggcctaaatgagatttagaatgacttagccttctaggtttgagttaaggctctctatataagagagcataaaccctaattagcaaataaaataatagatatttacattttaaattaataaatacaactgaccaaattgcccccagacaatagatatttttgtagcatcttagtgggctatcaaggccaaacttgtagcttggcttgctgtccacggatgaaggccacgcatccatttcctgccagggagaagctagtcgaccatacatctgcatgatgaggtttggcaagcaatgctatgtgtgcaagttgaggtctggccggccatgcttttgccaagatctggcaggtcatgtgcctgctagaatcctgcagtcatgttcctgtcagcaataacaagaggaggccaacctttggatgtggaggctagcctttggtaagtggaggccacctttgtacac

SEQ ID NO: 144060 - DNA, 616 bp, Cannabis sativa
gtgcccttgaatctagatattgtttagatttgttgggcttttagggcccaatttccagcccatgccatgtgtcaacattttgggcttgtacatagagtcctgctaggtcaatcctggccacccatagacctacaaggaagtctggttggccatggtcctgcaagaacctgacaagactaggcctgcaggatctggcaggacaaggcctccaagacctggcaggtcactatagctccaccaagaggaggccaacctttgagtgtggaggccagcctttgagtgtggaggctagccttttgcaagttgaggacagctttgtacattgtttccttgaagaggccacgttcccttggtcgaacagaggctccttgggtccagaagtcacttcttggtcggccagcttgtgcacagaccctggccgacctataggctcaccctcaccggcctataggctcctcttagacggccaaggatgttggtacaactctctgagggcttgcttcactcccttcgaacatgtaactactagaaagtaggttaagatatttccattttagactaaaatattcaaaatatatcttaacttgaattcaaattaggttgttagaaaatattt

SEQ ID NO: 144061 - DNA, 923 bp, Cannabis sativa
ttcggctgtggcaggggggaaattgccttgaaaaatctttgtactcccctcaattagaaagcccctactatcccttgccaccaaaccgatgccaacttgatgtggatccgaaaacagagccgcgtctacattaaccttaactctaccaacgcttggggcaaaccaatgctcagccgcatctcccagtatcaaaccagaaaaaagtggtctcaatggcagtttgaggtctagtgaaaggtaaaaattatcctataagactacctaaaaacaaataaaaatattaaatatgatttttgaaaacctaatttatatatagcatattaaatttcataaacataaaaatacttaaaaaaaaaaatgtcatataaattggtcaaacttaaaagtgccatatttaacttaacaaattttaaaatcccacattgagtgtaaattcctcttatttttattgagctgaacatcagacgggtttactgggtttcaggtttgcgggtttgcgagtttcgggttcaaaaaaatgaaaccgaacccggacccagataggacacgggttggcgggttttggttggccgagttgatcgggttggtgggttgacccggtcaactctttaaaaaaattaattttttattcaaataattatttcttttattttttttattcattaaattaaacatatataatataacaattttagcattttttatttttaattttttttatttttattaattaaatatatatatatatatatataaaatatataaaaaaaaataaaaatatatataatatattaaatatgtgggttagcgggcgggtttgggttcaacccaaaattcggtactcctaaaaactcaacccgcaaatccgcccgaagggtactgggttgaatccgacccgcccgaacatttttttttaaaaaaaa

SEQ ID NO: 144062 - DNA, 771 bp, Cannabis sativa
  modified_base (30)..(58): a, c, t, g, unknown or other
atgtgatttctaatctttattaataagtannnnnnnnnnnnnnnnnnnnnnnnnnnnnagggcataaaacccaacaacctagactttgcaacttctggttctgccccacctgcacctgcacacatgtagattcaacttattagttttcaacattatggttttgtaatatagactatgttttcatgttctgtatggccagtggccttttactttttgaacactactaattttcagctccaaggccttaatgtttttactcttggcctataggcactctattttttaacattactattatttggccctactgcattttatcattgattgtgcgatcgaccaggcagtctttaatcttggctagtttcttatggccctgagatgtaagcatttggatttacttttctttgtgtcgagccgaagtatgcctgcacctgacatagaggcaagtttagtagattattctaagcattaaaatatctctacataagttctctatgctagtttgatgcgttgtacggtctgggtgccccccaagtgaacttatagacttacggtctccttgtcacttgcaattcaccaagtttcatagagcttgcttgggaattttcgtagggttctacctggtgtacccatgtggaactaaaaaaagaataactttaagaagttaatcttgttagcaagttgtttggacaaaataataaacataaacattgttttttattcattaatttatttttgttgctgtgaaacttacataaattgaatctacaa

SEQ ID NO: 144063 - DNA, 1081 bp, Cannabis sativa
taacatggtaataccctaaactagcagggaattaaccaaccaaggctccgaaactagcacgaatcgacaacatgaatttgtcggggaacccaacaacaaatttgggtaaccagtatccccagaaaacccaaacaaatccataactcaaccaaatcaattccaaaccttaccaaaccttccaaacctgcatattatacccaatagacatattccaagcaatgaaataattacccaggctcagcattaaaaaacaccattaaagctccaagtttgagttctaaaactctaaacttgcttaaactaacagccataaaaacatgctcaaatcaacatataaaaccataatctaactctagaaacaaatcatacacgaacaacaaccacagcagcaaaaatcacaaaaacatgcataatccactttcttaaaattcaagaaacttaagaggataaagttaagagcttacctagagcttaagaacactaaaaacttgctgcaaattgcttaaaaaagagtagaaaatctagaaccctagctggttctaagagagaaagagagagggtgagtttgagagagaaaatgtttcctttatctattttttcttatttttttaataaagtgatataaattgagtttagttttattaataataccaacttaataatcactaataatgagattttaaaacttaacataaactcacaaaaagacaaaatataaattggcaaaatgaccattttgcccctcccacactaaaaatcataaaaaagtcacttaggggtatttttgtcaactctaaaatctcgactattcccgacattctcaatgtctaactatactgctccgctatactaaaaatactaggatgggattctaatagccaaaccccgcgttctaatgttgtcgggcacacaacatgataaattatgaaattctaaatatgacatataaaatgcattctgaattaaaataaatcatcaaataattttcaaattaaaactaagtggtctttacaattatcccccctaaaaggatttcgtcctcgaaatctaacctgaaaaactctggatattgagctctcat

SEQ ID NO: 144064 - DNA, 737 bp, Cannabis sativa
ttttaatcggtatttataaaattaaattttaataatagtgtggtggatgttaatcataaggaaaaaaatattttaaatttttatttcgagtaaaatatagaatcttttaaattagtaaaaaaaatatgtaatttttaaaggaaatttataggtctttaagttgagtggctctaaggacaaacctaacttacttatattcagagaagggtcgtcttaaggtgatgagaggcctaggacaaaatttgaaacgaggccttttattttaataaaaattaaaaataaattttaattaaattttgacataatattaattttaattcttttatctctatgtaataaatatttttttacaacgtaagctaactcgatcaaagtaatatttaattactaagaacatctatattgaagtgctatatattttagcacatttgaaaaaaaataatgtgtttaaattatatatatttttaaaaaaatagataataaatataaattttatttattattaatattttaaaattaaaagtacagtaatatatattttttttatacaattacaaatatttaagttataatattattatttatcacaaataattaaaagtataaaaagtggtgagggatggatcaaacttgaacctgaagtccaataaaagctccacttaccatttgtgctgcatgtgttttcatgtaatttgttgagttaaatatttatatattatacatttttatatgtatat

SEQ ID NO: 144065 - DNA, 541 bp, Cannabis sativa
ggcataatttcaaaatcaaagtcacctggttcaaaagcaatcgtgacgttgggtaaaaataaaggctttgccataggaataaaggacacggtggagggttccggccagcagcttcttgcaagaatcagtgtttgccttcggagatttcttgcaagaaatgcctgtaacgactagcaatatcttcctattggattctcactacatgttccctaaccctagtatcattcaactctaatttggaggtgggttttgaagggtcgggtttatacgagatggctaattatgtcgggaactcaaattctaaaacttctggatgataaattcctgaaccagagtgggatattgctacaggcaaaaagcagtcccaatccctagaagagaattttatcaaaactgaaggtaatgagttggagatcttaaaacaacctacatattgcctgaaccctagaatggacctagatacagtttaaccctaaaaactaccaaagccagatgagatgacaacaatacaaacaaactaagtaacaaatccacacaatgt

SEQ ID NO: 144066 - DNA, 1351 bp, Cannabis sativa
tatttttgaatattactattatttggtcctgttactttttatcatagattgtgcaatcaaccaggcggtctttaatcctagctatcttcttatgaccttgacatgtactctaatgccctaatgcttaggcacgctacagtgactttgtaattacagtgcacacctttactaatcaaagagttttctcgaaaattgtgataaatcaaaaattttatttaacttgaaactcttacaaacatatacatatatttatacccaaaactcggataccattgttttaaactttacattccaaatagcttttacagacatgtcgcataacgactacaaaatgaagcccaagtcgtctcgggaccgaactctccaagatgcatcttcttgatatgtacaatcattcccaagctcagaactcattgttgttcagctttggcctttcctttacctatggacgaaaacaatatgtgtgagtcaacagactcagtaagaaaagcatataacttacaatatattactaacttgtatttaggtgcccatacacctaattagaaggcttataagatgagtaagaatattcttaataaaagtacgacctttgtacaacatgcactaagtactcatctcgtactagtgttggtagggctaaaccgtaccccaagtactactgagtgttgcaccacatgcagtatgtatgtaccgtactagtgtttgtaacaccggatcgtaccctttgaacatcatatactataccaatgcactaagtattgctaccgtactagtattagtagtatatgaatcacaattagcatgcatatattacacatacacatattcatatttaaatataaatatattctacactagtcttacctcgtttccaaattcaagtgtgtcagttgacttgaattgaaatccatgcgctgaacggaggccctaagtcataatcacgtaaaatggtaaacaactttctaaaacctttttcgggatctaaactcaaaactaaaagtttccctattaataaatagcatgacaaagccctaaatattgaggaaacatgagaaaaacaaagaaataggaaaactgtctgaaaaacaacagggcattttctgggtctgcaccaataaaaacggtaggttgtttctgcagaaatgtcttcctgtcattcactgcagaaaaagaacgagcctccttttaactcaaagctacccatactttccaaaactctccaaaatacctgtaatcatccatatgaattgtaaagaccgcttaattttaatttggaaattagcaaataattaggatttaattgtgaaacttcatgttagttattaattattattttacggtgatttat

SEQ ID NO: 144067 - DNA, 681 bp, Cannabis sativa
taccctccattttccattcttcttcgtgacaactactacgtttgctaaccagtcaggatagtcaacctctctaactaatcccacgtcgattagtttttgtatctcttcatttatcacctttttgcaatcgagtgcaaatttacgtcttttttgcctgaccggcgggtaatcaaggtcaacctgcaacttgtgaacaataatgttagaatcaatacatgtcatgtcgtcatgggaccatgcaaagcagtgatggcgtttgattaggaattcgattagcctagctcgaaactcaggtgtaagctttgttccaatctggactttatggtttgggaactccttgctaatgcacacatcatctaggtcttccataatgggttcatctggtgcaaaggtcggactaaactgttgtagttgctataatgttgtcgatttctctttagcgagttttgataacaatcacgagcagtgttttaggctccccacatttctttcactccccacttggttgggaacttgatcacttggtggtatgtggatagcacagctttcatggaatggatctacaattggtccaagattgcattataagctgatggagagtcaactacaaggaacttcgtctgtaggttgactccttctgcaaaaacgtggagtataacctcgctgactgagtgtttctgc

SEQ ID NO: 144068 - DNA, 960 bp, Cannabis sativa
  modified_base (907)..(922): a, c, t, g, unknown or other
ttatattgccctaaggcattgcattgctcctcatgaacccccctcatttctttgaaaactaagaagtccttagctaaatgctcattttctccataattgaaacaaggttcaggtggtcttgtttgagcttgggcaaccatgcgccctttttggccatctttatttgaaaggatttcaactttcttttttgaagcttcgacttgggcctttatactgtcctcttcccgcagttggtaaattccagctggtcgatttctattggtgctttcagcagcacttggaccaatccatgtggagatttttcagcaagctcaatgagaaactcaagagcttcttcgggttccttttgaagaaacacaccgttacacatcatttctacgaactagcgctcatgacttgtgaggccttcgtagaagtagctcacgattctccaactttcatacccatggtgtggacattgacttaggagatcttaaaatctctcccaaacttgatagaaagcttcaatgtctttttgggaaaatattgagaattgtcttttcaaactgttggtcttatggatggggaaatatttaacaaaaaatgttttggtcatttcttcccatgttccaatagacctagatctcaaagagtacaaccaacttttatctttatccttcaaagagaaagggaaaaactttaaacgtgcagcatcattgatggttgctcggtcatagaaagtgtcaacaacttcgtcgaattctctaatatgcacatatggacttttattttccatccactaaaagtcggtaaaagttgaataatgacgggtttgacaccgagatttggcatattaggtggaaatataaagcgtgatggtatagaagtttgagtaggatgaaggtaatgttgggtttaatgccctaannnnnnnnnnnnnnnntataatcagatttacttattattaaagatcagaaataa

SEQ ID NO: 144069 - DNA, 509 bp, Cannabis sativa
tctttttaattttcttattttttattaggtttataaatttatgtgatattttataatagaaataattatatcgtcaattttgtaaaaaacctgattgtagatagatttcatagtcttgactttgagattgagaaaataggagacaaagataaagtttagtttaataggatatgggaaaaatagttgtaaataagggtatattatcaaaacccatttacctatctacttacacctataaatttaatttataataattaattaaaataaaaactaaattaactacctaattataattctctaaccatataatttgaatattattatttaataattaaataaaacaaaaatcaacctaattaaaaatatctacatacgtataattttaatttatttattttttatgctctttctttttcacactcaattatattacatttcaattccatttttaaaaatttcagactttttcttttttttctttttttgttgtcgtataaattgattatacg

SEQ ID NO: 144070 - DNA, 901 bp, Cannabis sativa
gtggagaccggggtcgggtgttgggtccccatcccagtcctgggtcccgattctggttctaatttcgggtttgggttcccaatcaaggtctgggacctgggtctaaatcagagtctccaatctcgatttaggtcctgcgtctgggtttgggtccaagttcatgtctggtttttgttcgtctcccgagtcataatatccgagtttttttgatttgggtccaccacatcctcctggtccaggtctgagtctgggtcctagtcccctggtcttattcccatatcccagtccgctttcggttccacttccagtctcaagtcacggggtacgggtctaggtttgggtttgagtccaggtttgggtttgagttcgggtatggatcccaaatccaaacatagactatgggtcaggtccaagccctgggtccagatcaagatcccagtcttgggtcctagtctagttccacttctagttctaggtcctggtcagggtccagttttggggtcaagtcctgggtctcggggctagttctgaagccctagtccctgggccaggtcccccatccaggttcgggtcctaggtctcagtccgagtctaggacccggtcggggttcaagtcctagtctgagttcgggttcgggtttccgatcctagtctaggtccaaatctgggttctagtcacgagttcaagtccagatccaggtccgggtctgagtgtcgggttccgatctgggtctgggttcggagacccgggtccatgtttgggtttgggtcctactaccaattccgatttcgattccatttctgggttcgggtttgggtccagatctaggtcgaggtctgagggctggtccaagtccagggttgggtctgggtccaagtcctgatccctgtcagggtcttg

SEQ ID NO: 144071 - DNA, 955 bp, Cannabis sativa
  modified_base (915)..(929): a, c, t, g, unknown or other
ccttgaagaagacgatcccatgatatgtgaagaccaggtccacatgcctgagactgcaactcaaggggacactagaccttcttggaaactatatgtagatggctctttcagtgagcacggttctggtgttggactcatcttaattactctagagggatttcaaactcaatgtgctttgccatttgagttcaccacaaccaacaacgaagcagtgtatgaggcactcctagcagtactatgattagcactagcaaacaaaaccaagtcacttgagttctacaatgatcacatctagttgttaatcagattctcagcaaatatcaagcccatgggttaaacaagatctattagcctagctcaagcactactccatcatggatgaacctgattgcatagtgttggaatatcttttaccagaatctagatttactaacaagtatgtttttaacatcctatatatgaatccctaaaacgatgaaaataaacacataatgagctaagagattgatgagaaaagtaactcgcttcatcatcatggatggattaatgtacagaaggagcttctcaatgccacttctaaggtgtgttacgagggaagaaatcaaactcctcatggtcgaggtacatgagggcttttatggaaaccatgctagaggcaaagcctctaaaaaaaatcttgagacatgggcacttttggccgataatgacagaagactcgatggacaatgtcagaaagtgtgacaaatgctagatgttctccaaaattcccagagctgccctaaatgaactcaagagtgtgcaaacaccctggccattttctatctggggaattggtttcataggctcattgcctaaggggaaaggcgaagttcaatatgtcgcggtggtagtcaactgttggaaatattttaccannnnnnnnnnnnnnnaccaagtatgtttgattaacatccta

SEQ ID NO: 144072 - DNA, 1124 bp, Cannabis sativa
  modified_base (304)..(308): a, c, t, g, unknown or other
  modified_base (542)..(564): a, c, t, g, unknown or other
  modified_base (697)..(712): a, c, t, g, unknown or other
  modified_base (774)..(789): a, c, t, g, unknown or other
  modified_base (986)..(987): a, c, t, g, unknown or other
  modified_base (1059)..(1061): a, c, t, g, unknown or other
aaaaatactctcagctaaataaaattacaaaaataccctttcggagttagcggatattacatatgcactgcaaaccatccgcgcgcgcaagtcataggggctggtcgagaaacctcggccaaggcggctgggtgcagccttgtacgcgcgcgcatggcccctgtttggacaaaatcttgtcccctgaccgagaaaactcggacaagatgcttgtccgaatgcgcgtgcacgggtgatcacccttgtccgcgcgcacacgtgggtgacaccacccttatcatttttttcaaacttcaaaaaatcnnnnntaattcaaataaaatcgaaattgcttaattttttccaaactatccaacaaatataattccagaaaaaaaattccaattattttttgtaaaaaatttgcaaacttcaaacaatcatcaaaaaacacgtagatcaacatgaatcacatccaaatcaaacatatgtcgttttaagtccaaatttcttgaaagtaaattaattaccatgcctttgaggccagttgttggaatatattnnnnnnnnnnnnnnnnnnnnnnncaagtatatttttaacatcctaaacatgaacttctaaaacgatgtaaaataaacacataaatggtatgagaaaccttacagtggttgtagaggatttaaaaggttccttcagctcagatctctaacccttgtnnnnnnnnnnnnnnnnagtatcaccaagatctgagctcgattccccttctcttgaatttggattcttcacagccttannnnnnnnnnnnnnnnaccacttgatgtgtgtgggcaattactataatcactctagggtttggttttgaagagagaaagagcgagagaggatttcgaaataggtatagaaaagatggctcaaattttactgaaggaaagtgttttcatcatcttttcctttgaggccatcactacctatttatacgaatccacctagggttaggttagatttnnttggcattaaaataataaaaaatttaaatggtaaatctcccattaagtggtcggccatggatattgggcccnnntttgcaattttaccatttttccaattattcatctttttttctaaaaaatgtcatttttctaat

SEQ ID NO: 144073 - DNA, 698 bp, Cannabis sativa
aatgtgagagaaagtctaaaattgaaattgtgaaactttctataataaaagggaattaacaatatttatactattataagattatgaactcccaatttttaaactacaacacaattaataaataatgtgaacttaaatacatatatggaagagaaaaaggagagtcacaccctaataaactcttttagcagttataaaataatttatatatttgttattctttataactaattacaattaattaattaattaaataaatataaaatctcacaaaatagatcaagtaggattgaatagaatgtaagatgccacttgaacttttttgggctttcccatatatagagttatcatacctgtcaaatatgttccagtaaatcatcaaaattaacaaaaaaaccttgaaatcctcaaagaattattctgaagcctcaaaacttttaagctccttactgtccatattaaccaaaaatagcggtcaaactattatatttttcaaaattaaacctgaaattctgtattttaatattctcagtttaattatttaattaagtgattaattaaatacggaataatgaaactggtactaaaaacagttttttcatagttacagaatttgtaactccagagaaacccagaaaaacaaatagtgcataaaagtaaaaacacacaaaatttttgtgcgtggtttcaacaatcct

SEQ ID NO: 144074 - DNA, 943 bp, Cannabis sativa
  modified_base (258)..(258): a, c, t, g, unknown or other
cacccaagtagtcgaaattggctcaaggattagccttccaaaaatcaaagaaaagctcaagaccggttgtctccaaggcattgaccttctccttcaacctgtccaccttagccgaaagctcgccctccttggcgtccttttcctccttcatctgatgaagaactgcttgcagagaagtcatctcatcttgaagactgtctacctcagcagataagatctcgatggtctcctcaaaatggtcagcaacctcgagatccntagtcagcacagtgattttcttctcagcggaaaacaacttcttgttggcttcacccaactccaaccgaaaagctccgacttcccctggcttcttcagcatccttcttggccaagtccgcctccgccttcagggtgtcggacagagccgcattcttggaagcagcagacttagcccgggaataagtgtaggccaacttcagaccggcctgcacaaaggaaaaactttagcatattgagcaaagtatggaagattaaggggaagtatcaaaaaagacttaccctggcgaactccttcaagactccgcccaccaacaactccaaagaagagtgattgtcagcacaagccagttgctcactgacctcaggaaccagccggttcatataatgggccagcatctcctttcccttcttggcctctggaagcaccggcaaaggtaaagtaggttcctgcatccgttcaagatcgcttttgaccagttcagatccaaccattggtggtccagactccttagactttgcagctttgggggtagaggggtttgcaacagtcagctcctcggaaagatcaataaccttcccggtagacctcttttcctttgaagagaacccctcaccgcccttagacttcttggccggaggagaggcgctagagcttccgcctattctcttccttagagcgtcgagc

SEQ ID NO: 144075 - DNA, 619 bp, Cannabis sativa
aaaccttttggaggacttataataatatgcggcagagactttcgacaaatattgccagttgttccaaagggtccgagagctgacattgttgatgcatctcttaattcatcatacctatggccattttttaaaatatatgagctgaaccaaaatatgaagctttataatagaaatgtcaatgaagatgaggttgctaaaatagcttcttttgataaatggttgctgcagattggggatggttcattatattatgacattgatagggaattcatcaaaattcctttagacatctacaaaaatccatctgatgatcccatgaattctatagtccaagctatctacccttcactatagtataattatagtgacccgacatatttgaaagaaagagcaatactaacgccaaaaattgaaatagtccatgagttaaatgagatgattatgaatatgataccaagagaagggaggacctatttcagctcagacagtatatgcaaagaaagtataaacacaatgaagacgatcttttgtatccagctaagtttttgcatagtttgaaatttaatggcatccccaatcatgacatacacctaaaggaaggtgctcctgtaatgctcct

SEQ ID NO: 144076 - DNA, 836 bp, Cannabis sativa
tatttaaaatttcgtgaaaccgtatttttgtaatttttgtttatttgtgaaattatcccttatatgtatttcataatttattatatttatttatttttattaaaatatatatactacacagttaaatgatacaatcacacttgggccttgtgttcacggttagtgttggaccaccaacttcccactcccctttttcataaaagaatcaactattatagatacaaaataatttatgtgcattttaatttttttccttttaattggtctaaataagttcctcatagcatgaggaagaatgtagtggccctactttagaacttccctatactatactaaccaaattatatactacaattaaaatatatataccatgacaacaaaattatatactaccattgtatataataaatgaaaactaattaaatattatttaaaataaataaccatacaatcaaaataataaaaataataattaaatatatgtagtatactaataaaattatatacacacattaaaattattatcccaatttttgcactctgacgtggcctcacgtgatggtgacacgtggaatcgacttcgagtatctgctcagagaatacagtccgaacaggatgcctcatccgcgcagagcgaccaacacttagcgaattcagctttcacatcgtgaatcattaaagaaatccctataacttggagatcagattacagagatatggcaagctgtccaaatcccatgattaacgtattttgtatttattatgcaatctttctgcttatatccattgtaacaagaagggaaatacttctttcccaagctcatagccctataaat

SEQ ID NO: 144077 - DNA, 541 bp, Cannabis sativa
atcactttgttgacctctgaggacaaatttgtggagtacgagctctacccaaaggatttcgtccctcagccggtgaagaataaaaagaggaaatccaatgctggccagagtgaagagcccatcaggaggatgaactcattcaacttaagtgtgaggctaagttgaggggaggtgcgggggaaaaacagtatgctcattagcctctgaatccaaaacatgaggccgaggaagagcaggtgacgctgctcaaaaggaggaagaaacttcccaccgagcacatgcctattgaacatgcaattccaatcaaggagcccagtctacctgctcggccatccactcctgtattaggaaaggggaaagtcgtcctagcagagataagagacttgtcaggtgatgatgggctttcaagtcttgctcgggcaaatggttcgcgaaatactttgtcttgtttttaatcttcttgaatattatgctttcatacttttagtacttttctcttaaccatgttgcttttatctcgtgcagacatgtctcaaaagat

SEQ ID NO: 144078 - DNA, 502 bp, Cannabis sativa
acctcgcctgaaccagactcagcgggatgatgtgaccttgacagtgtctagtcgcattcgagtagctcgcacgaagcaggaccaaagatcaggttaagactcgcatataccaagatatatgcgaggactataaagatcttcctgctaagaggtaaagattgcttctatacccaacgagctggtctggatgaccaacaatctcgataacccaataagaactgacatgtcttaagttatcgacttattgcaggatgtccatataagcgactcgaacaagacgcagacatctcaaacttgactagtcttgtacacatcttaagcctgcaagcttatgcgagaatatgaacagtcaacttgtgctatagaagtcgcatacgttgttgtatttagtgaattgggccaaaactgttctttatttattgtatttatgtttttttattgatttaaatgttatattcaatgtacaaacagattgatgatgaaatcaatctctgtgtaatca

SEQ ID NO: 144079 - DNA, 568 bp, Cannabis sativa
  modified_base (387)..(395): a, c, t, g, unknown or other
aggccactaaattaaattaggatgttcaatacaattcaataacaatcgaaggatacaatcatacaattataaccaactgataaatattagatatctaattagatatccaattgttataagatcaaattgcatgttatttttgaaatccaattagatcagattagatattagatagggtaaattgaaaaataatacttttactaatcaattgattaaatttacctctaattttgtatttaattaaaacatacctctttttacatgtattgtacccaaaataccctgacataagagaatcacatgatagtatcttgaagtaacatgggcaataacacggataaaatttgtacaatatttaaaaaaagagataaaaatgatagactttannnnnnnnntaaaaataaaaaagaacaatataaaacgggtatacagtacaatttcctctattggatgtggtatctaaaaatctaataaatctaatatccaattgaattaattagtattttcatttaatttgaatgagtaattttattttatattgttatatgtaaaatatatatatgtttat

SEQ ID NO: 144080 - DNA, 1253 bp, Cannabis sativa
  modified_base (35)..(37): a, c, t, g, unknown or other
ttgacttagatagatataacagtaagtttatgatnnnttatccaagttcaatatcggtctaatccgatgtatactctatatatctgatcctagcatactgtgccaatgtcctagaaaggacataacacttattcaagatgtaagtaagctctatcgctaattatcatgtcagtgtaaatccagtgtactgacaaattatgggacttaaactttgaaacatataatcatgatcattgtatgttttggatttaatagaatttatacattaaacttataatcatgaaagaaatcatgtgaaccatgcagtataaaatgatttctaatgttttattaattagtaaatctgattacattaaaatgggtttatttagggtacaaaacccaacaaactcccacttgtactaatataaaactaaaagtgtatttctctcaacaccttgatgtccagataaggtgtagtatgtagtattatctttataataggatctgactagttattttcagtacaaactttctccaccattacatctccttaatcacaaaattcttgatatagtgaaatttatttctatatgtttactcttattgggatattggattctttactatttggcaattatatctttgttagtcatgaagcaacactagtagttaatccatgactggaataacgccaaaagtcgtatggaactttccataggctgaataattttctaatagctttcctggccactttaacattcagtctcactagtagagttagagactccagatcaatttttacactttttcaaaatcactgctccacccccagaataatcaccatctcataagtagactttctagcattaacgctagtctagaaaccatatttggtgtagtctaagagtattaaaataccacccttatcaactaacgtatagttcctctttttatcttaagatttatttgattgttttccaatttcctttcctggattaaactgatacctactcataactcccactcaacagtaggtgtttggtcttatgcataccaaaacatacatgagaccactcactgttgatgcttaaggaactctttcatgactgtatcttttttggagtagttgaaattgttccttagataaataaaatctatatctaggagtcaaaagacttcatttagaattagccattagaaaaaatgcttcaacatcttactaatgtaagttgcttacactagagtaagtaaattaccaggcataccacaag

SEQ ID NO: 144081 - DNA, 645 bp, Cannabis sativa
caaatccgaaaataccattgttcttcatcttcaacctcaagctttcaaggacattgaacaatggaggtggagtagtggcttcttcaggttttttgtaattatcactctctattaaatttaagaaattgattgaatgatttagggattttagtgaaaatattgaatatttgaaatttttttggtgatagtggaattattgagttgatattgtggatttggactgttgttattattatctgtactgttctggtgaaaataaaaatttgggaaagtataaatttaaggggaagtgctgcctaattttttttcaaaaattattttttgtgaaatttttttgtcattgtgctaatatgggtccgaaaagaacaagaaataatgaggaagggggttcatcatcaaacccaccacctacgggtttttatcgaacccggtttgtaagtgaggtggcacaaatacggttcacaaggcttaaggttaggccgtacatcgaggactgggtattgaatttcctaaaaatcctttgaggcgtcaatcgaggtttgagacaattcaggcccaaattgaaagaataaaatggggcagttttgttgatgctaggggtcgggccaatgttaccatggcatgtgaatttctcgccaactggcc

SEQ ID NO: 144082 - DNA, 700 bp, Cannabis sativa
tagaatcttttctttaaactaagtatgtatttctaaattaattttaaaataatccaatgaaaaattaattcagtatattaaattaattcagtatatttcaaaattaattatgttgctaattcaattttagttttgttaaaccagtaccattagcctaatctaattatttaaataagacaaatgaattttaacaattggggttgttcattgagggagggttgggttcagtatgtcgtacccactactaatgaccccctaactctcacagaaggcccaaaggagaagaatttaaccttttattaaattattgttattcattgaataagctcaatactaattgggcctaaataaaactatgatatggtaaaataaatgggcctcctatatgcacctagtccatttatatattttgaaataaatgggcttcctatatgcatctaagcccaaaagtaaatatataggctcacacaggttaaattgatttggatgaaccctatcatgtttctaaaattacaaaatttacctgtgacaaattatttataggatctattaacatttggactatgattaaaatcatatcattggatctgtcaacaagttaagcatagcaatttagatcaaacaaataataggtttgttaaaaaaaagttttgaatgaaaaatttaaaatagacaaacaatgtccatgtaacagatgtga

SEQ ID NO: 144083 - DNA, 578 bp, Cannabis sativa
  modified_base (524)..(536): a, c, t, g, unknown or other
aattttattaaaaaaataattaaaagattatttaatacttttaaaattaaaaaaataaaatatatatataaaaataaaaatttaatttaaaaaatataataaaagatgatatagtgacacacattttcagttactatatatatgaaataaaaaattaaataaaaaaaaagatatagtgacacacattttgcaactctaaaaaatacatttcctgacacctacattattgacacgcattgaagtgtcactaaaacactatagacactctcaaaacgtgtcactgaaaggcatttttgtagtagtgtaaagtcacatttagtcacaaaaaatttatgttatgactaataaaaaattatcactaaaactaaccggtttttgtagtgacaatctacaataaatagtcttaatataaataaagaacttaaaaataatttttcaagaaaaaaatcatctacataaataacaagaaaaaatttgctggccttcctcaactaaacagaaaaaaggtaaataccattttggannnnnnnnnnnnnaaaagttaccgattggaccatgtattttgttaaatgacaaaa

SEQ ID NO: 144084 - DNA, 857 bp, Cannabis sativa
  modified_base (811)..(832): a, c, t, g, unknown or other
agtccaggtctcggtttgggttcaggttcgagttcgggtcccagtactagtctgagtctgggttttgggtcccaggtacgagtttggttcttcggtcccgggtctgatctaaatttttgtgtctagatttgggtttgggtcccgatcttggtctaggtcgtagtcttggtttatgtccaaggtcaatggtcccggtcaaggtccaagtcctagtatggattttggtttgagtttgggtcctgttacagtcccaggtctgcgttcctgtcccagtgctggttagattttgtgtccagaatccggtctggatcccggttttggttcgggtctgggtacggatctgggttcgggtcctggattcaaacactgactacaggtatggtcgaagcgtcagctccagattaggatctcggtcttggatccctatctcgttccagtttgggtcccgggtctcgggccgagtcctaagtttgggtttggggttgggttccgatagttaggtcctaggttctgggtccaagggcaggttctgtgtcattagtctggggtcaagtttcgggtctcggtcccggttctagggcctagttttgggtccaagtcccccatgtaggtcgagatccttggtttaggtctgggtctaggttcgggtttggggcccaagtgcttttcgaccgatctcttgcccggtgaatatgcatcactatttataaggctagtaagctaggggaggaagagtttgccctctcgttacaatgcgtataaagaaaaagattgtgggatcaatgctaaatgcaaggatcgtgggattgannnnnnnnnnnnnnnnnnnnnnatcgtgtgtatgccatatccacgta

SEQ ID NO: 144085 - DNA, 540 bp, Cannabis sativa
gaggaattttcttggagaaaaaaaaagaactatttaatatcaaggttacactgataaattcaagtgacttgtggattaatatttattaacacttgaaccacataaacatactcctttttactaacaattattttttcttaaaagaaaattaagtagttactaaaaatctcagtcaatagataagatataaacaacaactaaatgtttataatagcaacaaaaacctctctactaatgcaggcgcctaaaatttcttgaatgaaaaaataatttttattagattaaaataaattgggtttgattttattaaaagtcttgtctttttgacatgttgtgagtgagtctgtttgttccttgctgttctttgttttgttcctgtcagtgtgtgtttaaggttgttctgcggtatggcttctagtagtagtcagattaatgggattgatgaaaagtatgctcagatacaaatcgatgatgaggaagagggaatactgatcgaagaggaggcggagggtgaggaactgatttttgatgacagatggt

SEQ ID NO: 144086 - DNA, 508 bp, Cannabis sativa
cctctaacattattgatgttgtagtgttactttgtatactttgtgtagcattggcgatgcttgagatatcaacattaggacattaaccaatattgacaggactagcattgcatagcactagtccataaaaaaatttaaatttctatgcatgtattaggggatacttttttctctaaacataaaatagaggtattggtaaaatgggataaaatttacttaattcctacattaccctcccccatttgaaacctgccctctctctcgcctctctttctctctcgctcagtgccgcacccatacacgcagaccacccacccacggcagaccacccatgcagccgaccggcctacatgacccatgacagaccacccacggccgaccgctcccctcaacccacatcactcacgccgaccacctagaccacccaaaatgtctaagataattattttttttttttcaattttttcctttaatttttggtgcttaaattcatgaaatagaataatat

SEQ ID NO: 144087 - DNA, 1231 bp, Cannabis sativa
atttattgaaaccaattcttattttaataaggttagagtttatcccttatttaaatttcatatccaatatcatttctatgtatcgcatattttttaatgaaactattaataaatgataatttaataatcatattttgattcctatgtttaaaattaaaaagccttatttgatttttcattatgatttaattttttaaattacaaagtaaccactaattaaattagttggatatttaaatcaatccatatatattatgtatttcaataaagctaatttatcaaaatctttatagttctttagattaatgatcattataaaaagtattaattgtcttagttaagaataatttaatatatctaattatagtaatactcattttgaattcaatactattttcgtgagtagtatactcccactaaaataattaagaaatttttacatcaaaaatacaaaatataatctttattacataaatacctacatacgggtaaagtaacttttatacacttttgcttaaatttattacatatttaccacatgcacatacaattcttaccttttgagacatcagtgattaatgtattacatcaatcactttatacatcatttccctcatttttctcttatttttctttttttttctattttttttcaattttttttttaaatattaacctccatagctgaacacttccccctccacgatcccaactctatttttcctcttctttttgttcttcaaatttttttcaactcccaattaaccgaaatcccataaccgttttttttttttttttccctcttaatccatatataaatatgggtgtaactcgttcttcatcaactccttctcctgttaaaaaaaaaagttctaaaatggggctgaaatctttagctaatagaaacaagggtaaacgacctgttgttgaggaggaggactctgattttgctcctccattgtcgaaacgtgggcgagctcctccaaagaagaaatcgaaggtggctgcccaggaaaatattcctcaagatgatacttaagaaatgatcaagatggagttggtctttggtatcaggtttgatttcggtttcttttttgttttgccactttttggaatttgtttgtattttccatttgtatgttttgtgtttttcgattttactattctaggttttttattttagcattttgtttggttttttagggcatctatttttttagtttaatttatt

SEQ ID NO: 144088 - DNA, 1119 bp, Cannabis sativa
cactttggtttcttgatgaatctactagggccaaaaataggaaagagaaaggaagaaaattatttttcttattttgtcactttcttctcttaattatctacataagaccaaaacaaaattaatttacttaacccaacattggatagctgtcatcacaagaaaaggccacttaatcccaatgtcaaaatgataaaaatgcccctctcaaaactcttaactagtaaagtggcctaggggtaaaatggtccattaccaatacccagcctaatttcgacattcccaatgtctatctatatcgccctgctattactaagatactaaaccatataaaaatgtgactcttatcggccaaacgtcgcgttctactattaccggcataaaatataaaaaacataaaatttcatatatagcataataaatacacttagaattcaaatatatctccataaatcataaatcatatctagaaatataatttcataattaagccctaattatctactaaatttttatattaaaattaagcggtatttacaattatccccttgttaaaaggattttgtcctcaaaatctaacatgaaaaattctggatattgagtcctcatgttagactccaactcccaggtggcttcctccactttagtgtttttccagagcaccttgaccaaagttatggtcctgtttcgaaggactttatctttcctgtctaaaatatgaactgattgttcctcgtatgataaatcatgctgaagttctaggttctcatagctcagcacatgagtgggatctaaaatggatattcgtaaaatagagacatgaaacatgttgtgacctgctaaaagtgttagagacaaggctagacgatacgctactagttcaacctttttgagaatctcaaaaggccctgtgaacctaaggcataacttgccctttttttgaaacgtttgaaccccttcatcggagacactcgtaggaatacatgatctcctacctaaaattctacatttttgtgcttcaagtttgcatagctcttttgcctactttgacaggcaagcattctgtccttgatcttttctatagcctcgttggcctgttgtactgattccggacctaggtat

SEQ ID NO: 144089 - DNA, 543 bp, Cannabis sativa
  modified_base (149)..(150): a, c, t, g, unknown or other
  modified_base (299)..(299): a, c, t, g, unknown or other
ttgttgtatcgtacgatggtgtttggtgagttgagggttttaattggatttataaagccgaaggcaatttgacgttgacaattagaactgacacaaccatacagcaaatgtgccaaaatttatatgaagagttggaggttgatcctttnncgtatgatttaaaattggagatttgttccttgtacatgaaaggataaatggttccgccagatgttattaagaaataacgccaactgagaacgttcttagagatgagggaaacaatgtcaaacacagattttatgccattattcgtgacnaatgtgagaaaagttgggaattcggagccgacaccacctactaatcctctccctcggagtgtggtagggtctttcattcctgaaattgatgttgggattggtgtgaatgaggaggttccgaccaatgtagatcaacaacaagaagcgactggatttgatcagtttgaggagttcgatactaccttctacaataacgatcctattgtagatttgaatatgaatgatgaacatgatttggcagtcg

SEQ ID NO: 144090 - DNA, 1285 bp, Cannabis sativa
  modified_base (299)..(306): a, c, t, g, unknown or other
  modified_base (576)..(577): a, c, t, g, unknown or other
  modified_base (832)..(850): a, c, t, g, unknown or other
tttaatttatttattaaaatataatttagataattatttaaaagtatcaacaaaattaaataactattttttatataaatcttaatttaaatttgaattaggtgttaactcaattaattaatcatactttataacaaatttattagttatattatttaaaatatcaaaacttacttacttattttattatttaataaaattagttagacatatttttttataattaaatttaaagttagattaaattttatatatttaagaatatataattgaattgtattagatttaattttattatnnnnnnnntttaaattaataattaagtaatagcaaaggggtgttcattagatcacatccaatagatttggacccaaccgatccaatctaattatttattggatattgaattttgtcatcggatctaatccaatcgaattgagtcatttgatctgatccgatcaaatggatgtattggattggatcagttccaaccattggatgcattgactggttttctattatattagattggatccatcaaatccattttaactaccatttaagttgatttcattnnaaagaaaaatatatataaaaaaatatataatttaaaacttaataatctaacatacataataaacattactttagtctaacctaattctcatgatctcataataaaattgctaaaaaataaaatttattcaatacacattgacaattttattagttttagaaagatgagaattaatattttaaatttaaagtattttttcattaatctcatgtgttaaatatatattaaaccaattaatatatatttttaaataannnnnnnnnnnnnnnnnnnattataaatgtattttaaaaatacataaatataattggatgaccattggatgataattagatcagtttggccgattatccattggatcggatgtcccatctaatgaccgatctgatccgattggatttttaaaatttacatctgatccaatctaattatgattggatatctaattttattggatcgatcgattgtaattggattagatgactttctgaacaccctattagcaactctaatacaactctaagtaaacatgcattgtatgttattaatacttagtaagtatataaggatttgtatttacattcatttttcaaaaatttatttattactttatgttgcccctgaatttgcccaaaatacgtggaccagtcgaatagggacacgtggatcagataacttgtaaatatttgatgagtctttgtacgccac

SEQ ID NO: 144091 - DNA, 1409 bp, Cannabis sativa
tagacttgaatacagactcaagattataagaaatacaaacaaacatagtaagagtcgaacaagctcttctctacaaaacaaagaccctcttttctaaagatatgagtgaaaatcaaagatacgaaaggggtacttgacctagctgctataaggggtatttataatcaatatacaccttattgacagctcatacacggtttgaacaagaccacaacccactagaaaattccctaaaatagatattcaatcagcccaggaatgtccatttctgtacctatagaattgtgagcagtaactctaacattccttttatagaaaaggaaaattaagctccggttttctcctcaaaaatctgatctaacaaaatagaaaactcacacaagatcagaatatcacagcttgttagatagaaaagaattgagtaaccaaacttaccatttttacattattttccataaattggaaaacaagacaactttcctttcaaagatagattccttaatataaaggtcacatacaaaatatggaaaccaatatttacagcacaaccgaaattaaacaataaataataaaatatttttatcacattaaagatgctaaaaataaaattaacaatctccccctttggcactttgattgacaaaatattttattcggagaaaacctacatcaagtgttcgaaacaaaaaaaacaatagtatagaaaatactccccctggatgaaagcacactaacacataaaacaagataaacgttttaaacgaaaaagttcacaaaccacaaataaaacaacccccctaaaacaagggtccagagttgtaacaaacaatctaaaaaataaatactactccccctttttgtctttcaaggagccaaagataacaaaaaaacttggagaaagacataatagttcaaaacacataaataacaataaaaagattaaaaatggaccacttattcaacatcattagattggaagaatttcatgatgttgttcatcctcctgagaagtaaggcttgactggtctccattcttcccaaatgcaagttgaattcaatcatttctgtaagagcataagtggaggtagatgtagcagcatgttcatcaacagcaccaggggaagcagagcgagcttttttcttagtagattttccttgaggaggtttttctgggacattgaaagtggtaccaacagcaagaatttctatggtttcattctcaagaatcaactcctcttggttagacaaaatcttataaatcaagtgagaaaaaataagattgactctaggcttcttgcccttttgaatagtgacaatttgctcccaaatcatgtcagccaaatcaatttttgcaccagtagaaacattacattaaaagaaagcaagttcatttgaaacatttaccgaat

SEQ ID NO: 144092 - DNA, 506 bp, Cannabis sativa
ggctcgtgcttggatgttttttgtgagtgctaggcttatgcctagtaaacatttatcggattgtcctttggatagactcagggttatttatgcaataatgaaagggattaatgtgccagttggaggtatacttctacagagcttcgataacatggtaaaaggaactgcacatgcaggaattggcctagcgagagttataactgaattgtgtgttgctaatggtgtgccacaatatccttatgataatcaagtccagccacaacgtaatattgattggacaatggtgcgcaacctgaagccaccacatccatatggccaaccaccacctcctcgtcgtaatcaacagcaagaagttcatgtccccgaggaagaggacaatccaaatgaagaaatgcctcaaatggtccccagtcccactcctcttgatgcggggatgcagtatatccatgctcaactcaactacattatccagcaaaacaatcatatccagagttacatggtgcaaa

SEQ ID NO: 144093 - DNA, 796 bp, Cannabis sativa
gaatggaacccttgtatgaaagattctggaagcaggcacctccggtttttctaggaggtccggatgtcatgaaagccgagcagtgcctaacggtgattacaaagacattgaatttcatgggtgtcactgggaatgacagggtggtgtgtgccacctttcagtttcaagaggacgcctatgctagttagggtgttacagattccttgtgaaaaattaagcaactttcgcttgtacgaaactcaattctcatgaaaaacgaagaagttatcaagatttgaaaaatcggatgcatataatgtcgagcatggcaccagatgcttcggacaaggaggtgttgcgtgcggacaaagggctgtctgaactcagcgtgcaaacccttcagacacgatgcttgtgtcttgatcctgcgcacgcccagcacgcaccctgcagctgactcagatttctcagtcgaggaggctacatccctcctcccgcgcgtgcatgagggccatttccagcctctgatggctgcacatgcagccttcctacagcaacaccccaagtgctatttttgtgggatttttccccaaatttctatttttcccaatttcataccctaaaaatcaaaataaaatattattttcaatatattaaaacttaaatatcaattttaaattaataatatttaatttttaatagattattaataatttttgatcttttgaggattaaatttgaaaactgattatattattttttaaattatggtaagatttaaaaatttcttaatttctttaatatttatagattattt

SEQ ID NO: 144094 - DNA, 592 bp, Cannabis sativa
aggagaacttgaggggaaagagaccgaaacccaagaacgatgcaacaaagttggccttcgtaccctttatcgagcctggatgacaaatccaaacatggacacgagtttcttggacgaagaggaggaggaaattcttgctttctacgagaagactaggaaggaggaggaagaggccgaggcagtagaagaagaagatctgtccaagtctcctactatgtaggcttggttttttatttatttttactttgtttaaggaaatggccctaagaccgagacaatggtttgccccttgcagcaccttttttctttttgtaaagataaatttgcaaggttgggcgaccaactttgcttttacctttattaaatgcttcatatttttatacttgaacttcaatatatacttgtttgttttcatttttattcacaatttaaacaattatagtttaaataaatgcaaaatactttaggcctttcgattgctcatattttcctctaataatatgtaagtacttagtagtctactatatgcgcgagcagtttattatcttccatgcttttaatttgcgaccagttatcaattctgcctcgcaat

SEQ ID NO: 144095 - DNA, 518 bp, Cannabis sativa
ttattttaataattttttagagatacttattattggattattttagaacaaaaatattaaaaatgatgtgaaagaaaaataaaataaagggattattttgaaaatacacaaaaataacaaaaaaaaaaaattacaaaattacggttttataggattttaaatatttttacgatttttttattttatttacagaaaatacggtcttttttgttgtacttttgttaatttgttaattttttattatttgtatgttattttttattactagtttgatgttatttgaatgttattttcatgttatttttatgtaattttttattatttttatagaaaactataaaattattaaaaaagaattaaacgtaaaatataatttttttttaagagaatagtactttgtacaattactcttaaaataaaataatatatttttaagtgatttagaaagggaaatttgattttctatacttagaaaatcaaaaaatttgattcctaaaccaataatttaaaccctaaaa

SEQ ID NO: 144096 - DNA, 808 bp, Cannabis sativa
acatatttttcttaagatagggcgcccagaattagagtcacatgaagtattagggttaatgccctgaaaaatctaaaagatatttttgattattaataaggagtgaacattttgatatatgcatgaatattaaattattaataattatgattgaataatttatatataaatataagaaaattctttattcatatatgaggttgtgacttgtcgctgtacagagaactaagatcacttagctatgaataaaactaccagcaacatattaaagttatagaatttttaatcaatagttgttagtgcggttcattgatgctcgttcttcggtgtacaaataatctcgagattcagagattgctgatatagtatgacatcaaagtgaaggtgatatagataatatatattatataagacaaggaatgatatgaataaatttgtctttatctaacatgtcgtttattataaagacctaattcatattataatgatgatcaatagcatatcgatctaaattctgattaatcatgaactcctattcatgttattagttttttttattcactcgttaaagattcttagagaagatgatttttacaacttctattttgagaatctaataatgtggatggttaggaacatgatctacaattatacaatcctgactttctaaacggatcgaatattaattccctttaggggtgtgtttgaaagtaactatgtaattactaggtggggtaattactatggtagtaattacacagtttagtaattacactatattttaaaaatgcaaggtgtgtttggatat

SEQ ID NO: 144097 - DNA, 841 bp, Cannabis sativa
  modified_base (321)..(325): a, c, t, g, unknown or other
acgcggatgacctagaagaatgcttcgaagtggtatggagatacgaaatgaaactcaacccgaagaagtgcacttttggggtcaaatcgggaaagtgtttggtcttcatcgtttgcaagtgggggatagaggcaaattcagagaaaattcaagctctcctaagcatgccttcccccaagaaacacaaagatgtggagagcttaaccggaaaagttgctgccctgagccgttttatctcccaatccacagaaaaatgcattcccttcttcaacatcttgaagaagtgtcaaaagttcgaatggtctgacgagtgcgaggagnnnnncaaaaaactaaaagagcacatggctaaagcaccaatcctgtcgaaacccattctcggagaggacttgttcctgtacttggctgtctctgagaatgcggttagcacggccttagtacgggaagaggaaataactcagcatcccgtgtactatgtcagcaagcgcatgacaggagcggagacgcaatactcggtgatcgagaaactagttttttgcctcctcatggcctcgagaaagttgagaccttagttccaggctcacccaatcaaagtattaaccaatcacccgctctgacaagtcttacaaaagccagagtcatctggaagtcttctcaaacgggcgatggaactaagccaatttgacctacactacattccacgcacttccacaaaagggcagccgctagcagacttcatcacggagtcccacgaagcagaagctaacactaacgtacccacatcgccagtcccggcatggaaggtatttgtggatgacgcctccaacgagaatgggtccgg

SEQ ID NO: 144098 - DNA, 851 bp, Cannabis sativa
  modified_base (45)..(59): a, c, t, g, unknown or other
ctggtaaaacatattccaacaactcgcctcaaagccatggtaatnnnnnnnnnnnnnnnaatatgaattaaaacgatgtttttgttaatttggatggtttgatgatggtttatgtggttacttgatgaatgtatgtgttttaagaaatttttccatgaaaatatttttttttctttttgaaaatattttatttgtatttgcttgtgaaaaattaagcaattttcatttttacggaactcagttccgataaaaattgaggaagttatgaatattggaagattggatgccattgttgtcgagtaggtgcatcgagtgcacgaggccgttggacaagacgggttccgcatgcgtgataggggacaacttctttgtctatagcgcacgcacgcccattttccggcacacgaaggcagcattgcagcctcctgcgcgcgcggatgaggctgcgcgcatcctgtgtgcccaacaaacgtgttttgcaccccaaaatccaatttttgtgggattttttcccaaattttggattttttaatttttaaatccaaaaatgaaaataaaatattatttttaacatacttaaacttaaatatcattttttaaatcaataatatttatttttaatagattattattaatttttgatattttaaggttttaaatttaaaaatcgattattttaatttttaaattatggtcagatttaaaaatttattaatttctttaatatttatatattatttattttttagcttagatattttaatattatatatattttaaattaaaagataactttatctttttaatttgaagtattatattaaaatcaccttatatgataaattaaataa

SEQ ID NO: 144099 - DNA, 802 bp, Cannabis sativa
  modified_base (757)..(772): a, c, t, g, unknown or other
aaaataccgtattttatgtaaataaaatcaataaaatcataaaaatatttaaaattccgtgaaactgtatttttgttattttttttgttgtttttgtgcatttgtgaaattaaccctttgagttatagttatttcggttacaaatattaacgtacgtcttacattaagatattaaattaaataacaccgaatataaattaaagaaagctattaaaaatgtgattaagtaatataaattaatttagttctcacaactagttgatcataaaaaaaacaaatatgtatagctaatattcattagttgccaaattagatgatatttagtggtgagaatgtgatagttttttttagaaagaaactattatttcactcaaggctctcaaattatttaggccggtctaggtagttttatattgtgtattgtattttttttcaaaaatattgtgtaagttttatactgtgcacagtgttaagttttcacggttgttttttagttgtcccactgttgttttaattgttctgttttactgttttacggttgttttataaaaagacagcatttttttaaaaaatcctgtgtgacaataaaattgtaaacttttacccaaaatgcagtatttttgtaaaaattcatttttttataaggggcctaatttttaaaattagatcagggcctccacaatatttaagacaaccctgcttaatggttttttcactattgttagaaattcatgaaatttctcaaacatttcaaatnnnnnnnnnnnnnnnnaaatctagagtgatcatcttaagaatttaa

SEQ ID NO: 144100 - DNA, 737 bp, Cannabis sativa
  modified_base (54)..(57): a, c, t, g, unknown or other
tttaatttttaattgtatcactttaaaataatatagaaaaaaactagcataaannnnagtatacgtgcctcgcacgtagctttttactagtatatatatatatacagtgtggagacgtgcataattctcgtcaaaatttaaagattaattatatattttattttaagagaggtagaatatactttcttcttgaaaattaaaaaaaaaaaaaactatatttagtgacaacttcttagttataatataaattttttataattaaatgtaacttttagtcactttaaaaagttacatctatctatatatataaaggagaagtataaggcggtgacgtgacagtctaaaatctctctaattagccttatatgttctattcttaattctctctctttttttttttttttatttaaatagtctatatctttatattttttttcttattttttttaattattttattatttctttattttttattatattaatttttttttgaaaaaagaaatatctatccaatcacactatatacgtacatcaatgtatatatctacattttattttaaaatatttttatatctaatataaattaataaatctataaataaatatcattgagtacaccaagcacaaatacttatactattttttctattttttatataactagtggagaaaacacgtggtatgcacgtgcattatataattaaaaatagaataaattatataaaattaattta

SEQ ID NO: 144101 - DNA, 928 bp, Cannabis sativa
  modified_base (782)..(783): a, c, t, g, unknown or other
ttgagcctaaacttgttttgttcttcacctattgaaccgaaatttgtatccacactgttaattttgtcttcactatattatcaatgatattataagctacacaattagtttgggggagcaatatacatggtgtgagagaggatataagaaagaaagcttgcaagattgagaaaaaaaaaaaaagaaaagagtattctgtaaactcaacatcactagaaaaaaaaacaaacaagaaagtggaacatgattcaaaagttttaaaagaaagaaaaaaattctcagtgatgttgggaaaagaaagaatagaaagaaaaaaaataataaataaatttttcttaatcatggttagttatgggaaaactttgggaaattttgaaattatgagaagcttgtgggttcttttgtgcttatgatatctttagccaaaattgtctttcgtttcctaaatatctaagccatactttctaaaccttaaaaagtcctattgattctaaaaggatgttgtcaacattagtggagagaggtaagcatgcaagcatatgagttatcggattacggaatgattggaaagagtaagactattataacattgtttcgattgtgaagtcatcttgtgtttatgcattgtgtgataaactgagcatctaaattaattgttagagttggtggaattgaaattctagtttgagaaatggaaggaaacagaacatgaggcagcagtattgtgattatctgatagcgtatctagtagtaattttttgtcttactcgagggcgagtaannatctagtttgggggaatttcgttaggctatttttagcctaagtttcaggtcttatagataagaactttctcgattattgttgtcttttggagcggttttacgcttgattttccttgtttcaggttcccggtgcgttagagttcaa

SEQ ID NO: 144102 - DNA, 668 bp, Cannabis sativa
  modified_base (280)..(284): a, c, t, g, unknown or other
atgtttacgattttaacatgtcgattattttcaatcaatttaaaaaaaaaaacgcataaaattaaatataaaaatacataagtcaatatttatattttcttacgcgaatatttatattttgatatattactaaaattatacaaatatatttaaaaattttgtttatattttataaacaatgtatatgaatgtttattaaaaatttaattattattaatgtttataatgttactattaatctaatatgtttattacgataatattttaatagaatcaatannnnntgtttattaaaagttcataaataagtttaaaaataaaacatttatgtttattttgttttaaggaacaacattataaccaaaggtgaaattatgtataaacattatgtttatattttatattgataatgtttataaattattataatctaatatatttaatgtatagttttataaataaaatatgtatgtttatttatttatttattttgttgtaaggaaaaatatgtatgtttattgtttatttatataagatttaggaaaaattaattgagcattttataattttgtatacactatttttattaattagaaaatatgtgcaaaaaaacttattaccattttctcatacatttttatatataattaaaaactttttttcaattt

SEQ ID NO: 144103 - DNA, 635 bp, Cannabis sativa
  modified_base (577)..(608): a, c, t, g, unknown or other
ttgatgcaatttgctaataaaatgtcaccattttatctcaaagaaataaaaaaaaaaacttagtccatattttttggttttttttttttctgagcttttttatggccttaggtttgccaactaaatgtctttttaaatcctataattaaatttttgtaaagtttctttctctttgtttgaaacataaatcaaagaagtcaaatgtatcgtattctagaaattggtttttttttatcaagaaactagttttgataatacaaaagtaaaatttatataaatgagttttttaagttttttattggtattccttcttatctatgataatttcatcaagaagctaattttatcttaccgagaaaacggttttttatcaggaaattatttttttcatcaaaaagcaagtttttttcatcaagaaactagttttgattatatagaagtaaaaattatatgagtttttagttttttgtggtattccttcttatttatgatgatttatcccatattttaagttttttcataaagagaatatcatatgtaacaccctaactagtataggcgtattacgtgatttttnnnnnnnnnnnnnnnnnnnnnnnnnnnnnnnnaggtttatggaaaacgtgattaattaa

SEQ ID NO: 144104 - DNA, 513 bp, Cannabis sativa
aaactacacaaaaaattcgaaattaattccatgaaaaagcatgaaaaaaaataaaaaaattaagaaaacaaaattgcatttggtacggatggtatgcagtatatagcgcactgcataccatccgcgcgcgcaacatgggtgcactgccgaggaatcacgcacacggatcctgcattgcaggatttccacgcgcgtaggaggtccttcagacaacacacgggcgagcttcttcggacatgggctgcctgaaccacgggtgacacccatgtgcacgtgcatccgcgcgcgcatatgggtgatgtcacccctcatatttttcgatttttaaaaattcataactaattcaaataaaatcaaaatcaagttctgtaaaaaagtgaattgcttaattttttccaagctatccaaaaaaaataattccacaacgaaaattaaattatttttcatgaaaatttcacaagcatcaatcaatcatcaaataacacacagatcaacatgaaaccatccacatca

SEQ ID NO: 144105 - DNA, 944 bp, Cannabis sativa
attatattgaaattggttttatttaggggacaaaacccaacaatttcatcatctgtaatacttgccttttgaaatgcataatgcttttctttcatcttgcttattctaagctttatgaaattttttgccctaactcgcgaaaatttcaaacttcctgagttttgacttttcattgaatattgttattctctaatctgttgagtagtcctggtcggcatatttgcccgttttaacgttcaatattccaaccaaacactcatcttgtgtgttgtcttttatagatgaacccagctgctgagtttcgggggggggaagagcgaacaccaaatcgaccaagacctgcttcaactcttgcacgaggatcattctagtcttcgttctagcctaccttcttcgagtgacaggcattctagcttaagtcctttgtccagccataggatgatggctcgtaccaaaaagacaacgcatatactctacgcatccgaccctcaagtggcccggcacaccaccttacccagcaccgaaaaagatccagccatcttcgaggaggaggatcatgaaggggacactgaggtccgagagattgaggagcaggacaatgtccgtcctagcaatccctctgaggcggaggtagaggaggagatggcacccccaaactatgggggatacaatgaggctggggagcaagttgatgctgatggagacgtcctggttgagggcgtggactacgcctgtgaggaacttactgttgtggttccacatagaaggcaaggtactttgggtgccaagagggtgagccttccatccaaggttactgaggcacgcttgtgggatctcgaccaggatggctacctgggtgaattggactgttacattcccacccacaatagacgagccacaaaccttgaaaggggaatgtgcgcttggtcgggtgctcatgccca

SEQ ID NO: 144106 - DNA, 607 bp, Cannabis sativa
atccgatccgaataaatcgggtcggatctgatccgatgagcatctaatctagcgggatggagcagagcggacctttacatgatttgaattaggtcgaatcataatcggatcagattcgaaccgattcatttactctcctaattttattattgaagaacaatattaacatcgatttagagtttatgttatgttaaatgcatagatctttatgttttataaaattgatcaaattgatattccgagctaaactttagtaaagaatttttcaacatctctcgtagtattaatatgatatgttttgtaaaatatagaatctttattctcatctaacaaaacataacaaaatatatgaactgattgactattcgcactaaacacaaaaatcaaattggtatgtatttgtcaagtaatattctttttaattttcttagacattatattcctgaaaatgtcactgaactatacatataaaaagaatccttatttattaaaacactaagtacacacctccttaaattaaaaaaggtatttaagtttaccatcttaatagttatagtattaaaaataaaatttaaaaaattacttactgttataaaataatataaaa

SEQ ID NO: 144107 - DNA, 858 bp, Cannabis sativa
ggacttagacccgaaactgggccccagaaccgggaccgagacccaaaactcgaccctagactcgagacacgggacacaaccttgtactcgaagcccaagacatgagtacagggacacaaccccgaacctggacccaaacacattcataggacgcagcccaagacctgggacataaactggaataagatcgagatccgaatctagacttgatgcttcgacctaacccgtagtaagtgtttgaatccaggatccggacccggatccgtacctagacacggacctagacccagaccgggatccaaacctgatcttagaatcagaataggaatcggaccaggtcaaggactagaacgcagacctgggaagtagcaggacccaaacctaaaccaaaactcaaactagaacccataccgagacttgcacccggatcgggacctgtgagttgggacctaaacaaagaccgggacctggacccagaccgggacccagagccagacccagacccagacccaaaaactagggctggacctaggacctaagaaccagagttggacctgggatctgaaactcaaacccacactaggactcagaccaggactcaagacccgaacaagaatcgaaacacaaacttggacccgaatcgagacctaggacctggacatagatgggggacccaaaccccgaaattgggaccccgaactgtgacctaaacttgggcctcgaaacttggatcaggatctgggacccggccgagacccaattcatgacctaggacccacctcgggacttgggatccgggactcaatgcttggacctgacccatagtcagtgtttggatttgggaatcagaccagaacc

SEQ ID NO: 144108 - DNA, 640 bp, Cannabis sativa
ttcaattggatgggatataaagggtggccgactgattatgcaggttggtgtatttggttagctttgcgagggaatggctctttgcacaggatcaatgcttccattttggcagttgtggtttataatatctggctcaatagaaacagatgtatctttaatggtttctctaaatcagtttgtggtgtagtgaatgatgtaaagaatgctgtaaaatatagattacaaattgtgaacactagaaagctaactactcttgagaaaagatatatgtcaaagttgcaaagtagttagttctagtgttgttgggtctgttgctccttgttaggagtttgtgtttgggtcttgttttgtttattggtggttgtatttgctcagttgattaatgaagttcttccttcttgatcaaaaaaaaaaaaaaaattctacatagtccacgagttaatcttattagatttttgatactgttcttgggttttttctcttatgaattttttgttcatttttcagtataacttgcctctatttatacgtacatagtcaggcagttaattacagagttgactataatctttacaacaattatcccctaaaatcgcgggatttgattacatatcatgtaatataaatgcggttaatattt

SEQ ID NO: 144109 - DNA, 772 bp, Cannabis sativa
agacatccatctcataacaattctttgggtattagtactttaatcactgggatctgagatccttgaatagatccaacaaagacaaatggttcctcaccctcaggttggaagattaccatcttctgtttacaatcaatattggctgagtacttggattagaaattcattcccagtctaatatcaaaatccgctagacccatttctattaagttagcactcaactccctatcctcaattttgatcggcatagacgtaatccaccttttggagatgactaattcttcgccatgcaatagggttccaaacactgtatcataactatcatgcagtctacccaatttactaaagattctagctatcacataagaatgagtggccccagagtcaaataacacagagaagtaagagttgttgatcgagagctgacttgttaccatagaggggctagcttctgcatcattctgagttaacgcgaacacccttactggagcgggtttcactgcaatcttctattcttccttcttaagttgggggcaatcctttttataatgtcttggcatacgacactcgaagcacccctgccctctacactctcccagatgatgctttatacaactggggcattctaggtaagtgtatcaggttttagagctaacctgacgattacctcggccctggttctctcgaaatctcttgttttgacttgaaccaccggatgcagtatgtatctttcatttttggtcagtggttgagccactacctcccctactaa

SEQ ID NO: 144110 - DNA, 648 bp, Cannabis sativa
gcattgggtgcagttggcttgttcgtccgtgggacgcaccaaattttatcctacgatcaaagtgtcttgatcaattgtcattaggaggatggtgcaccatggagttgccgtgtgaattttctggaaggacttgtccagtgggacttggcatcagtggaagcgtgttctataggtgccattggatacaattagtttgcgaacctcaccccgaggggtgcattatacttagtccttgtcaaaaggagtatgcattcgacaattggcgggtgagctactatcagaggatgtgttagcttcagggtcagtgttgcaagggctacttggttgactgaaggaacgttgtgatggactcgggggagttcatgttgggggaagtattctagtgcggaggcactactccatgtgtggttctgaatagcgacattggcacaggttatttgatcaagtccaagactgggcgagggagatcgtcaccaagagagtggttctacgaaggtagagggacaagtgtagacttaggattcaagagaagcttggagtaagcttaggagttgagatcaggaagattcacctgcggtctgtcgatgagggcatcgacatgttgaagtggggaagaatgtaacgtgcgtgccaagatggcacgttaca

SEQ ID NO: 144111 - DNA, 658 bp, Cannabis sativa
aattaatgtaccctgagacccatctaatgtaccacagaatacattccgtgaaattatatcaggggacaaaatcatatccttataaatatatacaaatatattgttagaatcattactcatatataatttttacttttatataagatttgattggatatatatattttttttattgttattttatagaagatttgatttggaaaatgatttaggaaaatggaattgttggttttggaaaatgcttttatgcttcctcaatatattctcacccgcactttgctcaaaccgtttgtcattattttgtccatatatatatatatatataaacgaaaacacctttatataaagttatggctaatattcattctccggcaaaataacaattataaattttatatatagatatatttatataaatatttccaaaatagttgtctcttgtggaaaattattggctgaaaattggaactctcataattttcatgtgcttaatagtgcatgcttaatttgactgtatactaagtactactattatatatatttatatatatagaagaggttttaatgattacatttttattgtaactatcgtagttacatttttttttaaccattagatcactactaaatagttgtgattaatttggaaattaaataa

SEQ ID NO: 144112 - DNA, 543 bp, Cannabis sativa
gatacgtttgccacagcaatgtcggggaagaaaccaaagacgattcttactgatcaagatgccgccatggctgaagcactaggttctcaatggccacaaacatatcatcgcttgtgtatttggcacatatatcaaaatgcagcaaagaatcttagtactgtatttgaacgatttcgagaattttcaaaagaatttagcaactgcatatatgattatgatgaagaaagtgaatttattgaggcttggaataagatgctagcgaaatatggtcttgaagataataaatggttgaaaaagatgtacaatttaagagaaaaatgggctttggtgtatggtagagagacattttgtgctgatatgacaactacccagagaagtgagagtatgaacaatgcaataaaaggttacgtaagctacaaacataaccttttacggttttttgagaactttgaaagattgcttgagagtcgtcgctatgaagagttgcaagctgattttagagcaacccaaactaaaatgaaattatcatttgaagttgaaatt

SEQ ID NO: 144113 - DNA, 865 bp, Cannabis sativa
  modified_base (816)..(838): a, c, t, g, unknown or other
tcaaccatagtgaagtaggttttgtgaatacatgtatactgcggtcggatgggtggataaattttatattgttaatgttattttgtttattatgtattgttttatttgttttgttagatacgttagacatttttaaaatttttgggaaggtccaattacagccgttatgctgccaaaatttcagtagaattatgataaattttactaaaaaaatataaaaattaaagaaaaagtacattccattcctggatccattccaatcaactaaacactaccctagttagttagttagttaaaacttatacaacttaataagatgaactaaactataaaataagaattatagtaatatataaattaatatgaattaatagtgagaaacttagttagttgtgtaagtagtaactagttataattagttactaattactgcttttttttgttaggatttttgttatgggtaaatcatggatgcgtgaggagagagacacactgtgattttaagtagggttcgatgcatttttagagttttccttaaagaattctaaaaatcccgaacgtattcattgtccgtgtgtaaattattataatagatctaaaggaaatattacaataaataaggaccatgtgtattgacgaggtttcaatagaagttatactacttggtattagcatgacaaacatttagctgatgatccatatccattagggaagtagggggtaaatgatattgtgtaaagaccgcttagtttaaatttgggaattatcagataattagggttttaatatgaaaattatttattgatattaaaatannnnnnnnnnnnnnnnnnnnnnnattcagaatgcattttatatgtcaaat

SEQ ID NO: 144114 - DNA, 1069 bp, Cannabis sativa
  modified_base (884)..(884): a, c, t, g, unknown or other
aatctaatgaaaaattaattttatttattttaaaaataatgatcttgctaatcaattttaattgggttaaactaatataattagcctaatacaatttatttaaataaggtacatagacattcacaattggggtgatttatgagggaggactaagtttagtatgtcgtacccactactattaggattgaacattttaagcgggtttgacccgaactcgagcaacccgcccgaacccgcaatttttttttaaaaaaaaaatgttcgggcaggtcgggttcaacccagtacccttcgggcgggttcgcgggttgagtttttaggagtaccgggtttcgggttaaacccaccaacctgcaatttaaatatattatatatattttattttttttattacagtttatatatattaaattattaattaaaaaaaaatcctaaattttttttaaaatttaaactctcaaatttttttattttttataaatttattttctgttaaataatataaattaaagatatttttatatataattttttattaataatttatatatattatatataaaataatttatattcagaaatatataataaatttttaataatatatataaattttattttaatttattattatttttattagttttggataaaaaattaatttttttaaagagttgaccaagtcaacccggcaacccggtcaacccggccaaccgaaagccgccaacccgtgacacgctaacctgccagcccgtgccctattcaggtccgggttcggtttcatttttttgaacccaaaacctgcataccaaaaacctggtaaacccacccgatgttcaaccctaactactatggtccacttactctcacacaaggcccaaagnagaggaatttaaccattaattaaataattattattcattgaataaacccaatactaattggaactaaataaaactatcaaggtgatatttttattttagcaacctagtccatttaatttaatcaaacttagatgggcttcctatatccatctaagcccaaaagcaaacatataggctcacgcagg

SEQ ID NO: 144115 - DNA, 540 bp, Cannabis sativa
tccaacgagcagggctcgggtgcaggggtaatattaatttcaccagaaggctttaagtttcattatgctttgagatttcaatttgacgcatcaaataacgatgttgaatatgaagccttgatttctggcataaagatagccgaggcattgaaagtcaaaaatctcatctgccatagtgattcacagcttattgtaaactaggttctcgacgagtacaaggctaagggcctgaaaatggctaagtatttagagaaggttcggaagaacttggaaatgttcgattactttaaaattgagaaagtttcaagagaataaaactctaacactgatgctttggcaaaactggcctcgcagaatgacttggattaattgaactttgttccagtggagatgctgagcgagcaaagtatatgtgaaagggaagacgtggagatgatagaaatttcacctacatggaggacccctatcgtctactatctgctcaacgggcaacttcccactaaaaaaaacaaggcgcaaaaactcttgtattcagtgcct

SEQ ID NO: 144116 - DNA, 1051 bp, Cannabis sativa
  modified_base (401)..(403): a, c, t, g, unknown or other
  modified_base (729)..(729): a, c, t, g, unknown or other
acttttgcattaataattaaacttaataaacttcagtaaagaatttacaagtgccgggatcccgtttctaaactttttacacaaaatatacaaaatacataatccaggtcgcacaacgactacaaaatgacaaccccagatgtcccgagaccgaacactctaggttgcaccgccatgacatgaacaacctcaacccagctcaggctcactcctgttaagcgtttgcctttcctttacctagacatgaaagtagaactgtgagtcgagagactcagtaagaaaagcatataacatatcatataatgctgacttgtatctaggcgcccatacaccagtttacaaggcttaacagatgagtaagaactttctatactagggtacaaccactatacaacatacannncgtacctcattgcacaagtgttggtagggtttgtttcgtaccctaactaccactaattgatataccacacacaccctgtactttcccgtacttgtgttagttacactgtaatgtactccttaacaatatacactataccaatgcactctgtaccatatccgtacaagtgttggtagtctaacaaacatataagcatgtatatacacttaacatatacatacattagcatattcatattacacattatacgcagttcttaccttctttctagattcaagttagttggccgacctgaacggatagtctcgtgctggatggatgccctnatcacatattaaaactgggtaaatcagatgtccaaaaccctaattcaagaaacccaaaccttcaacttaaggttttgttattatcattagggactaaattaacctaggaaacagggaaacacccaactaaggcacttaaatagacaagaattgaaaaaatgagttgttcggggaatctatcaaaactggttaaccggatttacagggcctagcaaaccggttaattggtttgcaccaggtttccccaaacaacctccaacttcctcaaaaattatccaaatgccacccaaccttccagagtacctaaacaaggcatacacaa

SEQ ID NO: 144117 - DNA, 848 bp, Cannabis sativa
atttttgagccacggtattgctcatttgttctcctttttatgtttttctcctcttttctaagtgttcgatttcaaatcatatttttattttttattttaatggtttggaagaactattgtgtttatatttttattattgttttggtagtaatgaagaactgcatatgagatctagatctagtttttgcaaagttaaaatattttcttttatcatttgcactgacgtaaaagatgtaaaaatgggtttagaaactcgttttcaacttctcaactgacgtaatattttgtcactgtcatttaagaaccgaggaaaaaaatttcttttttgcgtctgctgaatatacgttggatcattgaaccggccataaaagattatatatgttgggattttttactctaaataaacttaatgtcatttaatcttatttactttcaataaagattaaaaatcatatattgactttgtcatatgctttgttcacatattttttacatgattataggtttaatatataagctctattaaatcctgaacatatagttatttacaattacagtgatgtcatcacataggaaactaattgtgattatatgcttcaaattatttagtcccacggtttgtcagggcaccaaatttacactaatataataatcagcaatttgatttacttgtacttgtataagtggaatgtcttttctaaggcattagtaaagtaaacttgtatcggatgtattggctatacatcggatgagactaatatgcacagtagaaaagatatcataaacttaccgtactatctttcctaagtaaatattaaaaagttgatcttagatcaatgatctcaatc

SEQ ID NO: 144118 - DNA, 805 bp, Cannabis sativa
gagctcctgactatgtcgttgcgctaggcctttggaataaactctggagttccaagatcctggagcggcataaggtcatgtggtggagcatcttgtcaaatgctctccccattaggggtctcctggtgaaaagaatcaacatagacgagctatcgtgtcccctttgtggggtagatgaggaatctatggagcatctgtttctccattgtgattttgcgtaccatctgtggagagcttccccgtggggaatatttccggtccccgactctcggggcagggtctgggattgggtaacatttatttggaacctgaagacgaaaggggtagatacggacaagctgtttctttatgcctcgatcgttgtggatactatatggagaactcgaaatgagaaagttcataacttttctccgtgtaacattaaaactgctattgactccatctctaattgttttacagattatgctacctgcttgctttccctgacagtcgcggtgactcctcatggctgggcgacccatcctgaaggttggatcaaaattaaatgtgatgtgaaggttgggggtgagtccatgtgcatagttgctttggctagggatcatttgggaacggttttgtggggtgtggccaacttcctcaacttcactgatcctttgattggcgaggtggcggcgtgtcagcttgctctgaaaactgctcctttcaggtggttataaacgctattaaaggtgtccaatccaattggaagattgttaactatttgtctacttgtaatcaactctctaagaagtttttatcttgtaat

SEQ ID NO: 144119 - DNA, 660 bp, Cannabis sativa
  modified_base (618)..(621): a, c, t, g, unknown or other
tcaacaaaataaaaagacaaaaaacgcctaaagattaaaccataacccaggagtttgacatttttgggttaaaggctaaatttcacgaagctttgaacgagcaaggtgataatcaaacattgcgagattaaggttaaaatgccgtaaataatgaagctgtacaaactattacaaagaaaattacaaagtttcaagcctagattttctacgtatctcttacaacaagtcaagaaaaattgtattttctataatggaaacccaaaaaattgaagataaaaagttagaggagagaaagatcgaaaacttactcactatttgaagcctaggcattgtccagacgaagctgctcagatacttctgctagaaatcccatgtcaaacttgaaagaaaactccttttttgctttgaatttgtttcatggagaaaatggtgaaagtaatttctgaaagttttcaaccctatttataggctaacctgtgaataggggtaatcaattcaaaattctcgaacactttgatttcccccgagaagtaaatatttgcaaattaaaagcaataaagtgcctcaagagaataaccgtcaaaggcatgcaaggggaaactgttgggttttatgccnnnnataaaacccattacaatctgattacttatcaatttagaa

SEQ ID NO: 144120 - DNA, 520 bp, Cannabis sativa
  modified_base (58)..(59): a, c, t, g, unknown or other
  modified_base (176)..(176): a, c, t, g, unknown or other
taattgatttcctttcaagaaattcagacttaaaacgatatatgtgtgatttggatgnnattcatgttgatctatgtgtttatgatgattgtttgatgtttgtaatttttttaccaaaactaattagaaattttttctcgaattatttttgtttgatagtttggaaaaaattaagnaattcacttttttacagaacttaatttcaattttatttgaattaggtatgattttttcaagtttgaaaaaaagatatgggttatgtcacccacgtgcgcgcgcggaactgagtgacactcggtcacacgcgcgtccggacaaggtgatgtccaaagaaacacggtcagggctgtgtctgaagccctgtccgcttgcgtacgaggctgcaagcagcctctgtggccgaggtttttcggctgtgcacctccatctgcgcgcgcagatggtatgcagtgcataccatccgcatcaaacccaactttttcgtttttcttcattttttcatgctttttcatagaattaa

SEQ ID NO: 144121 - DNA, 851 bp, Cannabis sativa
tagagtttttccaatctacagctccgattttcgccacttccgacgaaccctcttctctccaagttgccaccagtgttctactcaccggttccattgctgtcctcttcttctgctcgcttcgccgccgagcccgctgcgctaaagaacttgtaaatttctcccctttttaatcttcaaaacagaacattgattgaagaatttgatgggtttggggtcaagttactgactttatgaaaaactagggttttgtatttggtggggattggtttcagttattgaattttaaagaaatgggtttttatttttgtgattttaaatttggtgggtttggttcaagttaaggaattttcaatagaaggagttttgatttttgtgattatgaatttggtgggattagttcaagtttttgaattttcaagaaatgggggttttgattttgaatttgatgtgtagaaatttaggtcagatggagtgaagaaatcagtgaaggaagaagctcttgaaagcttaaaggcaatgagaaccaccttcacctgttcgagagagtgatagagcgagacaaacagaaaaagaaagaaagaaaagaaaaaaaaaaagaaaaaaaaagaaagaaaaagaaagaaaaaaaaatttatttatatattttttataatttcaaattaatttatttaaataattttttatgtggaacaataaaattgtgccacgtgtacactgtgttcagtccaacatggcacttaacacctaaaatggacggaaatattaaattgctaacataatacgagtattgggggttttacctcacaaatttggattttgggggttaagtgaaactaaaatgaaagttttgg

SEQ ID NO: 144122 - DNA, 994 bp, Cannabis sativa
gggcataaaacccaacagagacacgtgccaggggaatgcctaaggtctctcaatccaacgatctccaaacaacatgcctacacatatctcgaagggtcttaatgacgtgacatcttgaagaaataaaaataataattatagccgtcatttcaaaaccatcgacaagacaatcaaagatcaccatctcgtgataataactcgcctgtctctatctttgatagttcccctaatgacacgactgtcaatcgcaaaactaggggcatgtgcgaatttttaactagaaactcgagagcagtctcctatgatattgatacatggatccaattcctgaggaatggatgagctgttaattaatgactctcaaagagttaacctagcctaatccaactcacgagatgatggaagcttgaaagggtctagttgcatactataccttgcatggtgtaagataggcagggatgagagattttaaataagtcacgcatgtatcgacatattctcttacgattaagtaaagattgcttatttacataacgattggtctaaatgacaatgtgttcgacgactcaaaaaggactcacatgtctcatgttttcaacatgcgagatgttcgacaacgcgactcagatagaatgctgacatcccagtgctgggcccattagccgtttagcgaatataggacacaccttaagaagcctgcgacctgcgagcagcttgtgcgttgtgcgagaatatgaacaggcaactcgcacccaatagatcacatacgttgatgtacttattattgtaacgaattaaactattcttcatttattctttacgtttattctgatttaatactgttatttaattgtaaaacggatctataactgatctgttatgtaaaactaaaaggacacttgccttctatataaaggagtgagctaaatcaataaactaagcagaaatcatttgcatgcaacacaccacaaaaaattcttatttttagtcacaa

SEQ ID NO: 144123 - DNA, 682 bp, Cannabis sativa
  modified_base (225)..(249): a, c, t, g, unknown or other
taaaataaattccaacagttatttattattctcccatgtgatataaatatgaaacgtgaacgattacagggataagactccaagagaataactgtcatcctaaaactcctataaatagggataaaaaatagatggactcgtgtagtataaaaaattaaatttaaaaccatgttaataaccattttgccatttatattaatcacaactattattattattattatnnnnnnnnnnnnnnnnnnnnnnnnnattattattattattattatcctagagtttatttattacataaaagctcatttattggttaacaaaaatctatgttaacatatatatatatctatataaagctatattattttggacactatattttactataatgactaaattgttcaagtccctttcgaggttagctagtattggaaaagaattgttcaagtcatgaaaataataaaacaactcttctcccatgaggattttcaaaaatatcagttttccatattgatatgtggaccaagttgtctcaaggaaatattgttagatggcattatgaaggcatttgggatagattttgtactccaaaacatatgtgttgggattaaactcacttaacctctcaagtcagtatgtccatctatttgcctatcagatgaatctgaagaaagctgctgcaatttat

SEQ ID NO: 144124 - DNA, 638 bp, Cannabis sativa
  modified_base (557)..(569): a, c, t, g, unknown or other
aaccggatgatgacacgtggatgggaagggattagcatttgaataaaacagctaagtcttcttaaagcaaaggattatcttggacatgcctctcggagaaggcgtgtaagtctcatgtgctcccggagagcaagatggcaacaaagcacctccgggtggtgtcagattccatctgaacagtcatctcacatttaatgtcgcatgggaggaagcgtattggaactgccacatgcaatagagtctaacgacacaacccccaatctgtacttactaggctatgatcaataaagtctagtgacagctactctgtgaggaatcacatcagtcaaaagggattaaggactgccctcataaaattcctaccgcacctaaggattagaccgtgcattacccatgataaattcattgtgaatgtgtggctttactgatagtcagagaaatgcatgtaccttaattctagggatcaccccacaaaaacactataagtaccccccccaaagctctttaaagggggtcgagaattctaagttagataagaactagaagagtaaaaactnnnnnnnnnnnnnctctgtattaaatactatcataaatacacagactcgtggacaaaagctcattaacgcccaaaccacgta

SEQ ID NO: 144125 - DNA, 721 bp, Cannabis sativa
atgtttcaaataaatataaaattaaaggtaaatttgattaattgattaataaaagaggcatttttcaacttacccctcgaaagaactctcttatgggtaaaatttgtatctcattaagaccaactaaagaaacatatatttatattcgtagtatacataaatttaaattatatacaaaagtattacaaataaaaacatggcattgttttttaaaataggtttcattcaaaataaaacaatagttctatactatatagtaataatagtattgttttgtggttataaagaatggtttctacttcgttagaaagataaaaaaaaacaaagaattgtttcaatttattttttctaaagaaaagaaaataagttggtatacaatattatttttaatattgaataacatatgaataaatttgttgacaattttaacttatcttagtctcaattcaacttctgacagacaaagactttcatgcaaaattgaaaagatatttttgttaaaggaaatggttaaataatatatatatagggattattttacaaatacatcaaaataataaaaaattataaaaatacagttttacggaattttaaatatttttacgatttttttaatttttaatacagaatacggtctttttatgttgtaattttttattgtctgtatgttattttctgttattattttaatgttattttcatgtagttttcttgttgtttt

SEQ ID NO: 144126 - DNA, 1010 bp, Cannabis sativa
gagactctagctcgtttttattaagctttttgttttaagtacttcaaattaacttaaaaaaaaataaacacgacaaagaaatatttatatgtatgttttaacgttattatatatttttataactctaaatatttatattgattttttcatcggtagtattcttaaattaagatttataacatataaaacttgattgtactaataatgttgtgttaccacactatcgtcatcaagctaatgaatatgtgtaagtgacatggtttgataatgaaaattaattcatatatgtttatgtttttttttaaaaataataataataaataaataaataaataagcaaaagaatcaaataaggtgaatgatgtcatgtgatcaatctcttaatttatcacccttcacttttatcactcttctcttttttttagtagagttttaaatgaactctttacttttagagaggttgtggttacattggcctataagatcattcaacaacaacaaaaaaaaaaagatccaacattaatatgatggcaaagaaattagggaaatttacacccattacttgttttttcctttttttttttttcgtttgtactgttacacggagaatttaacttttatactgttttttatttttaattttttttggcagtatactgtctttggaaagtttaatatatattggttttattgctttacacgtgtcacgataaggttttgccacgtttttttttaaaaaaggaaatcattttaaattttttgatttgacggttttctatacttaccaaaagcagttgtacttttatattttttttttatttttttcgaatataaaaaatgtttttataacccactcccccctcaaactgttcatcttctccattcttcagtttttcatttcagtttcgagtagtgggtggtttcatccacttgaaaaaatttcaattctcatccaactttctcaaacttccctctcattccccccccccccccccctttttttttttttt

SEQ ID NO: 144127 - DNA, 686 bp, Cannabis sativa
  modified_base (627)..(637): a, c, t, g, unknown or other
aatttaaataaaataacaaaatttgaaagttagcaaaaatatcttgttacaatttaaaatttctagattaaaataatcttattttaaaataaggtcattatagaaaattaattaaataatttaaagtataaaatatctgaccttaaatttacaattagataaaataatcaattttaaaaataagataaccaactaagcaaaaagatagatttttatctattttcaaggttcagaaactattaatatcttaaattaattaatttaattgtgataattagatttgaaatttgaaaaataaaaatcaaaatacaaaacaatagaaaattttttatattaattccatgaaaaagcatgaaaaatgaaaaaaaaaaatagaaaaatgcatttggtgcggatggtatgcagtgtataccatccacacgcgcgtgctaggtgacctgggcgaggaatgccgcacatggatgctacatgcagcatttctgcgcgcgtaggggggtgttcagacacatctcgtgcgtgattttcggacaaggagttgtccgaatgcacgtgctgatcaagtgacactcggatctgcgcgcacacgtgggtgtcaccacccctaagatttttccaattttcaaaaannnnnnnnnnnttcaaataaaatcgaaattaagttgtgtaaaatagtgaattgcttaatt

SEQ ID NO: 144128 - DNA, 506 bp, Cannabis sativa
tcaagactataagtcttactgaaagatgtctaaagttaattggagaaagtcacaggagtgtgccttcctgtagcgatataagcacctcccctattaggccttgagttcccccaactgataaacttagtcacatattatacactaagtgtcttctcaatcgatacgcattgctttcgtcttcccaggtgtaacgaagttgatgtctcactttatgcatccagtgacgtatggtttctcgttaatatacaaggcaacagtttgtatatctctacctcacataagaccttatagtcagtaagttgcaagtatattctgttacttacgcaattaatgagttattccattagaagtaatttcatcgatccatatacttttgacacgtgtcctccactaaaatggcagccgaattttgggtataacaggtctcactatcaaactaatgcttctatagcttttaaacctagttttcattttgtcagacaactagtgttttgagacttcttctt

SEQ ID NO: 144129 - DNA, 842 bp, Cannabis sativa
aaggtgaaaatatttgatggtgttatgaggacactaactgatgtgagacatgttctaacattaaggaggagtttaatctctttgggagttttggatactcgaggttgtgtatattccacaacatacggtgaaataactgtcatgaaaggtggcttggtagttgtgaagggtaagaaagagcgaaatttgtataaattagttgggaagactattttaggtggagctgtgaaggtggagtcaagtcataaaaggcatttagttagtgcaaaagaatgtgacaaggtggagaagactacaatttaagttaaaagttgtttgaagaaaaaagacatcagtgaaagagtgaagaatgtgaagacaagtgctcaagtgaagttcaatgagagtatgaattctctgcatatatactcttattgatggtttgagttgtgagtttagagaatttgagtgaaggtagagattgttggagtttgacttaagttatttatttatttaactatatttgtaaagttacaatttttttgggtaattattattcgtggaaaaaggaaagtcttggtgaccaagttttaatgagtcttcttaaggaagatttgaaatgtcttggtccccaagttgtcttgatgtccgagttttgtaactttataaatatgtgttttgtgtgaaagagaggtatgtgtgtagagaaaaatagtgagttgtaaaaaaaaagtgtgtgtgtgagtttgtggtgtggtgagagtgaggaagaagtaaatggtatattgaatttaggtgaagagattgagatagagagtaaatataattttgaagtcataaagtgaaatatatctttctttgtg

SEQ ID NO: 144130 - DNA, 800 bp, Cannabis sativa
agtatgaaacttataaaaaaaacagtaaaaatgtaaaaaataccgcctggcagtatttttataaaaaaatggcaaaagttagtgtaccatgtaattttcccaattataactacttgggcccatctatatggccaaccacttagtgtataatttaccattattttataattttttattccacataattcaatcctaaccctaggtgaaacagtataaaaggaataggatagttttattatgcaactaataatctctcataaccttgttcaaattttgtcaaacaactagagagttttgagaactccttctttcttcttctatttcgaatctccttctttgttcttcaaaaattttgagcctatagtgagtgagtgcatgcccacccatagcaagtgtagtactcaatcatagtgtgtaagactttgaagaatccaaccacctaaagaagaatcgagctcaaatgttgataatattctgtgacagaaaggaacaagggttatagatctgagtgggaggagtcattacatttcactgcaataaatgtaaggtttctcaactttatatgtgttaaaattttattattttaaaaattcatatttagggtgttaataaacgtacttggtagtaaatctagatcctggtaaaatattattgagagccatggtaatgatttcctttcaaaaaatgtggatttaaaagatgtatgtgtgatttggatatgattcaagttgatcaatgtgtttatttgatgactgattgatgtttacgaaatttttacataaaattattggattcatgat

SEQ ID NO: 144131 - DNA, 600 bp, Cannabis sativa
ccttctgtgtacagaaggattctcagctttgatgagagactatgaacggttggggaagattcgggggtgcaaggttgctcgaggggctcctgtgtaatctcacatgttatttgctgatgattgttatgtgttctgtaaagcctctgaggatagtgatattaacatgatagaaatgttaaatatctttcaaaaggcctcaggacaacaagtcaatctacagaagtcctctatatttttcagtgctaatatagtcaatgaggtgaggtaacgtctgtgttctatgttaggattcaaggttgggaaggaagattgctttctagagcatggaaggagttgctaataaaaactgtggctgaatctcttcctagttatgcaatgaatgtgtttttgctacttgtggaaacttgcaatgacatggagcagttgatgtgtaagctttggtggcgatcgtcgaagaacaacaaaggaatccattggaagtagtgggatagattgacgttacataagtctaaaggtggtatgggatttcacagcttgcatgactttaacttgagtttgctttgtaaacaaggatggagattgtttagtcgtccggactca

SEQ ID NO: 144132 - DNA, 1949 bp, Cannabis sativa
aaaatttcgcacaaggctcccaaaatgcttgggccggccctgttatacatccatctacaaagaacacaaatctattatatttaaaattatgtattagttatgtgagtgtctgaatacaatactcataaaaagagttatatttgaattgaattttatttggaggtaaatatgattgatttacaaaaaataagtattcttcaactttttcctgaaaaagtatagtatttattatatgctaaaatttggtccatgctatcttttgtgccaaatttggcataatttttagctttggtcaaattttgtacacattttacatcactattggagttaagtaagagtatttacaaaatacccgatccaatccaatccaatccaatccgcaaagtgggaatatctacatttatgcgaattggattagattagaaaattcaaaatctatacttgtgtagattaaatgttgattgatatcaaaggcggagctatattgagctccacaggggccatggccccctcatcttgcaaaaaaaattattttatttttatatattgtttgtgttgacttttcaaagttttttttcgagatcaataatatatatgtataattactgtatatgtggagatcaatttcttaataaaaaataaaagtacacctaataaaacaaatataaataattaatataaagagtttagtgtacaatatattctttttttattgtatttctattaataaactttatttggcaaaaacttttaattctacaccgaaaaatttattcgttgtactcttattgagttcaagaaatgtaaaaaattttaaattttgtagtatattagtaatattaggcgattttaaaattttatttgagctcaatgattttctaatgtgatccattaatttcttaagtttataattttgatatacaatatataaaaaattatatcgttattttaatttactatttaatatatttaaataatgtcgtattcatgtaaaattatcttttcttaaatttaaaattttattattatcacattatatattattggatcgataataatttttacttatttgatagctgcatgaaaaatgtaatattttataaagtaaatactattttaaaccttatgtttttcaaaagttaccgattaaaccatctgttttattaaataataaattgaaccctgtattttttaaaatggtacaaaatagtatcataaactgattttttgtcaaaataaaagttaataataacccgagctaaagtttttatgacaaaattgtgtgtattttctgcatcagttcgttctagaaattatcttcaagttagttatattaaaaaaatttattgaaaattgagcttagagtactagtattttgtactattttagaaaataaggatctaatttgtcattttacaaaacaaaaaatttaatcgataacttctataaaatacagagtccaaaataatatcaatcctatttatatggggactaaataatttaagatcttgaagagtatattggcctccctacacatctaatcctggctctaccccgattgataagtaaaagtaatcgatctaatctaatcctcacatatttatacatattttttaaaaaaatcatatatgcaattattattttaatgcaaaaaaaaaataataatttaagaatctaatatatatgatataaataaattttaaaatttaataaatttaatttatattttattattatattggaaaaatataatttaaaacaaaattagtcatttctttccataacaatttttttatttaaatttataattttatttattttaatttgttcacaacatatacaacacattttgtttatttaaaataaactaacatattgaaaacatattaaagaagaagggttgtaatttttattttatttaaaacactatttcaattacaattcatcat

SEQ ID NO: 144133 - DNA, 1312 bp, Cannabis sativa
  modified_base (254)..(257): a, c, t, g, unknown or other
attattattattattattgactaagaaatctggactagacttctaagccacatccactcgctagattggcgaggatgaataaaagtagttaagtaatttagagcgatacaactaatttatagtcgttcacgccctatatcgcgatagtaatgggactacatctacttcaagtttttatttctcacgagatggtaattacagtaatagaataagtatcaggaactccaaattctagagagagaagctctgacctnnnnggtagttttttgaatttgaaaaatgggctaagggggctctccttttataggtgaaggaggcccacaaaaataggagcaaaatacaaatagcttgttttccactgttgatgatgatctaatagtgaaaattagcttctggtggtgaaggccctttttggtgcctggcgggtcctactgcgggttacccagagtttattttcataactctcttggaggtgaattttgacggtgatagctttagaattacgtctagggtgtgagacatgacttgatagataatttatatagattcaaaactcaagttgaatcaaatcagttggataaaaattgagtgagttatggtagttttactgaacctagttcagatctcaacgcccagattgacatccaacgcccaggttgacatcccaacgcccaggttgacatcccaacgcccaagttgacatctaacattaagttggatgttgggtaagtgtaaaaatgtccaatggatgtcctttaagatgcttaagtgatagtttgacaccacttagtccatttatatgttccggcgaagctggtaactagttctcggagatgttgctattttgcaaaaatgggagactcaaaactcttcatttctgggagtgctagaaatgagaaatgcaaagttgtgaatttgatttctgtaacttcatatatcattgtatttgtgaaaaactagatggacagtcgaaacgacatagattcggataagcagaacccaatgactaggccatttgttgacttgggcgctgagcccgtccaactaagctcccaggattgtgtttttgatacttccaagacttttaaattggaggatggggtctcctcccacgttttcgaccatgccaaattcaatggttgcattagaattggcatttgagcatttgaagacaacgtcctaggttgattgtcaacttgggcgttaggccaagccctaggtcaacttgggtgatgggcccaaccctaggtcaacctgggcgctgggcccagccctaggtcaacctgggcgctgggcccagccctaggtcaac

SEQ ID NO: 144134 - DNA, 583 bp, Cannabis sativa
gatactttattaattgatttcattctttgggcgtggcctcgtggactaggagtttttgaaagaacactgataccacgtacaaatctcttatgtgcagtgatttaattttttgttattattttatattctgcctgttgtggtttttctctgcaaaactagtttctacagtaataaaattacgttttgttgctccagacgtatacagttttatatatagtatatttctgtaataattattggcatttgcaaaaactcagtttttcaatttattatcagagcgggacactaaacgcttagtgtggtccttttaacgatttcgtgtatttttgtgtaaaatgtcattttttgcagaaggaagtttgatttctagaccacctttgctcaatgattctaattatccttattggaaagttagaatgagggccttcatcaaatctcaagatgagagagcttggaggatggttctatcaggttggtcttctccagttgagacagattcagaaggtaaatctaaaattaaatctgaactggaatggtctattgaagatgataaactttctgccaataatagcaaagctttgca

SEQ ID NO: 144135 - DNA, 511 bp, Cannabis sativa
attcatggcgtttgtctgatttttcatatataaatactaattaataattaccgtgaattttttattataattttttaatttatttttgtgtttgaaattatatgtcaaaattagtactccttatatattagagaaattatagtaattgaccttaaattataagactatgttaatatatgtcctcatttcaaaaaattataaaaatgaccttaaattataagactatgttagtaataaatgtccttatttcaaaacatgtagagaaatgaccattttaaattatttattatttaaattatattttgtcacataaaaaaaaattaattattttttttcattttttttttaaattagaagcaaattatttaaagattatggtatatctacattagttttgttaaaatcattttcatttaaaagttatgtcaatttttttaattttttatgagttgttgtgggttgttggtatatatattttattgtacagtatatttctatattgttgtatggt

SEQ ID NO: 144136 - DNA, 763 bp, Cannabis sativa
attggattggatcggatgacaaaattcaatatccaataaataattagattgaatcggttgggtccaattccattagatgtgatccaataaatacccctacaggttataaccaaccaacataaaatgaaaatagtaaattgctgatataatacaagcttgggaagttttaccatcaatattaaataagttttggaattagttacaaacgtagtaaaatcaattttaagaggtttgttgcaatttacttttaatttgaaaacataaaaatagttcataatttaatgttgtaactaaatatactaataaaaatgaaataaaaataaattgaaaaaataatgcttttatgaaagtagtatatttatgataatgtatattttacatggtagtaatattgcgcaaaattaaacataatatttattatgtgttaaattttcatattttttttatattaatttaattttacagcaattatatacatcatcatattaatttttttttaataaaagatctcgaaaacaaacactatattaatttagatttttcttataattattaatttaatttttttacactattagagtacatttttacttagtaaactatatcaattcagatttttcttataattatttagaataaatagcatttttgtcacttaattttgtcccttaaaatatacgtcttgttcaaaattctctctaaaatataacagttatataattatgccctttctcttaggtttcgtttcttttactgttaaaaa

SEQ ID NO: 144137 - DNA, 543 bp, Cannabis sativa
cttaaataactaaaaataaatttaagagttaaactaaataattatatatcatgtaataactttttttatattagttgtaaatattacattttaaaataataaaaaatgaaaaaaaaaaaattatggcaattcaaggtttctccaaatgtgaaagatcttatttggcaagcaactttatattatttgcctacttggtagtaaggaaagagaaatttcactatttagccctaataaaataacacatatcaaattttataccccttactaatttgtacaaaataattctactattttcaaattctacccaaaataccccttacatttaattttcccactctctctttccctctctcactccctgtctttccatttctctctccgtctttccctcttcgtctctgcccacgaaacgaaagaacccaacaacccaacccaacccgaccacgaccacgcatacgccaaacccaacaaccctcttcgtcccactctatctttccctctctctatctatctttgttttttcctatttctctctctctctct

SEQ ID NO: 144138 - DNA, 511 bp, Cannabis sativa
tacggcgtcgcttggtatccagcataattggactatcaaccccatcttccaactcatccaacatatttaaagtatcattatttaatgtaaaatccaccttaccaacaatccccatagtttgctccttatttgtaggagctgaaaccttacctggagactccatcctagccatacgcccaagccctcgatcctctccaacaaccacattagtcggcctagccggagaccgaccccccagtgccaccgacgaactattactccgaccaacaaacgccccctccgattcttcaccatcacgcaaccactgcgatccaaccaagttgtacctcctccggggttgagccctcatgaaaataccataaggttttacaatttcttcaatcggcatttcaaacagcttggagaagaaccttttagaatgtccaataacaccacaaataaaacaaaaagtaggaacatactcatatttaaattctgcccaaaaacctggatcatccatgctacgcctgag

SEQ ID NO: 144139 - DNA, 704 bp, Cannabis sativa
  modified_base (449)..(454): a, c, t, g, unknown or other
tgaaattagtctatcactaggataaatctcttgaaggacttagacaactattagtaattaatcatagacctttcactttcatcaatatgcaattggaatttttaagaaggtaagtttggatacaattgaaagttaaacttaatgatctttaaactgcataaccaaatatttttcaaccctatcagttcacaagatttttaaccacttaccttaatatttttcaacattgttagaaattcatgaaatttctcaaacatttcaatttctttgcataaggtaaaatctagagcgatcgttttaagaatttaacgataattcatatccacccctggatgtacatccatattcgaatatagatgatcctactgtcaagtggatataggcatattttctcttttttaaagaattatcttgtcaaaaccactatgaacaaggtgcaaatgccatannnnnnatgtggctgtggtcttttgatgacttaggtcaagttacaacaaagagttcttagaatagtccaagtggattctggtcacacaatacaaaactcatattccatacattaacaagttcaaatctattgacaaaaaatggttctaacaacttctgaaagttataatgaatgttcaatgcattcttggaaactgaaattaaaaatttctatttagaatctaaaatttaaagtcaaagacttaaatttatatcaa

SEQ ID NO: 144140 - DNA, 813 bp, Cannabis sativa
catcatctggggagtgtagagggtagggcttctagtgtggtatgccaggacattataaaggggattacccctaactaaagaaggaagaatagaagatcgcatcgaaacccgctccagcaagggtgttcgcgttaactcaggcagatgttgaagctaccccctcagtggtaacaggtcagctctcagtcaacaactcttacttctcgatgttatttgactctggggacactcattcctatgtggcagccagaatctttagtaaattgggtagaccacatgatagttatgattcagggtttggaaccctactgcatggcggagaattagtcatctccaaaaggtggattaggtctatgccgatcagaattaaggatatggagttaagtgctgacttaatagaaatggatttagcgaatttcgatattataatgggaatggatgtcttatccaagtactcagccagtattgattgtaagtggaagatggttatctttcaaacagagggtgaggaaccatttgtttttgttgggccagttcagggatcttggatcccagtaatttcagtactaacaatcaaggaattgttacgagatggatgtctaggggttctggtcgtggtatttgataccactcgacctgagtcaattcggccagaagacatcaaggttgttcgagaatttttagatgtttttcgaatgaacttccgggtttaccgtcgcagagagaaattgattttattattgacttagcacttggagcataaccggtttctaaggccccttacagaatggctctagcagaacttaaagaatt

SEQ ID NO: 144141 - DNA, 1032 bp, Cannabis sativa
  modified_base (624)..(630): a, c, t, g, unknown or other
tacacatttaatttaattatataattataattataaaaaaaataaaataaaaggaaagtcagctttactacatccgcgtgaatgagatccgcgtgaatgagaatttaatgttgtgttttttttttttcatttttattattttttttattgaacctttagtgacatgctttgtgtaactctgaatacttttagagttacgcactgtgcgtcactatatacacattttttttttaaaatataaataaataaataaatgtttagtgacacttcaaatttttagtgacacacattatgaaacacaaatgtaaaatttttactgcctaagaatgtgtgtcactaaaaattgcttaaaacatttagtgacatgcactttttatgcatgtcactaaagagtgtcactaaatgtataaattgtagtagtgtgtgccattcaatttcatagaagaaaatagaatgacatcataagcaaataatttataaaccattcattcaatgatatactatttaagcaaattctaattgaaaatgctaaaaggaaacattaaaggataatttcgatttgaaataagaatccaacgatgtcccgtttaggtgagactcaaagttattcttatattataaatnnnnnnntgtttcatattgtaaacactaatctaagttgtcatctttagatgtacaactagatgttgcatttacaaatacttctctgtcaagatctaacactattatgtttgtctaacggatgacaatcctttgggatttgtcccattaaaacaacaacttaagtgagaccaacaatgaagattcaaaattatactacaattaataacagaaaacaacatagattcaatataaattcatacaaaattcaaaaatatcatacatttagcaagtaacaaagacatgtataaaaacaaaacaagcacatcttaaataatgtccaaggtttccaaggaactgatacagtgtcccagtaggcgagagtcaaagttatcattcattgaatacattagtcaactcatctaaaatgga

SEQ ID NO: 144142 - DNA, 832 bp, Cannabis sativa
agtacccacgcgcctagggcatgtgccatctcatttattgataccgaagatgactcacaagtctcatttacctaaaactaaataagacttaggggtaaatgttgttctggtttattcccaatatacgtggcaactgttgtgtgtggcatgtgattgacatagacacgccacccggagaagagttaagtttaattaaagaaacaacaagtgtggttcatgatgctagttcccagacatgaactaaagacccatcttctcctccgggagtcaagacatagataggcgtctctgggccagaaaggcttgagttgaactgtcactttgcatttaatgcagcatagagaaaacgtctgtgaatgcccatatgatgacgcgtcagatatcataaacctgatttagggcgattacacgataatcaaaggagctagtgacggctccatcatgaagaatcacattaattaagaagaaatgagggctaatctcatcttacacctacgcagcctactacgtaggttatgcatgccctattttgtaccttctagaaacttgtgcatgcccacagttggcacttaaagacaagttactccttttcttattcccaccaatctatataaatacccctcattaaaaatgaggagggggagggaaaaacaaaagtaacacaaagatactctcattaataatagagactcgtggactacgactcattaatgcctgaaccacgtaaaaatcacatgcattaattatctctaagctctcatcattatcttatttaattagttgccgaaaatctcggtcaacacttgtaattcattttattaacttgttaata

SEQ ID NO: 144143 - DNA, 551 bp, Cannabis sativa
gatgttccaagtagactccatgtgccaccattcatgtgatgccatgtcagagtgcaaaaattgggataacacccttatccacatctcccctccaaaaggagtgatttgtaatatatgtatgtatggtaatgaaatgttctgttttactgtcttttctggttttgaatctttttttgggatattttcttattgaccaaacaagattgagtgaataaaatggacaaggcacattccttagctgatttttttctatgaaaaggatagttaatttgaaattgaaactatgagtttctttcttctctaacaatttaattttgaagttcttgtattctttctctctttctcttctgagtttggtgaagagagaggtgttgagtgtagtaagaattgttttatgagagaaagtttgaggctttatatatgagtgagagaggaatataaatccgttggaagatgcttcatgttaaggaataaaaaagcaatatgtgagtaaggtggtcataattacttgagcattcaaatatgactccttcctcacccttttctaatta

SEQ ID NO: 144144 - DNA, 550 bp, Cannabis sativa
ctaagagatgataattatgtctctttaatctctattatggccgcactgtgtttgttcatttgtgatgaaaataattactaaggtctctcaacactaattctaccaactatttataatgtaagtgttaggacttataaaacattcaagaattatatatatcacagatttaaacatattccaaaaaccgttttactatagaataccgtaaatcataaatctatcaaacgtacctttcctaaattgaagaagaagaagacgataaaagatgagcggaagcactatcctagagtcattgatggagattgcagagaaggttatgatcttccaagaatacactatttttatttaagtattttcttttggggaccactacctatttataggctcattatataatcagttttgggtattcataattcggccgctcaacaaattataaatgaacttatggtatatctacacattattttcatcacaatttaatacttttttgacacatataacataattggtaacttaattttgtatcatactttataatagcatatac

SEQ ID NO: 144145 - DNA, 573 bp, Cannabis sativa
acctaactaatttctgtaactacctaactaacacatgcagaaataaaaaccagaaccctagatctatatatacctgcatcaacaaccagatctaaacagttgagggtgttcttcaagatccaggtattgaatacttgaagaaacagagttcgaagctcgtacatgcacaaaagacacaacaaagagttagatattgagagagagagggattaaacacaaaatacttgtaataaaagagattaccagtcagaaaaattacctgtgacttggattctccattgatgtattgttgaacagcaagatatagtggaaatcgagctctcatctttgaggagcagctcaaacggagacgtagccaatttattggtgaacttcggcaaaaatctggtgttttctaaccctaaactatttctgtttgtgtgtgtggtcgtgtatagatcatatcattgtagatctgatctttgtgctgtgtttgtgcttagatttctgggtttgctttgggttagggttcgagtttctcagagagaaactctctgctagggtttcgaagaaaacctaaggaagagagaaagt

SEQ ID NO: 144146 - DNA, 617 bp, Cannabis sativa
tggctccaagaaggtgataataatagtaaatattttcatgcttatgctactaatcgacgtcgtaataactttattgctaaactcaaagataataatggtaattgggttgaatggtgttcgggtttgcctcaagttatggttgattatttttttgcacttttttcttcttcaactaattcttggctggaagttacgagtgttgtggacagtcgagttttagctgaccaaaatgtcgacttgttacagccggttactgatgaagaggttcgaaaggctttgtttcggcactaatttagtgttaattcctaagaagaaacaaccaatggacatgggagacttaagacttattgccttttgtaacgttctttataagattatttcaaaggtcattgctaatcgactcaaagttgttatgccttcaaccatatcggatactcaaagtgcatttctccaaggtcgtttaatatcggataaaattatgatttcttatgagataatgcattatttgaagaagaagaaaagaggccgggatggtgttatggcacttaagcttgacataagcaaggcttacgaccgacttgaatggggatatttttgggctatgcttgaaagaatgg

SEQ ID NO: 144147 - DNA, 640 bp, Cannabis sativa
  modified_base (443)..(446): a, c, t, g, unknown or other
  modified_base (585)..(595): a, c, t, g, unknown or other
aattaaatagaagattatatttaagttggaaattttaatttcagaacatcttaaatgagaataattttcaaaatatattttattttattaattattttcctacgaatttagaaattacattatttaatgcgggtaattttgaattttttttgaaaaattaattattttaatttatttaaaatcaacttaaatcaagtaaatttttcaattaatgatttattaaaataaatagattaaaatatattatattagaaaataagtaattatttagtgaaatatctagatagttattttctgcatgcttgaagtatttttctagttatatttaattaactagaaaattaatatttaagttgaatttattcaagatttaattaaataggaaaattatatttttgttgaaaattaatttattaattaattttggatcaacataaattagnnnnatttttcaggatttattttattttgttttatgcaatttcgaaaatgtatttattttaaatacattggatttcaaattttgatatatatgtatagaaaaattaaatttgagttgaaaatttattttaattaattttggannnnnnnnnnntgaataattttcgaaatatttatcgagaattattactaagatgga

SEQ ID NO: 144148 - DNA, 582 bp, Cannabis sativa
cgagatgtggaaacctggaagttagtgtggtggcgcatccaacgaacaaggttcaggagaaggggtgatattattgtccccggaaggctttaagtttcactgtgctctgagattccaatttgacgcatcaaataacaaggctgaatatgaagcctcgatcgccgacttaaagattgcagaggccttgaaagtcaaaaatctcatctgtcataatgattcgcagctgatcgtaaactaggtcctcggggaatcaggccaaaggcttgaaaatggcgaagtatttagagaaagtttggaagaacttggaaagattcgattactttaaaatcaaacaaattctgagagaacaaaactccaacgttgatgccttagcaaaactggcctcccagaatgatctggatgaactaaatctggttccggtagaaatgctgagcgatccaagtatatgtgaaaccgaagacgtcgagatgatagatagatctccaacatggatgacgcctattgtcaactatttacttgacgagcaacttccaaatgacaaaaacgaggcgcgaaaacttttgtatacagtgcctcgctaca

SEQ ID NO: 144149 - DNA, 536 bp, Cannabis sativa
ggttgtgaagcttcttgatgacttgcttaactcttcttgcttattgcttgacaatttttccatgccttgtaaggagactttatcctgctattaataaggctgtattccccatgtcctaagtcttgccttatgtggacatgccacatcaggtggaaaaattttgggataacgttttcccccaagtcctactcgaacatctagttggatagagacttcctcattctcatcttgcttgtagtagcctttgtcaagtagctttgtctagccaagtattggatttttgcatggcatgcttttagatctttaatctactctcttcatatatgcctcatcttctttgaatctgccactgataagtttcaagctttttaagcatttagaaactttttgattctcacgctatattgtagtttttttagaattttgatctgcatgatagcttagaatgcatgatgtgtgatttcttgatgaaaaagatttaattttggtcttcattgtgattcttgactctttgagtcatgaagaacacgtttgag

SEQ ID NO: 144150 - DNA, 634 bp, Cannabis sativa
  modified_base (516)..(516): a, c, t, g, unknown or other
  modified_base (603)..(609): a, c, t, g, unknown or other
tatttttatagatatacttaccataatattatcaaattaaaaatttgttattctatttattgtgtctatgaactacttgctcacagattaactttttaaagttagtcttttagttccacatgcatactatggtaccctcacaagacaaaacccaggcaaagtctgtgaaactttgtgaatagcaagtgaccaagagacttgtctacatggtcacttcgggggcacccatactgtacaatgcatcaaactagcacaaagaacttttgcagagaaattttaacgcttagtagaagctactaaacctgcctctaagtcatccaggcatacttcggcttaacaaagtaaatttggacccttacttgttaaggccatcaaaagatagctaggattaaagaccgcctagtcggtcacacaatccatgataaaaatgcaacatgcccatgtactagtagtgttcaaaaacaaagggcttatggccaaagatacgaacatggaggtgttggaaatattttaccnggatctagatttactaacaagtctattgatatcctaaaatatgaattctctaaaacaatgaaataagcacataagggtttaagaaannnnnnnattggttgcagcagaatataatgac

SEQ ID NO: 144151 - DNA, 541 bp, Cannabis sativa
taattgtctaaacaagtaaggcaataacaaataacataaacacttactataccatgagtcgacatatcttcccagcaaatgtacatattcgacaagtcttcaaaacctttaaaaacaatggctactcagataccaagttgtaacgccctagtccataggaatgccaagtgtgtgagcttgtcgtaagcttcgaaacggtatatagaatgtctaaaacagacactcgagtgaaaagttatggcaaaaatatgattttggactacccgagacaactccaaatggcaaaccggtttatcagtttttcaaaggtaaaaaatgttatttttctagtttacacactcaccgaaacactaccggaacctgtcgaaacaaccccagacttcataggacacatatataccatacatactaccatacttacgcaatagaaaataaaatcaagcacttgattggcaaacgccactaatgttcagacttaagatataaaaagttctaaactcaatttctaatcaaaaatcacctcaatttcagcaagaaaata

SEQ ID NO: 144152 - DNA, 569 bp, Cannabis sativa
tttagttcccgataatcaatacacgttctgagggaaccatccttctttttcacaaacaaaaccggagctccccagggcgatacactgggttgggtaaaccataaataaagcatcccccgaagttgtagctttatcaccttgagttctgctggagccatcctatatggagcttttgaaacaggttcggctccaggtgccaaatcaatcacaaagtctatttctcattataacggtaatcccggcaattcctcagggaatacgttgagaaaatctttaacaactctgactacctcaagcccaagtgtttcaggtctgctggagtcaatcacaaccgctaaaaatcctacacatccactgtgtagtagatccatgactcttaacactgaaatgaccgagattcgagacccctgaaccgatccaacataaacaaatggatccttgccctttggctgaaaagttaccattttgtgcttacagtctatacaggccgaatacttggacagaaaatccaccccaagtataatgtcaaactatgttaattccagctctataaggtcagtactcaactc

SEQ ID NO: 144153 - DNA, 948 bp, Cannabis sativa
gtggtcttgaataagatgttggaagaggctccattatctatcatagttcgggccaccatcttgttggctatctggacttccacgaccaacaggtcattgtacgaaaatctgattttgataacatcctcatcattgaatgttatggtgggctctcctgcctgtgggattcttggctttctctcttctacgaccaagattacttcttcttgctcgtgttttactgttcaggcatacctctcctgagctattcctgaatcttcagcaatgtgcgggcctccaataatgacttgcagttgcagatgtccatatactggtggtggtagcaagtcttggttgttatcacccctctgattttgatcggccttgacatacttctgtacttgtgggttgtttttctattaggaatttgatttcctgcttcagattgttgcattcattggtgtcatggtcgtagtctccatgaaattgacaaaacttggtcacgtcttgcttgctgacatcttttttcatgggtgcgggcttcttgtacggagctagtgactcagtggccttgtaaacactttctacatcctctgtcagggtggtaaatgcagtatacttagcaggattctcccggggagcttgttcagtcttgctggtgaactttccctttttcccattctgttgtgttgcctattattgttgctggacagtttaccatttgaacttgaattgcttgggtaatgggggagatggatggatgttcaagtagaaggagcttttgatttgccaggtttttgttcaccttctgctcgttgaatagcctcttcaagtttgataaaaccttctgcacggtcaaggaattcactcgtcgagtcgactggtccattcttccttatgtccttccaaagctcaccaaggacttcaatgccccccaagtatcgtagacaactttccgtcctcagttac

SEQ ID NO: 144154 - DNA, 758 bp, Cannabis sativa
gacatttactttggtgacttttccagtgatgttgactttttcggtgacgttgactttttcgttgactttcctgtgactttttcggcgacttttccgatgactttttcggcgggcgtgatttttccggcgacttttccagtgccggtgactttttcggtgccgacgacctttctagggaaacttattgttgttttacaaatatgagatttctatttttttttacaaaaatatggcataaaaaaacccatatgaatgtcaaaaaattaaaaaactcataatcctatagtgttatttatttatggcataaaaaagtaaaccataccctcaattcccatatttatgaaaattcctcatttttcttcaaactttatatttatactttaacaaagaaatttttacatttatattttttctaccttattttttttttttttactgttttttacttattaaagcttcaaaaaaaaacttttttttttctcttctttatatctttcttttagtcagccaaaagaaagatattttttttagtcagttgctgatattttttttttctttctttctcttttctctttatttctcttttttatttttttaattctctctctctctctccttaattttttttttctcaaactcttttttttatctttgtatataagtgtatatttttatatcttattttttttaacactttcgcactctctcacaaattttattttattatttttttaaaaaaataaaatacatgaaactac

SEQ ID NO: 144155 - DNA, 518 bp, Cannabis sativa
ggtaaaatatttccaacaaagataaggactatgtagctcgtatccatttttttgagcaaagtaacccctcgggaagctgaagatgatgcatcccgaggtaataactgtggatggtctcctactatacttaggatagaatgtacctcgcaagtaactttccaggataactaatataacttttacacttgcaataatttccttatagaccgtataacacataggtttgatagttggtgttatacccaaaattcgacgaacacatcaaaagaatacacgtgtctagctgggaagaatgtagatctcaaacacgcaatcgtgagtacacttgacgtggaataactcgttaaaaacacaatttgtaaagtatgtttataacttagttgactagacagtcttatgcgagataaaaatgtactaactgttgacttctgtctcgacgagaaaccatgtaatgcaagtgtccatgatgaggccttaacctcgtcgcgtggaggagatattgttggaaattattttac

SEQ ID NO: 144156 - DNA, 1112 bp, Cannabis sativa
catgtacttcatcacatatacaccgcaatctcggtcattgtcttgttgaggaagcccacaatctttagtatcaattccaaaatccacaaaactcacattctttgatttattctcatcgaacaaaaggttcaacgtcgacagctgcaaacatatacaattagttagattcaatgaacaatgaattcacatcaaataatgacactttgtaactttaccatttctttcgtagcgtcaacacaatacttctcatccattgcagtgtgtagcgagtccagaaatgaagcaaccttggacttcatattaagttcagcaccaaaccaatgtggtggaccttctatcgtcaaaactggcacaaacatctacaattgataagaaaaacagtaaagtcatcaatacattcaaattacagaccatatagatgttcgacactacaatgaattgaattatttgaacacatcgataccaatatgcatcattaacataaatcagttttcaaaattacgttacgaacgagcatgtgtatatgatgaagtaccttgacgcatttttggaagttgtcttcgtaaaacaatgttgaccattctcgttcttttgcaatcctcttcacattaaacgaacctagagttttttgctgcaaatgcattgtttattttgtcaagtaacagaaactagaaatagtccaaccaaactaaattagtacaaaaattaaattaagttgtataacaaagccattaccgagatgcgagtgggcatgtaccaaacacgaggttggtcaagtagtcggctaccacgttcgtacttgttcattagtacagaaaaacaatcaatgatctacaacaacatgaaatatgatttagacatgttcaataaatgaaacatatttagtaaccagtttcacacttacggatccctgaacttctcgcaagggtcgcaacgatgccatgcacctcctatccacttcaaactttcaaaattttgcaagcacatatctgattcaattataatgaatgtaactattattaaaaaaatttataagtatatgataatcacaaataccaaaataacatttacttaccccggatctaatgtgttgctaaaaacaaacttgtaaa

SEQ ID NO: 144157 - DNA, 991 bp, Cannabis sativa
actgcaattcgaagagcctggaatggtgagagcttaaaattttattatcaatagtactcgctacgtacttatacttagtcattttacataaaatttctaagtatagggggtatataccactatgtactattgattaataaagagttatgaaattttttcgagattttaaaatttttctaccttaatacttattacaccaagctgtagttaagtcgcaatcgagatattataagtagcaaaaaatgcgagtacccgtgtactgcaaaaatgttataaataaatatccccgaaaggatgtaaatttgttcaaaggaaaataaacataaatttgtccaagtacaagttgcgagtacccttgtaccacatatctatataaaaaaaaagagtttaacaaaagtaaatattaaagtaaaagttaagcgttaggagcggcaggggcagatccttctgcgactttgctgacagcctcgtccacgacttcctcagtgtccgcagcatcagcatcctcgggaaacagatttcctccaccgccttcagtctgcgtgggcgacatggctcgaaaagcctctgccatctcagcggctttttccccaaggattgagaagtcgaagtctggaattttggaaagagtggtataaatatagtcagagaccgcttggtcatactgcttcttcccattctccttctcgacctccaagtcgcgagacatctcctcgaccttcatctaagagttcttggcttcaagctccacttgctccttagacttgcaaagttctttgagctccttgtccttgtctgccgcttcctattttagtttcttgacgctctccttagagccagcaacaactgctttcatgaacatttccacagaacgcggaataagctcttcagatggagtcctctccgccttggacatgaactcctcgcccacaaacttttcctgcagaatcaggaagtcgcgagttcagacagctggatcgatcatgacttt

SEQ ID NO: 144158 - DNA, 773 bp, Cannabis sativa
tcaaatacttaatgagacaacaaataatcttgttcaaacaagaagaaatttatgggcaatgttaaatccacctaataaaaaggaagctcccccaactcgtcaccgcctacattgtttgacgtgtttgcattgaagattgatgaattggaggttgcagactcgtcaattgggtctcagagccttgcggaatcttatcaaggaccacgacgagtagtcatcgttgcgaggcaaattgggtagtgcttttctagattaagatccacattcagattagaaaaatgaaaattgagctctgatgtaaaaccatggctatgggttcgctctctatatgtacactcgacgaattgggatgggtaggattcatgtctttgctccatagagagaagaagaaaaatggctgcataattgattcatgatttttctaaattcgatccgatttcccctcatttgaggtttgactcagaaaaacgttaaagctaggttaacgctgttaacttcaatcgttatagtagagttttttttttatataacaaaaaaaaaatcgttaaaaaatcatagagttttttatatataaagatttagagttttttatatataaagattttttttttatatataaagatttttcttttttaaaaaataaataaaaaaatttattaatattctcccgtttgtttgttagagagataggtggctaagataatttttttaatttaaaaagagattattaatgtttaaaagattgtttaattttttgagtttaattattgagt

SEQ ID NO: 144159 - DNA, 739 bp, Cannabis sativa
  modified_base (671)..(677): a, c, t, g, unknown or other
acatttgccccccaagtctgtacaggaccttcaaagtttcgtgtagacttcatccgagctgtttctgccttcggatggggacacgtttcgggcgcgacggtacgggactcgatgtgaagctgactgggcgtccctttcgtttttggctaataaatgctctgactattaatatttcaaaatctgattttctctcaccactgttgatagctgtatttgattattttttatttcccatatttgcttttagggagaaccgaggcgtttgaggtttctctgaaatgattacctcgtttcgttacttgcatataaatatcaaccagcattggcacataaactcattttcatcatccttctttgctaagttggtttagagcgaaaagagaggtttttggcttcaagtttgctgaagtgcctacatcgaaacttctcgttggtttgatgttgcttgaatccagctatctgactgttgagtaagttctcaatttcctttacccttatttttgcatgtttacatttcgaatgcaccttcgaatttgccgtagaaaatatttaggaaaccctaggttcagaaactctgcgattgttcttcgtcatgatttcatgcgattgtacagtccataacgcttgctttctgaactgcaaaattcctgtctttcatcttgcttattctnnnnnnnatgaaattttttgccctaactcgagaaaatttcaaacttcttgagtcttgacttttctttga

SEQ ID NO: 144160 - DNA, 1521 bp, Cannabis sativa
aggagaattgtgcatggaatttcgaagagaaagcctttcatgagttgaacctcccgggcgccaacttgaaataccattgctaggtggcctctcagagggtggcaggaaaaactctgcaacatacatctcgtcgtgctccttgaaggtccatttgcatttcgaaatacttgagatgggataagggatcttccttcccagtgtacatcttccagattggcatcttaaacttgtggggcaattctaagacattaatctctgggcagaaaggggatccacgtgctcgatccaactcgaggtctttgttcttctgaccggccaggccttggaacatattttttagctcatctagctgtgcctgcacggctggattaacttgttcagcctcttggccgaccagagtcatgtcagcatctctttgagcgggattttgagcacgagccctgggctaaatgactggcgcatcatgctgctcgtccaaccctctccttctgttcagatcatctctgagatcatgaactcttcccaatcgattaaatatagaaacaccggctgtctctgtgactgattggtttggccaactagctggccgacactattaacttgagtggaattattaggtatgacttctcctaatgaattgctagacaaggtctgcccgcctaccacttggcccacatgtgggacctgtgaccggggattggatggctgaccatttaaagtttaaaaggtgttcaccgcaggatcttcgtctgtctcgcccaggggaatgacggttgcaggctattgactggtagcctgataggcttttcgtatcagcacggtggcttgtctggttcggtcgtcaatggctgcttgctgagccctcaatgtttccatctatttgtccttccattcaacgaacatgcgccattgctcttcaaatgcgagatttaccgcagcacgaagttcctcctgatcgtgatgcagggtgttggtatgaccttgcatgactccaagagcagcacggaggttctgtattttggtgtcatctccaatggttgttcgaacatttgttacgggcggaacagaagtgttgggaatgccctgattagctgctgaactggtgttccaagtctcttgcacaccagacacgattccactcacaggagtcgtcacacgtgacctacagttgatggttgttcgggatttatggttggtggaacccttgtgttccttggattctgcagtgcaggatccaccgcctgtggatttttcggatcaaccactcctctacaagtctgtatcaccattgtgtttttgactagatttgtgataaagagcgatccttgagttctgctctcaatgaaagcaccaaaatgttgacctcgcttttggccaacgacagtgagtctagattgtaagcgacaagtagtatgatgtatatgtaatataatgacgtaaataaagacaaaagaattttatagaggttaagccccgagcagatcggtaatagcgtaatcctcttggtttgtattgacttaa

SEQ ID NO: 144161 - DNA, 836 bp, Cannabis sativa
tctttttctttttctttctttttctctttctctttcttctcgacagaacccccctcccctaacccttcttcttcttcttctgccattcttcttgttcttcctctcgacaggtccctagccctcaaaacccatatcactatatcatatcagaagaacacatcagagccaaaaacacacgcgaaatgcatcatcaacaacacaacaatggtttacttagctaccattcttgcaatgaaatcttcgtatcagatcttcccatcggaaccgacctcaacctcccggatcaattcatcgaattaggctggctcaagcttctcgccaatgctggttacgatgtgctggagctcaatgacggagacgtagccggtgcactccttatcgaggaccttgaaagcatcgcggagctggcaatcgaagggttcgggcttcatgtgcttagccatgaggtccaagaatcgagggaaatcgaagggcgcactgagcttttcctcgacgataatggatttcagctgggcttgggtcgggtttcctcccagagaccgtatcagaattcctagctccgacggtgcaatccgaccatcgccatcgatgtcgaattgggtgaaagcctccctcattgaagatacttggttgtcgctcagatcctttcccatggctaccggattaacggagtgagtgggtctggttcctttgtcgctctagaaaaagaaatctctcagtttagggggggtgttctgttgagaagaataagaagaagaagaagaagggttaggggaggggagttctgtcgagaagaaagagaaagagaaagaaaatgagaaaaaaaaagaaaaaaa

SEQ ID NO: 144162 - DNA, 1381 bp, Cannabis sativa
  modified_base (548)..(576): a, c, t, g, unknown or other
  modified_base (1015)..(1031): a, c, t, g, unknown or other
gctcatggtaccttcattaatcagatttagacacctttcaatggggttcatagctccgtcgagttagctatctcagatagaagctgacatacaaatgatgttgactgctgaggtcaactttgtcaccaagaactgtgattctttagatggagtattacgtcttcaagcgcaggaacgacgaggcttcaatcatcaacctcagaaaaacatgggaaaagctccagctcgctaccaagattattgattctgtgtttccattgacacatcccagaatgttacgatttacaacgtatttaatacacatttatattgaccaagtaaaagcggacccatcacagctgtgtgattttcaaatattaaccacatttattttacgtggtatgaaatcaaaccccacgatttcaggggataattattgtaagatatcagtcaactatgtaattaactgccctatgatgtaattatatatagaggcaagttatactaaaaaagggacaaaaaaatcattaaaaaaagacttgaaagttgtatcagaaatctaataagannnnnnnnnnnnnnnnnnnnnnnnnnnnntgcaaaaccacgtaaaaaacctttatgttcttatcttctttaccagcttttaatttctaggcaagtttattactacttaagctcaaatatagttaacgaaaatttgcgttagcataagataaattaaataataataaatttgaaattaacttaaatatttttatagatattctaaccataatattttcaaattcaaaattggttatttcgttaaatatttaattattaataaattataagttagaaaaattatattttacatcattttacttattagaaatttataaatagtattttaaatatttaaataacctagatatttgtgtaaaaatttgaaaaatacttaatttgagatattttgacatataattaggaaattattatttgtttgttattttattcttaaaataatagttgcctaaccatatctattttaaannnnnnnnnnnnnnnnnttttaattttattaaattataatattagaaaatgacattgaaaatatctatttagttatttttaaatcatttatcttattagatatttaaattaatttgataaaattattcaaataaacctagatggaacactttttaatgggtaatacccatcgatggatactaaaaaaattgatgatgtgacaatctaattacttactgtagcaagttaccaatatatatatatatttaagaaaaattatatttgtatttttatgaaattagaaataatgatttcaaccaataaaattagagcattagaagttatttttagaaactagtacttttattgttgaaattactactttata

SEQ ID NO: 144163 - DNA, 532 bp, Cannabis sativa
caattctcgatatattcaatgcacatccgcaaagagacacatctttcttcttgacaaacaggataggagttcctcagggtaataaacttggtcgtgaaaaccctaggtcaagtaacccctagagttgaattttcaactcttcaggttctgctagagccattctgtaaggggccttagaaaacggttctgctctgggtgccaagtcaatgaaaaaatcaatttctctctacggtggtaaacccagaagttcatgaggaaaaacatctagaaattcccgaaccaacttgatgtcttctggctgaacagactcaggccgagtggtatccaataccatggccagaaactctagacatctttctcgtaacaattccctggctgttagtattgaaattgttgggatatgagatccttgaacagatccaacaaaaataaatggttctttgccttttggttggaagattaccatcttcctcttacaatcagtactggctgagtatttggacaagacatccattcccattataatatcaaa

SEQ ID NO: 144164 - DNA, 638 bp, Cannabis sativa
agatagttagggtgttacaatgtacttatattaaaaataatgtaagatttgagaaaatatgaaacctaattcgtaggacgagggtaccctagaaggatcagggggatccctaccatcactatccctattgtggtatgtcgctagactagctgacattgtactttacttcgaagataaaaaatataaaaatgtaaaaagtcacaaaatgtgaagcagataaatcaaagttgacacaaatattaatatgaaggaaaaataaaaattttatttaatcattagagtttttcttacaaacaatagtagattaaagttacaatgaataatcactatcatttccataattcaccaagttttcattttcatccgcaacaagttcaactagtaaatcatatatttcttcagcaacataattttcatcaagttcattattttccatctcaggatccactgactgattggtcgattcaacaattactagaggttcatccaattgcaaaattaactctccaagactaaccgtcaatgcaaaatttgaagagttacaatcatttacaacatcaacatctgtcgcatcttcattatcattaatgtcccaaatttgtcgatggttaacatcttcaacaacattccaatcacga

SEQ ID NO: 144165 - DNA, 545 bp, Cannabis sativa
aaagtaaaaacaaactcaaagagaatatgcatcaaagtgatcatatacatataaaatatcctgacccaaagggcaggtaaaaaaaatataataatacaaatggcctagggacaggccataataattgtcttcccttagaaaataaaacagctacataattaagattgtcttgaagaaaagaaaaatagctgtaaataaaaaaaaaaagaaataatcatgatgaaatgagctggactcagcggctttgtcaatacgaggaggaaggcgagggccccgacgtgcttcaagcatagcatcaagcttcttcttcttctcccgggatttggcaagagcctcctcaggcttgggatagaagtcgagtttgatgctctggccgttcgactgccacgccatgtagacgccatcagcaaagcgtttggcacagtgcttacaggagataggggttaggagttcttctcttttggcctttttcaaggcctgatccttgaagtccctcaactccttcacctccacggtcaggttacctggtgcaattcctctaagga

SEQ ID NO: 144166 - DNA, 553 bp, Cannabis sativa
aaaaaaatatatattaaattttaaaaccaattaagcaatttaaaaaattatttatttattgttaaaaaattcatttagatataaaaaaatatattaaaattcaatttctgtaaaaactaaatttaacgagaacaagtttgagtctatttttttttctccaaaaatttagatttgcttaagtaaacataacattttttttagtttaatttctaacctttttttcaaaaaaaaaaaatattgagttttaaattatttttttttaatttttttagttatgagtttataaacataagtgaacttaattttttcttcaaaaaatcttagtttgtttaaattatttattgaatttttaataactttagtttgatttttttaacatataataatcaataaaataaagtttaacaatattttttaaggaataaattaggttttttaagtaaatttaatatttttatcaagttttataacactttttattattttttttaaaattaatagaacattataagttttaaaattatttttttttaataaaatagggtaaaatttt

SEQ ID NO: 144167 - DNA, 1088 bp, Cannabis sativa
  modified_base (1053)..(1063): a, c, t, g, unknown or other
gtaacaagctttggcttctgggaaagaaggctgaagttgcataaaaattcaagcttaaacttcgcttgaaagagtcaaagggaaagcagcacggggagtaagatagactttaagcaatatttcccttctgggaagaagggttgaagacgtatcatacccccagtgatctttcttacatgaaaaacaacatgcatgcaagagttatgaatttttatgaagcaagcttcgactttcgagaaggaaagctaaagttgcgtaaaaattcaagtttagacttgcttgaaaagatcaatgggaaagcatcacgggaagtaagacaaacttcaagcaatccttccatttcaagaagaagggttgaagatgtatcgtaccccagtgatccttcttgcacgaataacaacgtgcatgcgagagtcctattgcatttttatgaagcaagtttcagcttccgggaaagaaagctgaagttgcataaaaattcaagcttagacttcatttgaaaggatcaaagggaaagcatcacggggagtaagatagacttcaagcaatccttcccttcctggaagaagggttgaagacgtatcatacctccagtgatctttcttgcatgaaaaaaaatgtacatgcgagagtcttgttaaatttttatgaagtaagcttcgaactctaggaaggaaggctgaagttgcatgaaaattcaagtttagacttcgcttgaaatgatcaaagggaaagcatcacggggagtaagatagacttcaagcaatccttcccttctgggaagaagggttgaagatgtatcatacccctagtgatctttcttgcacaaaaaataacgtgcatatgagagtcgcgttgaatttttatgaaggaagctttggcttcaaggaaggaagggtgaagttgcataaaaatttaagcttagacttcgcttgaaaagatcaaagggtgaaagagtcattgggagtaaagtggacttcaagcaatcctttccttccaggaaagaaggttaaagacgtgcaacacacccaatgtgttggaatttattttacnnnnnnnnnnnatttactaacaagtatgttatttaa

SEQ ID NO: 144168 - DNA, 571 bp, Cannabis sativa
tgttttcaattttaaaaaatagaaaacagtttttaaactgtaaagccaaacagtctctaggcttcttctatgcatttttcttcgtttgagatgaaaacaacgttcaaattcatagtttaaagacatttcaaacctaaaaaaaaatcattgtttaaagaagtagaaaaaaaaaaattaatgttcaatttttttttatttaagcgtttatatattgcaagcatgttttatttggactcgaacccaagacttccaacacacacccacctatggccacttcaaatctaccatttattgctttttcaataaataaaaaataataacctttattaccatttcaaacaaacaaaaaaaatctccctttgaaaaaaaaatgagcctacatttaaaaatttaaaaaaaaattatattgtatattgtattttttaaaattttttatatttatatatatatatatattttgctaaatatttaactcattaagctaaaataaaaagtttggtgagcacatggggactcacctcccaaaaacaaaacaaactattacaagtgtgagacaaaccattacaactaa

SEQ ID NO: 144169 - DNA, 688 bp, Cannabis sativa
aaaaaatattttgtgatagccatgtagttgatggataattttcaaatattcaaaagagtatttgaactctataaaaagtggtcactttaattctttttagagtgatctcatagtgttgtagaaggagtagtttgttattcggcaaagttttttgagacttgtctgggccttaagttgtttggcaaaattctttgaaaattgaagtctttacacatatattcagcttggaaaaagtcaaccacagcttcacaaaagttttactctagaatatgtcaataaatagtatttaaaaaaataactaacaaacttttttggtaatgtgcaaatctagaatcaaatcaagtacactatattgagaaaatgtctttataataagattaggaaaatttacattccagtactttaattcaattctttttacaaaaatatggtgctgtcatttatatatcaaaatgtaccgttttttataccgttatcaatttaattcatttttttttaaaagaaaaaaactgaatgggacgtgtgatgtgtgatgacgtcatcacatcacgtcctgcacgtcttccattttgcagagttcaactgttcacacgccactttttttgcatgtgtaattcaaattatggacggttttagaggattgtaatcattatttttttttttatattgtattttaccatttttatgg

SEQ ID NO: 144170 - DNA, 971 bp, Cannabis sativa
gttagtaataaaaatacattaatatgaatgaaaattagtaacttgctaagtagttgtaactaactatttactagctactaaaaaaataaaaacacatgaatacaattgaaaatagaaaaaacaattgatacaaaatatagttaatttctaatttcttttttctaaactaattttatagaaattaatttctaaacttttattttaatactctcctatctcattctcatcacaatatttaacaaattattagtttaaaatactcaatatatacatatacaatatataaaatactctcctatatcacatttttcattcaccataaatatacacacatattcaatacaatagaaaatacatacatatatactctcctatatcacatttctcatcacaatatatacacacaatacatatttaataatatagaaaaatcctaaaaaaatttataaaatacaaaataaagcaatgtacattactaaaattagatttataccttaatagacgttgagatacaatgttttctccattaaaaatggtggccggaggtatagccaccacaaccactacctctaccttcagtttaccctaaaaaatgatgaaaaatatgatctttttaggtatataattttaggtatgaaaaatagaaggtttagaaacaaaaatgagataaaatgatgaaaaaaatggtgaaatgggggtgattttccgtggtggttggtggagaggttttggagtttctctggtttgggggtttctgggttggctgatcaaatgaggaagatgatgggctgggctagggttataaacccttttggcgtcagttatttggaaataaccgacgccataagcggcgtaaaatttccgtctaaaaattttcaaccctatgccgtcggttatttattattatgctgaaaaaagtgcctctaaaagcttattttgtagtagtgttaactaaaagaaaactactcaga

SEQ ID NO: 144171 - DNA, 614 bp, Cannabis sativa
  modified_base (233)..(240): a, c, t, g, unknown or other
ttttttttttttaaattatccttgaaaatttgaatgattcaattcttcgaaattgtagttgttgagtcgggtgtacaaacaggttcacttgactcgtattaaataaaagggaaacttataaaaatacaggaatttgagttaactatcaaaaatactgtcacacgaaatttttttcaaaaatactgtgtttttataaaacactagttgtacacaaaacagaacaactcaaaacnnnnnnnnaacaactaaaaaataccagtagaacaccaataaaaacttaacacagtatactgcagtttgaaacttataaaaaaaatacagtacaaaagtaaaaaataccgcctggcaatatatttgtaaaaatatagcaaaagttagtataccatgtaaatttctcaaataaaacttgatataatcctaatatcaatattagtcgtgtcgggcgtggccatatttcgaagataggcccagcacggcccatgagcacggattgttcgtgccaagcttagactaacacatttttgttagaggaaattacactctataccctgtttatattgtcttctttcatttttacccttttttttaatgtctatcatttttacctctttttt

SEQ ID NO: 144172 - DNA, 555 bp, Cannabis sativa
ggaaccctagtttttccccttttttttttgcgatattagggtattgccacgttatccttcgatagggaaacttttattttaaagtttaagtccccaaaaggttatttagcgtgtcactcattagttttatgaataatttaacttaggggcctgtaaatcatcgagagcctgttgcactcaggttggccggcgcacctgaatttggaaatgaggtaagcttagtataatgattgcatatgtgtttacgtatttagcgtacatgttagttaagtctgttagattacattataatagcgatatcaatatatttagtattatattggatatcataaatgtatgttggcttaagtactattgacagtatcacattggtacgactagagtatgactagcgtactgagtataggctgatattatggctaataatactgtcgtgtgaacattcttgactcagtaacgtgtcagacatggggacagtgttatggttgggtgtagggcacctgattataatccaggttatagttatgttattgtttatgtttttcttactgagtc

SEQ ID NO: 144173 - DNA, 538 bp, Cannabis sativa
  modified_base (32)..(32): a, c, t, g, unknown or other
atacaagtcagtattatatgatatgttatatncttttcttactgagtctatcgattcacagttctactttcatgtgtaggtaaaagaaaggcaaaaactgaatagaagtgagcttgagctgggatgggcttgtacatgtcatggcgacacgacttggagtgttcggtctcgggactggggttgttattttgtagtcgcgatgcgacttggatattgtattttgaatattttgtataaaagtttaaaaacgggatcccggtacttgtaaatgattatgtaaattacaaagtttagtatttaatataaaaattttaatttgacacattttttgaaaaaattctttaattagcaaagatagaattgtaattgaaaaattactgtagagtgccttagcatttgggcgttacacttatcattggtaaggtgttgactgtcttcataccctggtcggccaacatgcttgaatgcagaaaattgtcaagttggcatatttaggatgatgttattgttccatttaggacggttgaatcgagtttcc

SEQ ID NO: 144174 - DNA, 549 bp, Cannabis sativa
  modified_base (493)..(505): a, c, t, g, unknown or other
agtgaaattttggaacttttctttttttttttttttttttctcaaatgctatattttaattctaactctatgaatgtcaattctatctatatagtaattataattatttataaaataaattttcatttaacttatttattaattagaccttacaaagtctcataattaataaacaaaccctaaaatctcttttcttctcaaataagcccttgcatagtgaaaattcacaaacaagacacagtcttattcagaattctaattgattaattaaaataaattaattgagactacaaaacaatattatcccagttagtgcagggactataggcctatataatcaagctcctaataatagattaaaaatttatcaagtaaatttcctaacttattaatttctcctcactccactattgtgattacatagtacggtgtatataccaaagatagatacgctatgaattatctattatttcaatccaaataatcaaagatnnnnnnnnnnnnntttacatcgagtagggacaaatttccgttctacccttcaatgta

SEQ ID NO: 144175 - DNA, 1149 bp, Cannabis sativa
ataaagttttagaaaaccttacattgggtgtagcagaatattatgtctccttccactcagatctctaacccttgtatcttgtgtgtgaaaattttttgggtgacatgattggagaagcttatggtataggcaagcctaaatgaccattttaactacccgtacctaagcctaacataacaagcctagaaagaacttttgattcttggttgtgcattgatttatattagtggataatagtaagtatagcaagcatatagaatattttgggttagtggattgatggttgtaattggcatgcataagtgattcaattgttagttaattgtgttctataatttcatgagctgaatgaaaataaattgaagtgtctcaaggacgtaattgaactgaaattatggattgttatgcataggtaaatttttcataatcatgttattgagtctacttgaaaattactcatgttctggagattgacttgtttaacttttatttttcattttagtattttactcgagggcgagtaaatgtttagtttgggagaatttgttaggatgtcattagtactatttttaggttaattttagtgtgttttttttatttagttttactcttgtttggaacaattttacgctttttatatttttttgcagatctaaaatagaagaagcttaaaaaatatcgaaggaataagatggaaaaaaaaaaagataaaaagatcaaataaaagataaatatatcaaaatgggggtcatgcctaaacatggaaaccttatgtcgcgacacgtatcaatggaagcctggagacgtgagaaatttcatacacgggtcgcgacatgtaggccgcggcatagaaagtgcatgtcgcgactcgcccatctaattcaaggcaaattaggagttttcaacgtggggttatcttttctatcttttttttatcccttattggctataaaagaagtggactttagttgttttcgagaaccaattcagaaggaaatcaaaagcactcaagggagtatgaattttggagattaaattcaatactagaggcgtttttaagagggttttcaacattcttttactctctattttcttctctattcttaaattaatatgtgtgaaattgctacgatgaacatgagtagctaa

SEQ ID NO: 144176 - DNA, 515 bp, Cannabis sativa
tcaggcttgggatagaagtcaagtttgatactctggccattcgactgccaggccatgtagacgccgtcatcgaagcgtttgacgcaatgcttgcagatgatcggggtcaggagctcatatcttttggcctttttcaaggcctgatctctgaaatcccttagctccttcacctccacggtcaggttggccgtagactgcaagtccgcctgatgcaactcctctagggacttcaacttggcacccatctcgtccatagcctccctggcctcccgaaggtcgtgtctggccctagctgcggcctcgccctccaccttcaatgcctcctggttcctcgcctcagcctcagcctccctttgcttggcctcctctcggaacttcgcctctgcaagggcctccctttgttgagcctcctcctggaatgcccgcctctcagcagataaatcctgcaggatcctcacggcctcgtctatgcccccgaattcggacatgacgaatccatggtcaatcaaggtctt

SEQ ID NO: 144177 - DNA, 524 bp, Cannabis sativa
taatagatgtgaatgtgagttactctattgataataataatagatatttagttaaaattattattgaaaaaataaataaatgataaaaattaagaaaacaaagaataggatagaaaagacatatagattgccacctcaacactttcctttatatatatatatatattgattgattgattgatagtctctttctctaataccactaagtgtattaatgaatattatttttctaaataaaattacttgattaaattattcaatttttaaaattaatcttttttataccttcctatttaatgttattttgattttttttagatttgattttttatttcctatttaattttgtaaaatcatttttatatgtagcattatttttcctaaagtttagtgaagaaatttttattttttcatagtgtaaagtgaagaagctttaatcctttcaaagtgttccaggtaagatcatactctctcacttttgtttgtttttctacatttataattataaaagtcattactttaat

SEQ ID NO: 144178 - DNA, 522 bp, Cannabis sativa
  modified_base (47)..(55): a, c, t, g, unknown or other
  modified_base (448)..(454): a, c, t, g, unknown or other
taaaatttctttatataaaatatttatataatttttatttttaaatnnnnnnnnnaatattataaaattaataaataatattttgttaattaatgagatattccgttaaaattaacgtaataataaaaaatgtgtttaaactaaaaattttgttatataaccacactttatataaaataaatttatgttcgagtttagataagataaaataactttacagtgcaggtgatataaatgttaaaatcgatctcacatcaaaatgatgaaacaaacgataaaatacatttatttattataataaaggagcacaaccattcaaaaataaagaccccaaatcaaggacaaactatcattatcctagcaaggaaccatatataccacaaaattcatgactaataaaatgtgtatacaaactcggggatatgattttgtcccgtgatgtactttnnnnnnntgtattccgtggtacattagatgggtctcaaggtacattaaatgagtgtcagggtacgtttctatttt

SEQ ID NO: 144179 - DNA, 585 bp, Cannabis sativa
gtaaaagtgtaataaaataaagttgataagtataaatgttggtttgaccgtatgaagatatatatgtaataaagtgtgtattttgtatttttggtgtacttttatagaagtagaatatatatatttttcttttgtttcagaaaaaaaaagaatatatatttttttcttctaaaattattactattgctagatttttaaaaaagttcaaactatatattataataataagtaatttacggtataaatatttaaatttaactcccagttataaataaatatctaaatttaattttcagtcgtaataatacttaagttattctcttttgaactttgtaataactagtcgttaaatgtcaagtcattatccacgtgttattttcttatttgtatatataaattaattttttttttaaaaaaaataaaacttcatgacctggatcaatcagaaattaccacgtggcaatttacttaacatttaacaatcaggtacctacaaagtttcaataatataacttaggtattattgctgctaaaaattaatgggtatgtactattttggactctgtattttgcaaaagttacaga

SEQ ID NO: 144180 - DNA, 703 bp, Cannabis sativa
  modified_base (620)..(643): a, c, t, g, unknown or other
gcactctgacttcttgcacgccccccctggccacaactcctctttcacctggagaagcatcctttgggggcgcactcttcttcaaaaagggttagtttggaaaattggcacgggaaccactattcccatctcagcttcaaattggatttcaaatattcagagccctacaattctacaccctctccctcagtcccaagcttttgtctcctttttcttaaatgaagactcaacctggaatacccgcaaacttaatcactatttcccttcttaccaagttgatcgtatcctctctaccccaattgatcctcattcttcagattctcttatctgggggcttcactcctcaggcattttaacagttaagtctgcttaccatctcgcctgcacccttgactcagttcaagttccttcctcctcaaatcctaatcctcatcttcattggtggaaatccctctggtctctccctgtaccctccaagattaaacactttatttggagagctttccatcacatattgccttgttctctcaatctgtttctcaaaaggagtctccctaatccttcttgccctgtttgtggttatgacaaggaatcggtctctcatgctcttattggctgcnnnnnnnnnnnnnnnnnnnnnnnngcttcatcttttaaacagttttatatgtctcattacagaagtgacattaaggattttctt

SEQ ID NO: 144181 - DNA, 612 bp, Cannabis sativa
tcccaaaggacccaacttgacgttggtcgtagcacgcgaacaacacgttcgaggagaacttagcgtgggaatggccagaaccttggagtgggggatgaagagcccaatcgtacccaacctatgggataagatacttatgaaacggaaaaccatcgccttagacgccatcaagaagaggcgcagtggcggaacgctgaattagagtgtgatgcagtcgcaactagggcagcacaggagactaatgctcaaaatcaacctgaacttggagtgagaagaccacgaggtaggcctcggggctcacaaacaaggagacaggaaaatacccagaaagaacaacccagggaaaatgagataccccctaaaaatcagaatgatcagctagaaccctctcacagaaatgagaatgggaggcgaccagaaactgatgaacaagaaattcctcatgacaatgaggaggatcttgggactcaaccgtaaagtttggaatgatttggataggttttccaggtgttttggtgagtgcgaaatttgagatttttgtgccaaaaaacggtcttccgtctttgccaaaacagcctgctttttctagaatcgtatctttgtcataacttt

SEQ ID NO: 144182 - DNA, 741 bp, Cannabis sativa
  modified_base (688)..(707): a, c, t, g, unknown or other
gtgatccaatgaacactcctacccttaacgccaattaaaggctctacaatagtcatggagtgctcatttgaacactatacatctttttattaaaaaaaaagcgcattgttagaaaatatttaaagttaatttgaggtattttttagagagttcatttatatgttcgattggaggtaataaatagaatagaataaaaacaaataagtttcttccattcttttgttggttgcattttaaaatattagaatggcattctaataaaataattttctactattttttgtggaatgactattctatttcaaaatgaaaggaaatgtcattccaatgtaatatgacaaaaaatttaataatttttttttatcaatttttatagtgcattttaaattttattgagtaatttgcggcatgaatacctaagtttaactctcagttgtaaataaatacctaagtttaatttttggcggtgataatacctaagttataattctgaaacttttataggtacctgactgtaattgttaagtaaattgccacgtggcaattcctaattggtccgagtcattaaatttttattttttaacaaaaattaattaaaatataccaataagaaaatgacacgtggataatgacataatattttaatagttaggtatttaagagttccaaaaatataacttaggtattnnnnnnnnnnnnnnnnnnnnttaggtatttatttgcaactgggagttaaactta

SEQ ID NO: 144183 - DNA, 1141 bp, Cannabis sativa
tataaaaatcaaaacataaaggggtttcgccgcaaattgctctaaattatataagacttatacttaattgtaccaataaaaaaattgctaggcacccccttaattttagtatttctctttattttatcctacaaagaatactaaaggagaattaatgtgtcactaatataacgattttttaaaagaattttttgtgaagaaaaaaaaaagaacttcatgttatgaaataataatataaaatagataagaaaaaaagaagaagaagatgaagatgaaaagagaaagagaaactgaataagaatttcttaattatttatttaaatagggtgaaccactatttatacaaaaatatgactaaaagaataaaaaattaaatcaatgtaataaagaaaaatataaccaagcattaacggtgataattaatttagtgattttgacatccatatatataatatttcataacactttctcctttttttttcgataaaatcataacactcccccttaaatgtcaataaaaattgcctcattaaaaatattgctaaaaaatttcgtcaaagaaaaaagagtcgtgcagtgtaaactaactccccttcatttaggcattcgtggagatcttttaatcgacgaagtccaatcttgtgagccatcttctcaaatgttgatgttggtaatgactttgtaaataagtctgcaagattgaaacttgattgaatttgttgaacaccaatatgtattctcttgaaatgtataaagaagaatttggtaaaatgtgttttaattctatctccttcaatgtaccctccttttagttgagtgatgcaagcagtattatttacatagagtactgcttgtattgatatttctttattagttgtaatctatattttttttgaatatgttatgtcacaaatctcactcccacacattctctacttgctttataaagtgcaagtatgttagcgtgatttaaagttgcctcattaaaaactttgtgaggaaaactcagtgggacaaaagctacgctaaggaaaaaagagtgcgatatatattcataattatttgcaagttgcctcgttaaaaatcttgtcaggaaaaccgagtgggacaaaacttgaactaagggaaaaagagtgcaaca

SEQ ID NO: 144184 - DNA, 997 bp, Cannabis sativa
  modified_base (800)..(803): a, c, t, g, unknown or other
aaacaaaacagacagaatataaaaataattgcagaaaattaaatcacttgacataagatatttgtatgtggtatcagtgttctttcgagcaatcgcagtccacggggccacgcccagagaatgaaatcaattaataaagcatcaacaattacaaagacaattgagttatataagtttagactccctctaaattattgccgcaattctttgtaatgcactttatgaatctgactaaccttcaaaaagtgaactcccttcgtctttgaaatgtgagtgcttacttcctcccgaagtaaggcttgaacaagtcatctctggaagaccactcccttattcagccaagttgttcgaacagactctaagacatagtaagaacagatatgaaaaatactagaacctagatgaacaactaggttctcacaaaaataactctcttctcacaaataagaaaaatgcacaaaatgaaacactagaagagtcgattcaagtggctgctctctaggttttatttatagaacatagtttccctagagacagccacaaagtcgaatctacagctgtacaaaactttcctaagataaacttgatttgcaacatcggaaacagattctgacgcagcaaatcagaccagaaaaggaaactttccataaacaaatctgatcttgtattgggtcttaatacctttcaaaaacagtgtgtataatctgaatgtatcaagacacaatcgaatttaataagaaaaatagcaagagtcaaagtttcctttaaaaacaacctttccataagagaattgcttctcnnnnaagaagtttccatacaagaaaagttcagctgaaaatacatctttcctaacatagagaaaagcaataaaatcgaatattaaaggtgagaaaattggttaagagtgcaaacaaatctcaccataaaataaaaaatattttggcatctaaattgccaaaaaaggacttcacaatggttaatggtttgttgtggtaat

SEQ ID NO: 144185 - DNA, 805 bp, Cannabis sativa
aagtgcttaataaagttctcaatttcttgcatatttcttctattgatatgcctatttgtcatgcctatcaatatggaaaattgtaccagttttcttttcattcttcacataacaaaactaatgcaccctttgaaatagttcacataaacctttggggatcctcccctcacccttcatctgaaggatttaaatactacatatgcttcattgatgattgtacaaaattttcttggattttccctcttactgaaaatctaaaacagccattgttttcaaatatttcaatagctatgtagaaagacaattcaatacgaaaatcaaatccattcaagctgattgggggagagaatacagaccattaaaacctattctctatgatctgggtatcatttttagacatccatgtctccacacacatcaataacagcataggactgacagaaaacatagacacatcacttacatgggacttacactcttaagagaagcacatacctatttctttctggtgggattcctttgtttcatctacatatctaataaacaggcttcccatacaaaaaaaaaatcaatacatatctccttataaaaacatgtttcaatctaaactagattatagcttcctaaaaacctttggttgtgtttgctttcttctccttagaccatacaacaaacataaatttaattttagaacatcaatgtgtgtctttcttaggtattgtccttctcacaaaggctatcgatgcttacaccattcaggcaaaatctgttggaaatattttaccaggatctagatttaccaaca

SEQ ID NO: 144186 - DNA, 704 bp, Cannabis sativa
  modified_base (543)..(554): a, c, t, g, unknown or other
atcatgaactcttattcatgttattagtttctttgattcactcgttaaagtttctcaaagaagatgattcttacaacttctattttgagaatcttataatgtgaatagctgggaacatgatctacaattatggaattctaactttcttaacgaatcaaatgttggttctatttaagtgttaattatggaattaaaaagttatgcacaaatttaaattggatctaaatatactttcactagtgaattaacgatactaaaggataaagaattaattagaaaggtaaaacagtaatttaaattaaactaattacgaaccgacacaaggagggctaatcactggaattagttatatcaatggacgatgtagtaaaactcagtaaatataattctacaattactaagagttcaattccatatttatagtggagtaatcatggaattaataaacaagattgtaatgtcctaatgctaaggcaggctacagtgcttttcaaacggtgctatctttcccaatcaaaaaattttctcgaaaaacgtgtcaannnnnnnnnnnnatattaaatattaaactttataatttactaaccaatttacaaacatcgggatcccatttttaaacttttatccaaaatatacaaaatacataaccaggtcgcacaacgactacaaaataataaccatagatgtcccgagaccaaacactc

SEQ ID NO: 144187 - DNA, 510 bp, Cannabis sativa
gctttgatggaatcaatctttccacccttctctctctcactttgttattaaaaagattcaataattattatttattctttattattctttttttttgttgcatcattacagatattttttttagaaattaaattataggcaggctataaatttagatctttagatctaaactttcacgatgtacttataattatttttttttagttttttccaaattttatttccacattggcaaaatgaaaaattataaaaaaaataaaaagcctaaataaataaataatactatattctttggaagtgtgtatttttttcgagaacagaaaattgtaaccccttcaaaaaaaaaaatattgttaaatatctcagcatactatcattattaatttcatatcatattccacacttgcttccctattcaaaaagacctatctttcgatcttgctaatttcttccccataaattatcggacttgctcgaagatcttcaggtactcttttaattttcttgtta

SEQ ID NO: 144188 - DNA, 638 bp, Cannabis sativa
tgctcatattgagagagccttcgtgaaaaagctcagaaaaaaccctccttttttaaagaaaaaaacatctccttcatggcagaaaacccataaaatgttagtacaccacacgaagaaactcatcaccgttctaggaaagagcccatgggctccagaaggtcttccaacccatagtctaaacggaccacccgctctaggaggacccaacatgagggtggccccagcacttggaccactcattctaagaggacccaacctgacgttggtcccagtacgcgaatgacacgctcgaggagaactcggcgtgggaatgactagaatcctggaataagggatgagagacccaaccgtggaggtactcagcctatgggagagagcacttatgaaacaaaaaactgccacctaagacgcctcctggaggaggcacagcggcggaatgctaaattagagcgtgatgcagccgcagctagggcggcaccagggactaacactcaaaattaacctaaacctagagtgagaacaccacgaggcaaaactcgtggctcacgaactatgagacaggaaaatgtccaagaagaacaacctggggaaaatgattttccccttgaaaatctgaatgattggccagaaccctctca

SEQ ID NO: 144189 - DNA, 815 bp, Cannabis sativa
tgtcaattttgacatgaggtgtaaaaatctcggaaaaatttggagtttacctccaaaaataaaatttgtaggaaatgaatatttagtagcagttttttcaaataatgaataattatatttttttttaaaaaaaactaattatattatttgttatttttatatattgattaatattttaataaaaatattttcatattatattttcattatattaaaaataatatattaataatggtcgatttggcttcttttataatggccgatttggctattataagttaatgaagtttcaccttctaatcaaaaaaaaaaagaaaaaaaaaatatatatatatatcaaactaacattaatatatccaggaaaaaaaaattaatatttatctattgtctatacgtatatgagcaaatataataggtaaaatcgcgatcaaattctcttcgatggaactctgcaagcatcgatcaacatcttctccacaccgatcaattaattctccaacaatcaatctgcacaagtcaaatctcataacaacaatcaaactcatctccaatgttcatcatcggtagcaacaattgaagaatattcaatagaaattcacatcatcctatctacacatattacaaggttagatataatacaaataaatgatcatcttttcatgatatattcaatgattatatatatatgaattatgaaaaaatttaaaacacctcattctgatatttatcataacatgtttcattgtcatcatcttataaagaaacaaaatgtatatataaattattgttaaactataatttttaatatatatata

SEQ ID NO: 144190 - DNA, 590 bp, Cannabis sativa
tcaggtgtcctttcttgggcacattgttagcaaagacaggatcaagatggatccgaggaagatagaatccgtcagggattggctgagaccaaaaatagctacagaagttagaagtttcttgggtctggctggttattattgtcggttcgtagaagggttctctaaaatttcaacacctttaaccgagcttactaaaaagaatcagcgttttatgtggacggataagattgaagcaagttttcaagagctgaaacatagattaatcacagctccagtgttagccctaccttttgataaagagaagttcgtagtttactgtgatgcatccagacagagtttggggtgtgtactgatgcaggccgatcaggttattgcctatgcctctcgtcagttcaaagaatatgaacagcggtacctaactcatgatctagaacttaccgcggtagtgtttgctttaaagatttggcgacgttatctctacggagagagagattttaaatttatactgacaataagagcctcaaatatttctttactcagaaagacttgaatatgagatagaggcgttggttagagttggttaaggatta

SEQ ID NO: 144191 - DNA, 726 bp, Cannabis sativa
acttaaagcttaagctatcttaagaccaaggtgtaaaatggtcacacaccacaagtatagataaattacatcaatgattattatattaatataaatttgataaattacgggactaatgtgctcataactagtttccactgtgtagacaacacataattataaataacaatatggtaaggatttaacaaaatttatatattaaacatataatcatgaaattattatgtgaaccaagtaatatgaaaaatagaaataaaataagttatgtttattattgataaatgaaattaagattacattaaaattgagttttatttagggcataaaaactcaatagctcaacccttcccttcaccaccaccacttcaacaatgccaataacctcatcctcctcaatactcctttgctttctaatccgaaataaacaaagatgagagctgaagaatatcgtttcacaaattcttaggcttattttgtcatttctattatatgcttttttttatatatatattttcaatcccaatagaggagatgtatggattagacgagataattattctatttaagttttttttttcttttctaaaataatttaagagttatttaagttgtgatgggtaatttttttattgcatatacaggttaaaagagatagaggatcctcatttagaagaataggatctaaattgtcaggcttttgacatttctatcttagggtttgtttct

SEQ ID NO: 144192 - DNA, 773 bp, Cannabis sativa
catttgaaagacctaaccaatgttcccacaactagatttatagaatacaaaatcctaaagttctaagcgacaatcaaaagtaattaagtttcgcaggcatgcgagtatccgaagtgttcatccgaatacccgcgtgtattcaaaatatgaagtagcgtctgttcaaacattttttctacaatacacggttatgccaattttaggtcattttttctgaaattactcagtttcttgcctagaaaacgtagcctcatatgtattccctacaaacatatattcctgaccccccttcgtaaattttaaagcccagaaaatagtgttttttctcaaacagaaaacaaaatgcagtgaactttgaaaactaacctttagttctaataatctgttcctacgattgctctcgacagcactggagattgataaagatcccacaaaagaagagcgaaagtctgggcaatttatggaagttttcgatggagtctctgaaagagagggaacaaggaagttaagggagttaaggaaaatgagggaaaatgggggatttttgattcgaatcaaagggtttaagtacccaaatccctcattaattgggatcacgacatgtggcaatcgaaatgcctagagtcccccaatccaacggccaacgatgaccacgcctacacaaaaaccgaagagttttgtgacgtggcaccataaattcaataaaagcaatgattatagctgtcatttttcgaaaccctcgaagggacaaccaaaggtcacctcctcgtgac

SEQ ID NO: 144193 - DNA, 802 bp, Cannabis sativa
  modified_base (54)..(54): a, c, t, g, unknown or other
  modified_base (401)..(402): a, c, t, g, unknown or other
  modified_base (757)..(765): a, c, t, g, unknown or other
agtagcttgtatctctaacatagtggctacaccagtactacttcaacaagttancaatgtcagtggcaagatgaaaagctaagacttatttggaaccgaatcatggatggtgaacaactagatgggtggacagttaatagtgaaggatacctataccatatgggaagactggttgttgcagatatccctgatcttaaggagtccattttaattgagccccatatatctaagtttgttgtacatcctggaagtacaaagatgtaccaagatttgaagagacaatattggtgggaaggtatgaaaagagacgtgtctagctttgtagctaagtgtatagtttgtcagaagttaaggctgagcatcatagaccttcaggtttacttcaacctttgcctataccnnaatggaagtgggacaagattacaatggactttgttaccggattgccattgacacctttgaagcatgacgttgtttgggtgaatgttgatcgtttgactaagtttgtccattttattccaatcagaaaggattataagcttaccaggctagctcgactttatgtagacaatatagttcgactacacggagtgccttcaagcattgtttgtgatagagatcctcgattcacatcaaggttttggaaggccttacgacaagccttaggaactatacttcacttgaaaactgtccatcatccgcagacagatggacagtctgagaggaccatacagactttagaagacatgcttcgctnnnnnnnnntggattttggaggtagttggggagaacacttgtcact

SEQ ID NO: 144194 - DNA, 704 bp, Cannabis sativa
caattaaatgggcaaatttatggggaagtaataccgactagaggcctaagacaaggagatccactttcgccatacctttttcttatatgtgcagaaggattttcagcgctaatccgatatgcagaggaaaagagggatattttgggtctcaaaatagctagacatgccccatcaattagccacttatttttcgcagatgacagtttgctcatgtttaaagcttcagagagaactttagtatcaatacaaaaaaaaattcagcctgtatgctgattgttctggacaggtataaattatttacaaaatttatggagatattttttaagctttagtaatatattataaaatattggtttactgttttgtagatgattaattacaccaaatcactgcttttgttttcttctaatactcctgaaggaattagagtacaatatgtctcctctcttgcaatgacgatgacagaagagattttgggattgccaatggtggttggaagaaataaaaaagctatatttcgaccaattaaaggtaaaatttggtcaaaactaaattcatggcatacaaaattattctcacaagtaggaaaataaattcttttaagcagttgttcaatctatgcctatgtattatatgtcgtgtttcattataccagaaggaacttgtgaggaaatagagaaattaatggctagatattggtgggg

SEQ ID NO: 144195 - DNA, 593 bp, Cannabis sativa
  modified_base (27)..(33): a, c, t, g, unknown or other
aaaatagattacattgaaatggagttnnnnnnngggcataaaacccaacaattttgcccttaggtcatttagtgtggtatgttttggctaaagggtaaaattaaaattttagacttttaattaagtggctgaagggtgtgtggtgttatttttaattttttttttgaatcaaatgtttcaatcattaacatgcaatcatcagaagtaatgcaataccttgttatttttttgtttagatttgattgggagctccgatcaacaatttttcaactcattcttgtatgatctgcaacaatttaaaaacaattatacgatttttagtataaatctttttttgttaatgttgtgttcattactctgttttttcatacctctttttagaataattttggatttagtagggagttgcgatcatcatcaattttttaactcatttgtagtatgaactgcaacaattaaacaacaattatatgttttggactgcgatattaatgtatctatttcgaattttgtggctctgatgtttaatacctgtttcaatttgaatttgaatttagtagggagctccgatcaacaatgtctcatctatttat

SEQ ID NO: 144196 - DNA, 689 bp, Cannabis sativa
  modified_base (655)..(658): a, c, t, g, unknown or other
acataaaaaccacattcttagtttttcggttgtcttggacaatttgctagtgaaattcctagccacgggccaagatacgcatttgttgcccctataaatcagtatgctctgtttgaaaaattatattagcatttcaattcattagttaattaaatattttgttacataaatagtcattaaattattaacttcccaatatttgagtaatttgttcgggaacttggtggtcacgtatagggtctaaatagataattttctttggcgaaatgacctctagcatccagtacgtactagaaaattatatagggatataagtaagatagcataaaaataatttgaagtcacaatatagaaatgaacaattagcactaaagaattaaatagtgtttacccgatattccaaggaaaaaagaacatttggtggttgttattcatcgacgataaccaagcagccaatcgtcttgctgcattgtcaaaagacagactcttctcttcatcgttgataccattcactgcgagaagctctaggtcgtaaaacttgaaaatttttctcaaatcgttgatgctctcccagatgttcctgcattaaattgttgagtagtagtgtcttataataatttgactagaatttgatatataaggttaattagattannnnagagtatacatcattccaaacaacattccct

SEQ ID NO: 144197 - DNA, 526 bp, Cannabis sativa
gtctcattttctctcttctctgtttcttcttctttctctatcttgctccattgttttctctctctggtgttaagctatgagtagaagaactaacaatcctaatacaccttcacccatatatgtaagaaacaaaataatattaataatataaactttttttttttaaattaacatatcaaacactattattattaataaatttttgtttcttacattcacataccacatcaatatttcattttatatgttgtaggttctttcttgtattttaatacatatatttgaatttattattaattgcttatataatatgatatattgtagcatctccaatgggattgtttattggaatgtcttgtcacattatatatacaatgtggtataatttttaagattaattttatgtataaatgtatagagtgttgctgaatatagaccaagctatatgacttttttttttttttttttttttttgagaaaatttttccaaactatttatttttgtaaactttgattttattgggta

SEQ ID NO: 144198 - DNA, 1200 bp, Cannabis sativa
  modified_base (177)..(177): a, c, t, g, unknown or other
  modified_base (611)..(614): a, c, t, g, unknown or other
ttgtcacttacattactgcttgccaatcgagctaacgcatctacaattatgttttcttctcttggaatttgtctgagaccgtagcttttgaattgtgcaaggaaatattataatttgctcagatatgctatcatcttttctccctgagcctcgtattctccggatacatgatttacnaccagctgtgaatcactacagatttcaatgtgttcggctttcatctatcgggctagttttaggccagcaattagagcttcatacaaggcttcgttattagatgctttgaacccaaacttaactgcagcatgtaggtgttgcccccaggcgtgacaagggaaattcctgcaccagatagctgatctgtagctgacccttctacatgtagtttccaggtcagcttatcttcactgttacttggctgaggtgtttgtaccagcttggggttgctttgtggtatgctttcttccttgcctgtgcattctaccaaaaagtttgctaaggcttgacctttgattgctgttcggggttggaaagtaatttcgtattggcccaactccaccgcccacttgagtagccgtccagaagcatctggcttttgcaatatttggcgnnnnggttggtcagtgtacacccgaataggatgagcttgaaaataaggccttaactttcttgttgttagaataaggcaataagcgagtttctctatcaatgggcatcgaccttcgggctcaatgagtcttttactgatgtaatagactgggtgctgtatgctattctcttctctaattagcacgacactcacaacatgcttcgtgacagctaagtatactgcaagttcttctccatccagaggttttgagagtacgagaggttttgcaagctatgcttttagctcttggaaagctttttcacattcctccatccacttgaattgcttgtttcctcccaggatattgaagaatgggacacacttgtctgttgattttgaaatgaatctgctgagtgcggcgatccgacaagtcaaactttgcacttccttggttttagttggcaacttcatatccaggagggcttgaatcttctttggattggctttaattccccgtgcattaacaatgaagcccagaaactttctcaagctaactccaaatgagcactttaagggatttagtttcatgttgtactttctgaggaccttga

SEQ ID NO: 144199 - DNA, 1258 bp, Cannabis sativa
tgtaatattttgtaaaataatttttgggatcccgaaacatgtaacttttgtttgtaaggttaaaattattacaagtttgttttcattccattttcgtttaaaatttaatttccatgcttattttattagtaatcccgtttaggggattaagatttcttaatcatctttggtagcgtgcctaaatgttagggcgttacaatatgtgtcccaacttagaatctttctttgattatcaagaaaccaataatggtggtagagtactaatgggtaatgatgtttcttgcagggttgttggaattggtaaggtggctataaggtaattcaatggtgaagtgaggattctgcataatgtgaggcacatttcagaattgaggaggaatctgatatcacttggaaccttggaagatgaaggttatggctataagtccttgaatgggagcttaaggatcacaaaaggttcaatgcttgtgatgaaaggaaagagagtacatgggttgtatgtactcgagggtgaaactgtacctgtggccgaggtagatacaataaaaggtttagaaagtgatatgcagatatggcattaaaggcttaggcatatgagtgaataaggcatgggggaattgcacaagaagggagtcattgaaaagcttcagacatgtccattaccattttgtgagactcgtgtttatggcaagcaatacatgatcaagtttacaacagaaactcacaacacaaagggattcctagagtatgtgcatgctgacctttgggagtcaagtagaatccaaagacattcacgtgaatactacttcttatctattattgatgatttcagtagatgtgtttggacctatttacttaaaaccaaagataagtgtctagaagaatttaagatatggaaagctcaggtggaaaataaaacaaatttaaaggttaagacacttagaaccaataatggtctggaattcatcaacactgagtttgataggttttgtaatgagcatgggataactaggcataggacagttgtgaaaacttcacaacagaatggagttgctgagagtatgaatagaacccttttgaacaaagtgagatgtttacttcttagtttagggttggaaagccttattggggagaggttttagctactgcttgttaccttgttaataggagtcctaatagagtcatagacttgaagacaccttatgagatgtggtatgggaagataccaaacctaaaacacttgagagtgtttggatgt

SEQ ID NO: 144200 - DNA, 683 bp, Cannabis sativa
catttatggaaacatgtttttattacattctttatattgtgtttcctttatttttggcaatttttttgtgttttaggaaacttgttcttaaataattaattattttgtggtctcctcttttggtggcaatttcgcattaggttgggtttttagttcttagattttgtggggatatgttgtttctcttttccatttaaggaaaccttgaccaatttttgaaaaatctttttggtttcccttttttctctccccacgtggtgtttaaggtaaggaagttactttcctttttcatttttttttttgcttattgggtaattaaaattgaaatgttatatatactcaactaccctctcactcacgatcaccactctctcatctcttcttatttttttcaaaagcctaatttttttttcaagtgtgagagtgtgtttatgttctaggtttcaaagagaaatggcaaaaacaaagaatgctcaaccgtccaagaagccctctcgtggcgctacttttgtatctctgatcaccccacttgcgccgcctgctccagtgaccagagttcctggttcttcttctgctccgacgaaatcttccagaaagtcgaagacccatgctcgaaaatcaacctacaatctcgcctctccaccagtcattgcttctccgattgctactccaacacctgggtt

SEQ ID NO: 144201 - DNA, 844 bp, Cannabis sativa
tggagtcgtcactagccccttcgattatcgtgtaatcaccttaaacgaggcttacgatgtctgacatgtcctcttatgggcgttccctgacgcttttcccatgatgcattaaatgcgaggtgactgttcgaataggctcttcttctcccgaagatgccttaccatattcctagctcccgaagaggaagggcatgcttcttgtacttctctgagggctcactccccgaactacacttattcttctgtatacgactcttacctaattccgggtgaggtgtccttttgttccacatgtcttacgtagccgtggccatgtattttgggaaaaacccgaggcaacacatacaatatggagcaaaaataacaaagagaatcaaaaactaaaaactagagagaaagaaggaaacgaaaaaattaaagagacaaaaacgcaataaaaattgttagaattttgggataagatgaatggggttccaactcaaaaccaattggcaatgggaggagtagcccattcatcttatatatgaaaatttatttccacgcattagcaatgtgggactaactctaatacaccctcctcacgtttgggcgtggaaagtgtgggtataactaacgacctttaagagaccacgaggtcgaacgtgacatttgaaagaatttctgaaggccaaatatcgagaaatttgtgggtgtacacgtcaaaaaatttgtgaattttgaaacaggtcaaagacccaacactggaaactggcaaacattggcagataggtcccaaatggaggttaaaggggagacagcggaagtatctgtttggaccggcggcactttggctcacaacggatca

SEQ ID NO: 144202 - DNA, 711 bp, Cannabis sativa
caaaaaccatctagtaaccattgtgggtacggctgcccacctcttttatccgcctgagacgttacattgttcaaatcaccgataatacaccaaggtagaggagagtcagactttaaagcacgaatttgatcccaagttctagcacgaaacgatctattaggctcaccattaaaccccgtaagcctccaaggtgcttctctagccgtggttatttttaaatcaatataattcaaagaataacccaacaaaacaacttcatcactaaaccggcacaacaacgcaacaccaccactatgaccacgagcatcactagccatcatgccctcaaaaccgatagccactctaagcttttccaccaaattcttttgacataacgtttcacaaagaaaaacaagattgggtcgcttctggataacaagatccgaaatgaattgaaaagcccatgggttcccaagcccccggcaattccagcttagtatattcataatgagcggtgggcctgggaaccagtacccaccaaaagcccattttttgagccttcttcagtatcatcatcacacactagaatatccatattttcgctattttgcaggcccactccatcgggcccaatagaaaccacttcattagtccttcttcttttagtatcaacaacaagcaaaggagaagcctcacttgtttccataacagtccccacgtgaataggatcag

SEQ ID NO: 144203 - DNA, 529 bp, Cannabis sativa
  modified_base (26)..(33): a, c, t, g, unknown or other
ctctttctctcttcatcttcttcttnnnnnnnntcatctactttatattattttataacaactataatattaataggtgtactcacttattgataaaaaaatatgaaagaaatagtagaagaagaaaagaaaagtaataagcaattgtcttattttatttaccttttacttgtatacatttaatttaaaaagttaattcacatccaaaaaataattaaattttattttattttaattaaaatttggtatatattatttttagtaaaactatatacatatattatgtatgttgatttattattaattttatttatttatatatatactttattttataaatatttatatatatcataaaattttaaaatatttttgggggccatggccactcttctcttggatgtggttccgccccagattgttgttgtatcttcttcttctatcttttatatatatataatatatatagtgtatatatgtgtgttgtaatatatttttaatcaaactcttattttaatttttgtattat

SEQ ID NO: 144204 - DNA, 541 bp, Cannabis sativa
actctcaagataagaaaattaagtatagttcttagattaattatgctagtatatgactgttctatttctaatatgcagttaagaaaaagccactactactgaaggtattcaacaattagggctcactggtacaccatattttattgtataatatagtattatagtagattatattggtattatttaatacaatattatattctatattgacttgtatttataaattgtgtaaaattataatgtctcagtattagtaggttgtataaaactatactatctcagtatctttatcataaaactcgctcccaaccctcgacctagatcccatccagctcgaacggcgtgggccaaacttggactccatcccagacctcagaccaaggttcaagtttgtgcatccgaggtttggatccgagtaaaggtccaagtttaggtcggtgttcggggtccgggtctctggggcctagggtctggggtgtgtggtctattgttaggggcaagaccctcaaaccttttctaaaatattataattaattattta

SEQ ID NO: 144205 - DNA, 814 bp, Cannabis sativa
gaactttattgattattatagttatctatgaatgtttcatttttaatcccagtattgttcttctcaagtggctataattttttttaacagatttaatataggaagatcaacttttactcttaatgattttctattggtatgtatgtcgtaaacgcaactatttacctagagttaaagataatacatcaactttatctggtgcaagatacactatagagttgttatatgactcaaattgacaatgcatagagttgatggcgttgatgcagatatctcgtgaagcatttgttcttttgtgcaatcattttagctagacagaaagaatggattaaagatagtaagcatgtatcggttgagaaaaaaaatagcaatatttttaaccatcatagcacataatgagcgatttgttgtcatgaagcgaagatttcaacactcttgacaaactgttcacaagtattttcatgaggttcttgaagcaatgatgcattttgcaaaagagatgatagtacccacagttgatcttgattccaatattccaactgctcaaaaaaaatattagaaaaattttcaaggtattgtatttttaaatcatgattgtataagtaaaatatgtgttataaatatttgaacttataaatttattgcaggggaaattgtgcacttgatggaacactagtgcatattataatcccagttgataaacaaactgcttatagaggaagaggaaagggtaactgctaccaaaatgttctagcaatatgtgacttcaacatggtctttacttatgtttatgcaggatgggaaggagtagcac

SEQ ID NO: 144206 - DNA, 1040 bp, Cannabis sativa
actcggacccgggacccaaaatcggaacaagaatcggaatcaggaccttggaataggaattggacctggacgcagaaccaaatctagacgcagaaccgtacacggactcaaacccagactgggatcgatacccggacccagacttgcgccaggacctgcgacacagaacctggaacccaggacccatgacccgtgacctgcactagaatccagacccgtactagaattcagacccaaacactgacccagacccagacctagacaaggacctggacccatacccggatcgaaatccaaacccagacccagactggaacctagagctagactcttactagaactcagacacgaacccaagactcagactcaaacttaggactcagattggactgagattaggactgggacccaaacccaaacaaggaccgagccctgaacctggacagggagtagagctcggatttggactgggatccgagattgggatcgggacccgggaccgggacccgggacctgagactcggaccaaggacatgaaaattgaaccgtgacctagatgggggacctagcccccaaacccgaacctggatgcaaacatggaccaaggatctagacctagatgggggacttggacccaaaactgggcccgagaaccgggaccgagaaccaaaactcgaccccaaactcgagacacatgacctgaccttggacccagaacctattacctgactatagggacacaaccccaaacctggacccaaacccaaaattaggactcagcccgagacccaggtcccaaactagaataagaccgggatccaagaccgaaatcggaatctagacctgaggctttgacctgacccgtagttagtctgagcttgaatttgttgatattttgctcaagttttgagcctatattgtatattgtgtaaatctaattttgatgcatgtgagctttgattttgagctttaaatgtgtgtattagctctctgttatgttaattatattgtgtgggaaatgattttgagatatatgcatg

SEQ ID NO: 144207 - DNA, 840 bp, Cannabis sativa
tcccatccccatctccattcccatctccattgcaattcccattcccattcccttcgcattcccattcccattctccagcccagtcctattcccattcccatcccccagcccattcacattcccattaatattcctattcccattcccattgctgttcgcattcccatttgcattcacattcctattcccattcccatttccattccaattcccattccctagcctattccaattcccattctaattgctattcacattcccattcccattcccattcccattcctattccctgacccattcccattcccattccattccaattcccattcccatccccattccaaatcccattcccattcccatccctattcccattccctggcccattcccattcccattccctttgcattcccattcccattccccgacccactcctattcccattcccattcctattcccattcgcattcgctttcctattctcattccaattcccattccaattcacatttccattcccattccgtagcccattcccatttatattcccattcctattcccattctcattgctattcacattcccattccctagccaattcccattccaatacccattcccatcccaattctcaatcccattccaattagcattgccattcccatttaccaacctatttccattcccattcacattgcttttcctatttgcattcacattcccattcgcattctatggcatgtttactaataggtaatgggaatcaatagtaaggtaatcattcccttacatttgtttacttgcattattaaaattaggaaagggagaagttgatt

SEQ ID NO: 144208 - DNA, 522 bp, Cannabis sativa
  modified_base (241)..(242): a, c, t, g, unknown or other
agggtttcattttcagacatcctaagctcatcaaatttggtttgaagcataataaatctagaacgcttaacatcagatgttccttcaaactgagttttgacggatctgccaagcttctttagcagattcacaagatgatataagcttattataaccttcacatacttcataaaaaataacatgtaaagctttgttattgtaagatgaaaattttatcatcttcaatagaccattccaattnngattttattttagaattaccttcggaatctgtctcaacaggagaagaccaacctgatagaaccatcctccaagctttctcattttgagatttgatgaaagccatcattctaattttccaataaggataattagaatcatcgagcaatggtggtctagatttcaaacttccttccgtaaaaaattatattttacacaaaaacacatgaaactgttaaaaggaccacactaagggtgcgtttgggatggcttttaagaaagctagaagcacttttttaaaaa

SEQ ID NO: 144209 - DNA, 620 bp, Cannabis sativa
cttagcaattggcttcccaactcaaacaagactgtggtgtctcaagatgtggcctcattcctctttcgtatcacctcaggagcatccatcgacttggtctcccacattttgaatcagattatttcatttcgaagaggtaaaaaccgcacttttaagcttgtgtttccaaatttaatctttaagattttttcctctcagaaagatgtggcccaatctcatgaaactcttgagccttctctgactggaaccatttttcaacccttggagtattttgatggagcttttacaaagcgtcctaaagttggtgctgctactgctagtggtgcaagttcgagttctgcttctgcagatgttcaggaattgaagaatgaggttcagcttgtgaacaatcgacttgctgccatggaggcggttcggcaagagatgtccaagcagctgtccacattgatcaagctttatggggcctaagttttttctttcttttttgtttttgatagacatatttctatattttcatttctttttgtctttggcccttagataaacaaaaagggggagtaatatttgttttttaactgtttgtttttatcaactcaggaccctttttccaaggggagttg

SEQ ID NO: 144210 - DNA, 525 bp, Cannabis sativa
gattttaaagatcaggccttgaaagaggccaaaagagatgagctcctgaccctagtcgtctgcaagcactgcgtcaagcgctttgacgatggcgtctatatggcctggaagtcgaatggctagaacatcaaacttgacttctatcccaagcctgaggaagccctcgctaagttccgggagaagaagaggaggcttgatgctttgctcgaagaacgccggggccctcgtcttcctcctcgtattgaataggccgagcagtacaaccaatttcaccatgacaaccatatattttttttttcttttacatttacagtctcttttctttcccttcaaacaatttaaattatatcttctaaggggagacagttattatggtcgtccccatgcgcttagtatattttttcttggatacttttgggtcaggatatttcaatatatattttcactttgatatatattctgcttgattttgtttttacttttggcctgttttatatttgcccgtgtggtatgccttagtacccc

SEQ ID NO: 144211 - DNA, 1149 bp, Cannabis sativa
  modified_base (54)..(58): a, c, t, g, unknown or other
agttaggtctatgaactcggtaggaattaaaattgccaacataatgtctcatgnnnnnttgcaaagtggtggttacgagagaatgccatgtcaatttgagaagtgtacaatagggttgttggtgccaaacaagaagaaaagatagagatagaatcataaggggcaaagatttcttgattgtctctcagagaaggacccaaatttctttattttctatcaggtggatgaggacaatcgattggctaacttattttgggcagatggaaactcacgtgtggactatgtggctttcaggaatgtactagggtttgatacaacttacatgacaaatgaatacaataagcctctcactgttcttattggcctcaaccaccatttaaacacatgcatttttgggtttgctatcctcctccacgagaagcttgcatcttatccttggctacttaaaaaatttcttgaatgccatggacataagaagctaaatgttgtagttactgaccaagatgtggccataaaagaaccctcatggaacacatgccagatgttattacacactgtctatgctcttggcatctcaaaacaaatgcttccaaacaagttaaatattcgatcttcttaaaaacttttaaagatatgatgtacaactactacacggaggaagaatttgaagcaaaatggttagatgttattgataggcttcaactaacagataatgaatggtgccaaacaatatttgatacaagaaaaccgtggtagaaacttatttaaggggctcattcgtcgcaggaatgagaacgacacaatgttgtgaatcgatcaactgcgctctaaaaaagttttagagaagaattattggttgcgtgaatttgtcacaaccatagatatgatagtctcaaagctcagacacaataagactgcaaatgacttcaaaagcaaatgcactcaacctcacccacctgatcttacatgcttgaccaagtactataaccaatgtgctgaattctacacaagaaatatgtatcacaaggttgttgagcagcttgctttgaagaataattattttgtcttaggtcatgaggacaaaggagagttgcagatattcaatattggaaagtttcagcatccgaaagtataatacgaagttcatta

SEQ ID NO: 144212 - DNA, 613 bp, Cannabis sativa
  modified_base (284)..(285): a, c, t, g, unknown or other
  modified_base (565)..(573): a, c, t, g, unknown or other
agattctacacaaaattctacccaaaattagcttttgtttcaatgaaaaacgatttttgaatcaaaagatatgaagaaaataagtttgcacgcgcggaagcatggatttggccgagacagaggctacaagcagtctcatttgaccaagggaaacgggctggacaagagcaattttgtctgagcgagcctgttgtctgaagcgactttgttcgagcgagcctcacttgtgcccatgcgcgcgcgtgtgtgcattcaaattctgatattttcgttcaacttcaaannatcataactaattcataaaaatccaaattaggttctgtaaaaacctaaatttattaatttttcgtctacttttcagaaaaaataattccagatcgaaatcaaaaatatttcagtaacatacattacgatttctaaactatcatcacataagcacataaaccacatgaaaaccatcaaaatcaatacaaatcatcgttttaattcatatttcacgaaagttaatcattaccttggctttgaggccaattgttggaatatgttttactaggatctagatttnnnnnnnnntatgtttcattaacatcctagtatgaatttttagaagaat

SEQ ID NO: 144213 - DNA, 503 bp, Cannabis sativa
tctttaactactttcattctcaatgtaccttattatgccataagcttttaattaagtttgggggaaatgaagtgttttgagtgggcaatattttggaagagatttaaaaaaaaaattatgtgaagtgtctttaccatctatagaaaagaagaagaaaaaaaaaaggaaaaaaaaaaagtaataaatttgataatttttgttgaaaagaaaaaaagaaaagaaaaaaaaaagaaaaatgatggtaggtacgtaaagagtaaagtgcaatctcttacccgtttctttgggataaaagaatggatactggtgggtgcttgtttggtatgttttgcttatggtataatgtagcctaaatgacttctcatctaccctttttacctaagccacgacattgtaaccagcaaagaccttttgattccgagcaagggttgttgatattagtggagagaggtatgtcatgtaagcttattgaacattggttggcagaatgttggaaagagtag

SEQ ID NO: 144214 - DNA, 773 bp, Cannabis sativa
aattttatttgataattaattctaattattaaataaatagttttgacatttataggattaaaattagaaaatgtgccattactgaaataaaagataaatggttgaaaaatagcaaaattataactagtggggcccatctcaatggtcaaccactatatgctttattttgccattattttatcattttttattccatataatttaaatcctaaccctaagttaaatagtatgaaaagaataggatgctttcattttttatccagtgcatttaacctagtttacattgtaacggataactagagtttttgagatgcctcaattcctttactaatttcgaaatcctctttctatctctctcttcatatttttcgagcctatagtgaaagagtacatgcccactcatagcaagtcaagtactcaatgatattgtgtaagactatgaagaatccaacacttgaaggagaatcgagctcatatcttaataatacagattagaacaagggttagagatctgagcgggaggagacatattattcttctgccaccaatgtaaggtttcttaaacattatatgtatttaattacattattttagagaattcatatttagggtgctaatcaatatacttgtaagtaaatctagttcctgataaaatatatttcaatatctggcatcagagccatggtaataatttactttcaagaaatatagatttaaaacgatgaatgtttgatttggatgtgattcaggttgatatatgtgtttatttgatg

SEQ ID NO: 144215 - DNA, 520 bp, Cannabis sativa
tggaagcaaaattacacatattaacttaagaaaatagaagaaaatagagaagaaaaaaatgctgaaaattctctgaagaatgcctccagtattgacttaggtctctgaaattcatgctctatattctgttgtttatttccctctgaattgcctccctgaaatcaactacagttcaccctttatataggctttcagggactaaaaagatataaaaacgcatatgttaaatgcctattcgaattaggaaaccaccaaagctcaggtgagagaaaaagacgatttttgtgcagtttagggaggcgggccgcggccccaagaaggttgggccgcagcccgtgttggattttcaccagatggcttcgtttcgatggtaatttttccactgcgtcgactgatagtattttagccataactctctcgatattgctcggaatcggaatatggaactttcatgtttagacttttttccaaaatctaatcagaacatagtcgaattcaggcttgaagtttcagctttatt

SEQ ID NO: 144216 - DNA, 865 bp, Cannabis sativa
ggggtcggggtccgggtctatgtttaggtccaggttcgagtctgtgttcaggtccgggtttgggtcctgggtccaggttcgggcgccgggtccgggtccgagtctcgggtttgggtctaggtctaggtccaaggtttgggttcaagttcaggttcgggtcccgggtccgggttcggggttcgggtatgtgtccaggttcgagtctgggtctgagttcgggtccgagtcttgggtccgagtctgggtccaggtttgggccctagattcaggttcgagtccccagttggggtcccagtctagggtgtggtccaggtctgggtcccgggtttaggttcgagctcgggtttgggtcttgggtccgggttcggttcagagattggtgttgacagtgaatcctttgtaaatattgtaatacaagttaatacggaccatttgttatgtaataaataatacaacatgcattgtattaaaaattttggtcgtaataattaataccatacattgctttatccaaacatagtgttatttattatttaatacagtaagacccttatggattagattaagtgtagattatactagttatgttgaactctagaaacatttagatttgtttgtgaaatttcgtattttacaactctataactccagagaaacccagaaaaacaaacagtgcataaaagtaaaaacacacaagattttttaacgtcgtttcaacaatcctttcaaattgttactagtccacgaggccacgcccacaacgaagattcattagatcggtatcaaaaaatacaaagtaattgacttatgcataaatagactccctcttattgtatgccgcaagcttgatgtattccacctacta

SEQ ID NO: 144217 - DNA, 631 bp, Cannabis sativa
tatcatcaaatttttaactaaaataacattttgttaatttttttaaaaaagggacatttattaacttaattgttagatttagggtcattttgcatcttgacccgttgtactttttgagcttgtcgtgtgtcatgattttcgagctagcctatttgtgcttacgtattgtgcctttcgtgcttctcatgccatgcttaaagacatatttttcgtgtcatgtcgtgttaatttgtagcatcaggtcgtgtcgtactcaaatccatatttttttgtacctagtcgtgctcgtaccttccgagtttgtggcgattttatattgtgtcaaaaaatctaacccgtatttacaacactagctcaaattagctcatttaattaaagtgctctaagctggtaataacatctctgacaagggttgcttgttgttgaatgcttggagaaaaaacaaactaaaaagtggcacttatgccaatttttggtattagtgtcatcctccttttttattttttaaataaaattaaaataattgatatattgaataagatcattgctattaggcaccagtggtacctagtactttctcgacatgtcacgttgcgattggctagtagtactccctaaaagctattatatt

SEQ ID NO: 144218 - DNA, 751 bp, Cannabis sativa
  modified_base (36)..(38): a, c, t, g, unknown or other
ttacagaaaatacggtatttttatattgtactcttnnnaatttattgttgattttttgttacatatatgttactttttgttgttgctttgactttatttagatttattttcatattacttttatgtagttttcttgatgttttcgtgttgtttctataaaaaaccgtaaaattgttaaaaaaatatatttaaacgtaaaaatgtaatttttttttacataaaatagtgccttatgtaattatcccttaaaaatattggcacgacatgacacaacttatattattttgtgtcacgtgacgacacgacctattttttaaaaagcatggataaatataggttgggtcagcacgacacgcatgaatttacagcactacgacaaacgataaagatataagtacacccaatattaaaaaatcaactcaaaataatttttaaaaataatttttaataatttttaaatttcttttttagatgtatattttatataaaataaaaattattaaaatgaaatatatttataattttatcgagtataataaaattctcctttaatataaatattctaaaaatgtaggttctaattaaatttttaatggaaaaaaaaaaaggtaggattcaaaaacttcaactcttacctatatataattatagggtaatactatgtaggacctagcaaaagttccctactggtaggaaacttttttttttaccgttgattttagatcttgtggttattatgatgtaaggtata

SEQ ID NO: 144219 - DNA, 777 bp, Cannabis sativa
aactggcctcagagccatagtaatcatttactttcaagaaatatggatttaaaacgatgtttgtgtaatttggatgtgattcatgttgatctatgtggttattgatcattgtttgatgtttgcaaaatttttacgtaaaataattagaatttctttctagaattaattttcatggataatatagaaaaaaattaagcaattcattttttacagaacctaatttcgattttatttgaattagttataatattatgaaaatttgaaaaatatcagtggtggtgacaccccattagcgcgtggataccccgtgtcactcggggtgcacgcgagtttggacaacaagctatccgagaaccctcgcccatcaaggcaatttttgtctaaacaaaggggccatgcacgtgtgggaatgctccatgcagcgtccctgtgcgtttcctcggccagccttcccttagcacgtgcgcggatggtatgcaatgcatgccattcgcaccaaatgcaaatttttccaattttttcacgatttttcaaggaaataatttctaattttttgtgtaattttgcatttagatttttatttttaaaatctcaaatgtaattatcagaataaaattaattaattttagatattagtagattttgaacctgaaaatggataaaatctaattttttgcttaatttgttattattttttttaaatttgattatttatcttatttttaaatataaggtcagatattttatatttttcattatttaattaattttataaaa

SEQ ID NO: 144220 - DNA, 1077 bp, Cannabis sativa
  modified_base (558)..(559): a, c, t, g, unknown or other
ttttgcctatctcaggtgtccttccttgggcacattgttagcaaagatgggatcaaggtggatccaggaaagatagaattcgtcagggattggccaagaccaaaaacagtgaaaaaaatttgaagcttcttgggtctagctggttattatcgtcagttcgttgaaggattctctaaaatttcaacacccttaaccgagctcactaaaaagaatcaacattttgtatggaaagataagtgtgaagcaagttttcaggagctgaaacagaggttaatcacagctccagtgttaccccaaccttctgacaaggagaagttcgtggtttattgtgatgcttccagacagggtctggggtgtgtactgatgcaggtcgatcgggttattgcctatgcctctcgtcagttgaaagattatgaacagcggtacccaactcatgacctaaaaattctcgcggtagtgtttgctttgaagatatggcggcattatctctaaggagagagatgtgaaatttatactgaccataaaagtctcaattatttctttactcagaaagatttnnatatgagacagaggcgttggttagagttggttaaggattacgattgtgagatcctttaccatcttggaaagccaatgtagtggctgatgccctgagcaggaaaggtccccggcaggtaacaagtattgttcagatttcacctcaattagctgaggacgtggtcagatcaagtatcgagtttgttgtaggcaaacttcataacttgacgctacaatctgatctgttagaaagtattaaagctgctcagttaactgattcagagttagtaaagatcagagaagaggtttcagctggtcaagccaaggactttatagtgttagatagtgggatgctgttgtttaagactagggtttgtgttccttgtagcgtggaacttagaaatgaaattctcgaagaggctcataccactccatattccctgcatcccggtaccaccaagatgtatcaagatcttaaaccctactctggtggaacgggatgaagaatgtgtagaattcgtatcgagatgcctaacctgt

SEQ ID NO: 144221 - DNA, 632 bp, Cannabis sativa
gattcaaataacttatttcacacatgtgtgaaacagaccgtttgaaccttgtttgcagcgcgttaaatttttctaaatttttcaaaaatttatagaatatcttacatgactatattgtacactatcgtattggataaatattatgtttggtgtgattataaaaaaaaaattacattgtacgctatcatataaaaaaaaaaaaaaaactatctaaatatcgaacgtgagggaaaagtgttggaatgtagggacatttgaaaggaaactttatgtgggaatgtagtgggtcccacaaacttttaagggagatgttgaagaatactctctttttttatacattaaccaaatttaccttcaaataaagtttaattcaaatatacttctttttatgagtattgcacttaaattttcctcacacactcacataactaagacataattttaaatataatagatttgtgttctttgtaaatggatgtgtaggtttctgaaaaagttgggagaaaatttgaattagagaagaataaaaactatcatgaagtgataggggtaaaattggtagaatgattgaaaaaagagataaacataatagattttgaaaaagagagaaaattaaaaatatcaagttaaaa

SEQ ID NO: 144222 - DNA, 780 bp, Cannabis sativa
  modified_base (719)..(724): a, c, t, g, unknown or other
aacatagcatacattagacttccaactgctgaagtataaggaacctttctcatgtcttttatctcttgggggtcattgggacactattccttagatagacggataccaggactaaaaggcataactgctcctttggtgtcactcatgaaaaatcgctctagcaccttatcaatgtaagctgcttgcgagagagcaagtgattttttcttcttgtttctaataatttgaataccaagaacataactagcttcacccaaacttttattttgaactgagtgttaagccatttgtgaatgtcagtcattttcttgatattgttgccaataatcaaaatgtcatcaacataaaggattaggaatactaccacttgattatccttgagttggtagtattaaatttataaatattaatgcttaataattaattaaaacatatatttattaatttaaaaattatatgcacacataacacaaaaaaaaattcaaaaaaattaaaaaaatttaaaaaaaaattcataactatctacctaattatctataaccttaattataattctatattaactattttcaattattaattgataaaaaaatcataaatattataaaatatatattgtattaactcattaaatatattaatctatacctatttataaaacttatacttattaaatgtattaatccatatagatagtgactattcaatggttacatttnnnnnntaaccatatggttacattttcttttacctgtaatagcaggttactaataggtagac

SEQ ID NO: 144223 - DNA, 1272 bp, Cannabis sativa
  modified_base (158)..(158): a, c, t, g, unknown or other
tttgtaataaattgtgtaaattggatttttgttgtaaaaatttcttaattttttgcggtaataatacttaagttataattatagaacttctgtagctacctagttggtaagtattaagtaaattaccatgtagaaattcctaattggtccaagtcatnaaatttttattttttaaaaaaatagttttaatataccaataaaaaatgatacgtggataatgacttactatttaaagggaaccaaacattcaatctgttaggaaagttaggattttataattgtagatcatgttcccaacaatctatattattagatttctaaaatataagttgtaagaatcatcttctctaagaaactttaatgagtgaatcaaataaactaataacatgagcatgagttcatgattactcgggattcaagtcgatctattattgatcatttttatgatatgaattaggtttttataataaacgttatgtttgataaagaaaaattaatttcatatcgacctatgtcatattgtaacgccctattgcttaggccccccacagtgattttttacttactgtgcactccttagctagtcagagagtttcttaacaatcgtgttaaatttaaatttttaattaaactttaaactttataaatatatatatgtctgtacaaaaagttggaatcccgtctttaaaattaacattcatcttcaatatacactttatagacatgtcgctctacgactacaaaatgtaggccaaagtcgtcccaagattgaactctccaagtgtaaccatcttgatatgtagaatcatctccgagctctggactcatcggtactcaaccttagcctttcttttacctacacatgcaaacaatatctgtaagtcaacatactcagtaaaaaaagcataaagcataaaacatataacataatactaatttgtatctagccgtccatacacatatttacaagattttagatgcatcaagaacgttcttaacagatgtacgacctctgtatcacatgcactaagtactcatcccatactagtgttggtagggctaaactgtaccccaattccaatgagtggtgtaccacatgcactatgtactcgtctcatactagtgttggtaacattgtcacatactctttgaacatcatatactataccaatgcactctataccgctaccgtattaatgttagtagtatacgaatcacatacacaacacataatttgttggaaaattgttgtgctccaatagaaatatcaaa

SEQ ID NO: 144224 - DNA, 548 bp, Cannabis sativa
  modified_base (502)..(504): a, c, t, g, unknown or other
aattcaaataaatcatcataatttaataattaagcataaataaataattctcataattaactcctaattatctgctaatttctaaattaaagctaagcggcctttacaaaaacttaccaacaatatcaaacatttgagaacatcaagattattaaaatacttcaagtttatataattaatattttgatattctttaagactaatattcttaataattaatttaactattaaattattatttttcttaatgtttatttttatttgtattgtcttttaaattttataattatgttctttttattttatttaatattagtattttatttaattttatatttttaaattaattatttttataataaattttaattttcaaattaaaatataaaattattttttaaaataaaataaaataatagttcaaatgtaaagaaaaagttttaatgtaaatttaaaatctaagggctcgtttggtacgtcgtataagggtcgtattgtattnnntaataaataacactatgtttagattaagcaatgtattgtattaa

SEQ ID NO: 144225 - DNA, 517 bp, Cannabis sativa
cttgtatctaaatagtatgttttattcacaagtaatattttgttgtaactaaaaattacatttagtcaaaaattatattgtgactaaaaagattgtaattaaaggtagcaatttttttgtaatggtatagtaagatatacgtagtattattgtaaaatgtaatattttatgaaacaaaaaagtgatattattgtaatatgtgaaatatggtattattgtaaaatgtgatattttatgaaacaaaaagtcccactaaaagttaataataataacaaaacattggaataagaataagtggtatatctataactctattaaaagagagaatgttgtttttgggctttcttaaagtaaatgacaaaaatgtcattaattttcttgattaattattattaaattcttctatttttttttttttttgagagagagagagaattaaatccttctatttaaggggtaagttaaaaaataccccttttattaatcgattaatcaaatttgcctctaattttatatt

SEQ ID NO: 144226 - DNA, 1280 bp, Cannabis sativa
  modified_base (891)..(897): a, c, t, g, unknown or other
agtcatgcagcttcttcttgagtaacacatctgagcaatggcattgagaattctcttctatacaaaattccctttactatgatataccgtgcagcctttcttctcattttcgatcttcattctgattatctgagagtttcccagtgttgatgtaggctgctattggtgtcatccagtgatgctaggctcttcgaggaactggataggaaccaagttcgccttgtcacttacattactgcttgcaaatcgagctaacacgtctgcagttgtgctttcttcccttggaatttgtctgagaccgtagcttttgaattgtgcgagcagatcatgtatttttctcagatatgctatcatcttctctccccgagcctcgtattctccgaatacatgatttaccagcaatagtgaatcactacagatttcaatgtgttcgactttcatcttcggggctagttttaggccagcgattagagcttcatagtcggcttcgttattagatgttttgaatccaaacttgatgcagcgtgcaggtgttccccctcatgcgtgacaagggcaattcctgcaccagatagctgatctgtagctgacccgtctacgtgtagtttctaggtcgccttatcttcactgttacttgggtgaggtgtttgtaccggttcgaggttgctttttggtatgctttcttccttacctgtgcattctaccacaaagtctgctaaggcttgaccttttattgctctttggggttggaaagtaatttcgtattggcccaactccaccgcccacttgagtagtcgtccagaggcatctggcttttgcaatatttggcgtaatggttggtcagtgtacacccgaacatgatgagcttgaaaataaggccttaactttctnnnnnnnagaataaggcagtaagcgagtttctctatcaatgggtatcggtcgtcggccttaatgagtcttttactgatgcaatcgactgggtgttgtatggtgttctcttctctggttagcacgacactcacaacatgctctatgacaactaagtatattccaagttcttctccgtccaaaggttttgagagtacgggaggttttgcaagttgtgcttttatctcttggaaagctttttcacattcctccgtccactcgaattgcttgtttcctcgtagaatattcatgaatgggacacacttgtctgttgattttgaaacaaatctgctgagtgcggcgatccgaccagtcaaactttgtacttcctttgttttagttggcgacttcat

SEQ ID NO: 144227 - DNA, 567 bp, Cannabis sativa
  modified_base (335)..(344): a, c, t, g, unknown or other
caaggataacaaagtgtttgtctctacaaatgctaccttccttgaaggtgactatatcagagacttcaagctgaaaagtaaagtagtattaaaagaaattctttcagatataactcctgctgatgttccatcctcttcttcctaagtagaggataatcccactccctcagttgaaccgacacaagatgttacaattgaaaaatctaacacaaatgttcattttcagaaggtcacgactccttgttgttgtgggaggatttctactaaaccatctcattatggcttggatggtgaaattaatatggtctttggtgacggtattgatgacgatccannnnnnnnnnaacaggcaatggcaagtcccgaactgaaataatggtcagctggcatggattcagaaacggattccatgaaaaagaacaaaatctgcgaatatgtagacgcacctgatgactatggtccagttggatgtaagtgggtctacaagaagaaaagaggtggtggaggcaaagtcgaaacttttaaagctagactggtcgctaagggttctacccaaagagaaggtgt

SEQ ID NO: 144228 - DNA, 683 bp, Cannabis sativa
ccacatgaacagtatgggtggaccgaaatccccatagcagggaccaaagcatgatcaaaagagaagagggttcgcatacctaccagagtgttccagagagaaaaagtaatttccgatccaattgataaggactacgacttattatatgaatgatatggaagcaaccaatttttatacctacatgcattttatatattattatatatgtatataaatatacgtatgtaataattattctacatataatatgtgtggagtataaatttagtaaatgtttctcttttatatggcgaattattttaaacacacacggaaatcaatatttcaaaacaaattggcaaacatatatatatataatattttgaagaaatcatatttaaaggataaagcatttgtatgggtgtgtaaaaagttattcaattcaattataatcaattgattcaatcttaactgatctaatataattagatatctgatcatatttggatcggattagatataaattttgaaaatttaatgggatcagatctgctattagatgggacatctgatccaatagataactgaaccaaaccgatccaatcatcatccaatggtcatctaattatatttatatatttttaaaacacatttataattttatatatttaacatattttatttaaaaaatatattaattaatt

SEQ ID NO: 144229 - DNA, 508 bp, Cannabis sativa
aagtacaattaataaatatctgaaatattcatatagatagtataatcttataaggtcgtacaagataattaaaattatataatatgaatataataagtcggtagtgtattacaataagatttttttttttgaataaaaagtaagaaatctttaatatggaattgccaagtatggtttactatgcactatactctagtacgtgtaattttgatttagatcacatatgtggatagacatgtagtgaaggtatcgtatataatttgattatatatgtctagagataataacatctttcatcaacatgtcatttacatgaaatagttattcatatcaatgatcattagtggatcagtctgaatcctgagtatacatgaacccctatttgtgtttattaagttctttgattcactcgttaaagtttctcaaaaaagatgattcctacaacttctgttttatgagcttaataacatgagtggttgggaacatgtcatacaataatggaatccaa

SEQ ID NO: 144230 - DNA, 610 bp, Cannabis sativa
ttattttcaaaaaataaaaaataacttcacaaaagtaaaaaaatatatatgtaataaaaaagaaaattataatatatatattgcataatctattgtgactatttgtattttggccacaacaaattttataatcactaaataataagatgtgactataactacgtaggtaacaatttgtgattaagactttttgtgacaattttttttaactaaatatttattagctttaatcttaaaagatctaaaaaatattgtcggtagaatagtgtgaagttttagagcattattaattgctatttcttcatctatagggatgaagaagtttcaaataaactacacaagaaaataagaaggtttataacaagacagaaactttttaaggtggaaacattaattgattatattgagatatttgcgaagaaatttttttaacatttgtaattgtcacacttacacatatatatatgccctattaagaaaacagtttttcgttattatgattttgttgcactgacttattaatttttgaatgttatgggctcgtttggaacgtcgtattacgttatactgtattgtattgtattatattaaattggattatatatcatat

SEQ ID NO: 144231 - DNA, 722 bp, Cannabis sativa
acctaggactcggacctggatgggttatctagacctgggccacggaacccagacccaaatctaaacacggtactcggacctggatggggaacctagaccttggcccccgtcctggagtcggaccgggaccgaggactgcaacttggatatgggacctggacccaggacacgaccgttaaaactgggatttagaactaggattcgaccccggacctggaccctgacctagaatttggaccgggacctgggacccgaagtggaactagacttggacccaagaccgtgaactagatctggacccggggcttgaacctaactcgtagttcgtgttttgatctgggacccatacccgaactctccaacgaagaccttgagctggactcagacccagaacctaaccaagacccagacccgtaacccagacctgggtctgagtccgagtcttggtttgagtcttggaactggaatctgactaagacccaaacccagaccttaactgtgatgcagacccgaatcaaaacttggattgggtcttaggttacaaacccaaacacagatacaaacttggacacagacctagagctaagacctggacttggattggagtctcagacctgtacccaggacccagacctagattgggcactcaaactcaaaattaaaactagaatcgggactttagactggggttgggacctaagacccgacacaagtcttggtct

SEQ ID NO: 144232 - DNA, 591 bp, Cannabis sativa
atccagacgtccaaacgggtaagactaatctgtctaggattctcccccggtttcactctctcaaaaatcaatggaacacgatcaaaagtccatggactaccatcgataactcttgtaataccaatctcatgatagaattgaaataaaaaatgattcgggtcaagttctttaacgtacaaacctcggttcggttgccacagggaagccattctgtgttgtatggcttgacagtcaatactgcgttttgtaaggaagcgccccaccaaacaccaccgatcatcgatctccgataaatcaccatcatcatcatctaataccagcctgtcgacatcctcttcaaacagcacattctcgttatcactcatttttcttgcctggactgctactaggattcgtagcgaatataacaccaccgtaaaaatcaccaccgtaaacaaacaatcaccaccgtaatatcactgtgaaaacaatcacacacaaacaagcctaacaaaactttccaaccatgacaaaagtcaagacataaatcaaccctgcttaatttttttaatcatatctgaatgtaaattattgctccaaaaggagaatcaa

SEQ ID NO: 144233 - DNA, 528 bp, Cannabis sativa
tttttgggccaaagtggagccataagcaacacagccgaatgtccttaaatggtcataagatggaggcttgctgtgaagaatttcataggatgtaagcccctttagcaaaacagatggggttctcttaatcaagtatgaggtagtttgtattatgtaagaccaataggatagggatatattggattgaaagcaaagtgcaaaagatacatttagaatgtgttggtgccctctttctaccaccgagttttgttgtgatctttccatacaagagtggtaatgttggatgcctttagaggcaaaaagggaactcatattaagttctttggcattatccgagcggacagctttgattgttgcataaaattgtatgcaaatactgttaaaaaaattaatgaacacagtttgagcttcagattttgttcttagcataagtgtccatgtatatcttgatttatcatcaataattgttaaaaaaatatttgtagccttcagcactaattatgtgaaaagtgttgggttttgtgccct

SEQ ID NO: 144234 - DNA, 843 bp, Cannabis sativa
  modified_base (64)..(68): a, c, t, g, unknown or other
actgtagcgtgccttagcattagggcgttacaattttggtatcagagccgccagatttgtctannnnngcttgctaagacatgtataatctttatcaaagagagctcggctcactattcagtaagcttgtacttgtttagtattttatatatgaatatcaaagcatgttaggaagcatattagtttatagttgtttgatttaatgcgctgccttaaaatccttaggcgcggtattaagttttatgatcgcggtctaacctgcctggcttatggtttcgcaggctaattcccattaaatggaggcccagggaaatataagaagtcagggtaatatagttgagaacggaggcggtcagggaaatcaaattcactagaatccccgtggtcgcggtcgtggccgtggcagagtttagggtggtcgtcctgtaaatccaccacaagctccttcggattgggagcagagatttgtggagatgcaagatcgaatccgccaacaagatgaagaaattttgagattaaggcagcagtgtcttcctactatgcctccacaacaagctcaggccgttgtagctccagcggtgccagcagaacaacctgttgctgacaatcgtatggagccgttatatgagaggttccgtaagcaagcacctccagtgtttttgggaggtccagatgtgaaaggctgagcagtggctcactgtgattgagcgaattatgaatttcatgagggtggttggtaatgatcggttgacctatgccacatttgagttccaagaagacgctctcgtgtggagggagtgggtgtccctcactcgagacgtcactgttggaattaattttacc

SEQ ID NO: 144235 - DNA, 746 bp, Cannabis sativa
cctagtttttcttttttttttttttttctgtgttttaggaaactaaattagcttccccatgtatttattaattgttttgggaaactaaatagatgtaatttttgggattttttctacaataaactaaaaagggaagcaatttacatatatataaaatccaacacactacaatcaccttcacaatctaaaccaattatcaatgctaaacctaatcctaacaccacgaatcataacccacaattcagcatcattaggctgctgaacctcccgcaacaacaacccatgaaaaacttgtggttgaactttgaactcaagaagcttaatgaaatgcccaaaataggttttttaaaacatttcaagtttcttagatgaaaggcaagtcttaatattataattaaccttgtatgaagcagtggagatggctttcgcaagaaacagattcttttggtcatatatgtaatcccattcctacaatagttccaacaaagaatatgagaaaaagaacaaaagactaaaaaactaaaatacaaaatactaaacaagaaataaaaacagaaatgtactatatataaaaaacagaaaaaaaatacacaccttaggataattttttttggatatgtcaaagtcttcaaacatctctgaactcttaggagggacctgaaagtaggtataacaaaaaaaaaaaaaaaatcataagcgaaaaattcgaacaactaaataaataattttcaagattatgaaaaaga

SEQ ID NO: 144236 - DNA, 705 bp, Cannabis sativa
  modified_base (155)..(156): a, c, t, g, unknown or other
  modified_base (560)..(561): a, c, t, g, unknown or other
ttgactttaaattttagatttcaaatagaaactttaaattttagtttcctagaatacattggacaatacagtatgactttcataagctataaatatccattttctgtcaatggatcaaaactgtatgttaatgtatggaatatgagttttgtatnntgtgaccaagatccacttggactatattcaaagaactctttaatgtaagtagacctaagtcatcataaagaccacaaccacattcttttatatctctggcactttatcttgttcatagtggttttgacaagatcatcctctgcaaagagaaaatatctcaatatccacttgaaagtacattcagggatggatgtacatctatattcgaatatggatgtacattcagggatggatatgatttttcgttacattctttagataattattctagatttaccttatgcaaagaaatttgaaaattttgagaaatttcatgaatttctagaaatgttgaaaaacattaaggtaattggttaaagttcttgcgaactgataggggtggagaaatatttggatatgcagtnnaaagatcattaagttgatttttggaactgtattttaaacttacctcctcagaaatttaattcgcatattgatgaaagtgaaaggttatgattagttaccagcaattgctcaagtccttctagggatataccctattgataggaa

SEQ ID NO: 144237 - DNA, 507 bp, Cannabis sativa
ttattttttcatgttttaaatttttcaaaaatttccgtttacagtcgttatgctgccaaaattttactagtattagaataaattttactagaatgcataaaattcactaaaatttaaacaaataattgaataaagtttttctagaagtttcgaaatggatagagattggatgggtgcgaatagattatcagcggagtatagtgaaggtgttgaccatgtcttcgacttttgtaagaagaatgcaaaaaatcctaaattgattatgtgtccttgtcttaaatgtggtaacatggagcgtatggacattactaggataaaggaacatttatttaggaacggaatagacaagagttataaggtttgggtttaccacggggaaaagaatagagttctaggcgagggaatgtctaagtccaacaaggttaagggtgttaatttggagtatgaggatgatcacattccagaaatgattggagatgcacaatatgaattaaatgtcgatccttt

SEQ ID NO: 144238 - DNA, 750 bp, Cannabis sativa
ttttcacagcttgaacaagcttcttgctattcttccacttcttcttgttgttgggtttggaagtagaggtaatgtttgcctcaaccttagccgccccattaacattgttagaaccaggagctttagatcctcctttctgtggtcctccaatcaaattttcaaatgtctgaaggatgttgattaactcgtgaaagtcaagctccaacttgttcatgacatagtttgaagtgaagggcagaaaagctggagtcagactatttaagatcaaactcacttgagttgtctgatctataatagccccatgattctcagcttcctagaagtaactagtcatctggagaaggtgatcacgcacgctctgatgaggtttcattcgtgcgttgatgaaattcttagtggcctcaaagcgagcttgaattgatgccatctcgaatagttcaattaactggttcatgatttctgcagccgtgagagtgttagcaaaccttgtcttcaaggtgtcaaccatgctagacagcatgaagtatcgagctttgttgttggcattctgtcgacgctcgaacttctcctttactgcctcggttgcattctaaccaggttgctcaggagccacttcaatcaacacaaacagggccttttcatcaatgagaggaatgtgaatgttctctctccatttgataaagttagatccattcaacttattatcagtcaacagtgacaccatggggttggtcattgtcatgttggata

SEQ ID NO: 144239 - DNA, 535 bp, Cannabis sativa
  modified_base (370)..(375): a, c, t, g, unknown or other
ttaaaagatgttgaatgttatgccatgttaaatatgttggaataaagagttatgcgtctaaggcataataaagctaaacttggtaagctggtaccctaagtttgattttaatgaggtctagggttattaccctagaatattatgaaggtcagaaagcgttaatttaatgtaatagtattaatccaataaaaccatgacttagggttaacactcttagtaaatgttatttgagtatatagtaatgtattatatgagtggttacttagtatgaaagttagggttattaccataatattttatatgttatgataaatattgaacacacacatgtatgttaagagttatttgtataagacataactgggttagnnnnnntatatatcaccaggataaaccaccaaaagaacgtaatgtatgaattactgatatatattatatatatgaatagggttacgcgaacaaggcataaccaggttaggctcagtaaccaaaactgatgtaaaccctactaaggccttattgtatatagacgtgt

SEQ ID NO: 144240 - DNA, 837 bp, Cannabis sativa
tgtagaagtgatagtatattctcctcttcttcagttggttggggtgagtttgggcaataaggagggtattggtgactccaaccctgaagtgatagatttcaatgccagtcgtagtcaaaatccaccatatcattcaacagatttattacatcatagcctctccttaatagaggcgcttcagttacctctgttccataatcaatccagcttcttgtttcatcatcaagttcgttataaaagagccaagtaaaacacccacttgaaaaattgggataacatctctcttcgagctctttaaatctcccccaagcagaatagaatggctggattgtgttgttggacaaaatcctcaatgtatatcatctgcatttaccttacaggtcaaactcgtcagtaaaataatagtaaaattaaataaaaagaaaccaaattagtttaaaattataattttaataatattaactaacaatccccgacaacggcgccaaaaacttgttgtggtattctcaacacacaagtatacataatagggttgtacatcggtcggtttggacggttcatcctatatattttctaacccaatcgaaagttcaggttgctaaaatttaagtgcaacccgcccaattttttttaaaaaaatctataaactgaccaacggtttaggtggtttggtcgggttaacccgcccaaaccgaccaaacttttttttttttagttttaaagtcaaaatcataagaattaaaaaagataaattaaaaatataacattccaccaaagtacaacaccatatatatgactttaaaactaataattaagtatataactttatattattat

SEQ ID NO: 144241 - DNA, 875 bp, Cannabis sativa
gcttcaattggagaattgttccaacgaagtgcgttctattgttataaacgattgctagttaataaagttgctaagtttattcaaaaaaaaattatgtcaataaattaatttttatttaataccaaaatatatattataaaatacaatgaataacaaatttatattgtaaaaaaatatatacattaattatagccattaattcatctcaataatatttttaaaaaatatataatttttttatgaacaaaatataattaattaatataatcaattcaaacaaaaaagttatcatatattataactcataagtatattcagattatgtgatatgagttcaattatttattgttgacttgaggatggtctaaggcttcttcgctaagtgggtcttactcgtcttgtactatgtccatattttgagcacaactccctcaatattaatccgatttgagcgattcaagttgctatagaaaactgagaagaagatctacaaaggtgagatgtccttggccgagtgacataggacgagagtgcctatgtagtttggatacaatcataacctacacatagtgaaataactatgagtcgacgacctcaataagaaaagcaatcataatacaatcatatatctgacttgtaactgagaggacatacactcagttattataagtctactaacctcatctaacgcgtaaattgagatctgaacattcatacctatagtatgattaaccataataccaacctaattccagtactctagtcccatattgatgttggtagcatcaatctatactatacaatacggcctaccatactagatatcagtatcttgatgcaactatatgttaggtttatgctctaaataaaactcc

SEQ ID NO: 144242 - DNA, 588 bp, Cannabis sativa
  modified_base (124)..(133): a, c, t, g, unknown or other
gggctgagaagaccgagcgcaagcattgagatggcgctagagtttgagtggaggccaaagggccgtgccagtgagacgtagtagtcatgtttgcctgcgaaggtcaagaagggtgctagagttnnnnnnnnnnccagagggctacatcattggaacttagtacattgtgggagctagaagggcgtgatgcaagtgtgaatcagctggagggttgagcggacaatgcatgcatatgcaaatcgacatgggtgctatttaagatagttgactcgagagtcacatcctgcgggatgcacttttagatgacatggtgtgcatgaagagttggggcggtcaggcatttgcatgttggcatgttgtcgaggacgccaatagatgaagtgggggagagatcttcacggttcactcaacagactagttattcattacaagcatcgagatgggtatcatggagattgattgttgttcacgatgtaaagtcaagaagacttgggacacaggtagtgccagttatctagggtgaaagtctgcgggactcaggtactaaggtaacaccatggcaatgttggcctaaggtgaaagtcagca

SEQ ID NO: 144243 - DNA, 2149 bp, Cannabis sativa
  modified_base (159)..(168): a, c, t, g, unknown or other
ttagtgaagaagtcgactgctactagcgcatatgggtagggcgaggtcatcattcttagttttgttggcggcatgcgaggtatatttgaaaactttgacacttatcacatttgttgacaaactcgtgggtgtcgttattgatcgttggccagtaatatnnnnnnnnnntgatctttttagatagactttgccaacctgcatgatccccgtaaaagccttcatgaatctctctgttgatttcattcgcttctgcagggagaccacaccgaagtaggggcatcgaataccctcttctatatagtttgccttcaattattgtgtagcgaggcactgaatacaatagtttttgcgccttgtttttgtcatttggaagttgtctgtcgagtaagtaattgataatatgagtcatccatataggagaactgtctatcatttcgacgtcttccgtttcacatatgcttggcttgcttaacatttccaccaaactaagttcaattcatccaagtcgttgaggctagttttgctaaggcatcatcgttggaatttttttctctcggaatttgttcgattttaaagtaatcgaatctttccaagttcttccaaactttctttaaatacctcgccatttttaagcctttggcctggtattccccgaggacctggttcacaatcagctacgaatcactatggcagatgagatttttgactttcaacgcctcgactatctttatgccagcaatcaaggcttcatactcagcctcggtattagatgcgtcaaattgaaatctcaaagcatagtgaaacttaaagccttctggtgaaattaatattacccctacacccgaaccctgctcgttggatgcaccatccacgtataacttctaggttttcacatctcgttgaacatgcaaaatttcttctggagttataccttctatcaagaagtggcttggcccttgatggatgttcgaggatggtatgttatgttgaactgtcccagttcaattgaccattttatcaatcttttagaaacctctagttttgataaaacttgtctcaaggactgatcggttaacactcttatggggtgtgcctggaagtatggccgtagcttacgagacacatggactaggcacaaagcaagcttttctagagggagatatctagattctgcccctagtaaccttttacttacgtagtaaataggctgttgtgcttacccttcaaataatgtacaaactaagtataacagtcgggttggctcgagacctaatagacgaggtgcctatctcgttataggaaggctcattcctataacttcccctgattaacttcagacatcttcttagcaagactgataatctcaacgaatcaaaagataacattcaaatgagcctcgagaaactctctgttaacaagaactgcgattgtcccaaatgaagcgataagcttttaaaccaagaagtaacaaggcgtgcatcgtcgacctcggaaggaaaaaggctccagctcgctattacggtcactggaaccaagcttttgtcgagacatcctcagacacaacaattaaagacgtgttaaaacacacaatcattttgacccagtaaaagtgggaaaatcacagctatatgattttcaaataataaccgtatttacactacgtgatatgtaatcaaactccatgattttaggggatgatcgttgtaaaaagattatagtcaactttgtaattaactgcctactatgtgattataaatagtgacaagtaagatcaaaaagggagacaaaaataatcatacaagagaggccttgagaaaactattagaaatctgaataagattgactcatggactatgcagaattttaaatgcaaaaccacgtaaaaaatcttgtgtgttcatcatacttttcattttacatcttatattttttctgtgtgagattgtcactgttaggctcaaatttggttaacaaaaatctgcgttaacaacatatatcatatcaggacagatatctattcccctggccccgcttcgtttctgactcaagtatgaatatttaaatccatacccgccccgtcttcgaaagtcaacccccgtccccgctgttgggttttgtgccctaaataaaatcaattttaatataatca

SEQ ID NO: 144244 - DNA, 1185 bp, Cannabis sativa
aatttatttagatacataattctatcataattatcttttaaattaatttgctttattaattttttgtcaagaaagataatttttattaatcaaactaaaccaattacatctacaagaggattcctcttcaaaagagaaacttacgactcaattttattcgtgctacacaacttcctttcttgtacaagattaagtctatttttgatgctctctttcaatctactatctatacaactcggatttatacattttttttatttatgcacaaattttagtttagccaaatgctataaattacaccataatataatttttatgacaaattctaatatatatttatagttaagaaaaaatatatatttatttttgaaatatacttttattttttgattttttttgttgatagaagtaaaaatataatcttatttaattatgttaataaatattataaagtttcatgtaaaataattaatgaataaacataaataaagtctctaataatatattttaggagaattaccccatatactgtgtttttaattttttttttcttcaaatttacagtttgagtttttaaagtggttgcaacgctagttgcaacaggggttcttatatgattttttgttgcgatttaggttgcagcgctagttgtaatagaaatttttatgtagaatttcgtaaaaatacaaaaaaaaaaaaaatcgttttaaaatgtaaaaataaaaaagcccttatattttatttagatgttttatttagaaaataaaaatgtgaaaaaatagttcacaaattttaaaactaatttattatgaaaactggaactgtacccacaataaaattatttttcctttttcatcactgtagcaaataaaaaaaaataaaaaagtaaaatagatattataattctgaataaaaaatagatattataattaaatacaaaataattatatacagagagtccattttatgcaaaatgaatgtcaaattttatgttttatcattagtgagaaaatgggcttatagtatacgaaagaaagagctcggcttaccgtagaataaccctatatatatatacataacattttttaaatgtggattatggattaaggagtattaatgtgtagtcattataacatgtaactttaaattttattatttatgattattgatttgatacttataata

SEQ ID NO: 144245 - DNA, 842 bp, Cannabis sativa
aaaccataacccaaactcagaccagaacctggaccgagaccttgactaggattgggacctgagacttgggacctgaacctcgaccgagacccagactgggacttagacctgaccaagtcctaaaccctcatcgggacctgagacacgtgacccaaaccaggatcaagaccccaacaaggacccaaacctgaacccggaccaagactgggatcaagacctggacccaaactcaaaccgagacatagaataaaaccaagactcaggacctgaacccgaacttcgacctagaccagtacctaggaactggacttggatgggggacctatactagggacctatgccctggaacccagacccaaatctaagtctgggactcaaacctgcaccaggacctgacctagacccacgaatctgaagttggacacagacccagacccgaaacctgcccccgacccaaactaggacaataacctggacacgaacccatatcaggacaaaatccgaaccaggaattgaacccaaaattgatcccgaacctcagacctagacccaaacctagacctgcacctgaacccgaacatgaacccagactgggatcggatcccaggacgtagacccagaactaaacctagatttagatcgagatcgaaacttgggactcaaaatcgaatcttaaactagacccagggccctaaccacaactcggagcccgattctgacctagactgagatctagacctgaacccaaactcagaccaggactcgaaccctgacccgaactcaaaccttgacccaaactcgaacccaaactcgaactccgcaactagaactgaaccgaacta

SEQ ID NO: 144246 - DNA, 761 bp, Cannabis sativa
ggacctgaaacaaaagaatcaagcgtaatatagccctaaaactagaaacaaagagtgaaaactaaccgaaatatgacccgaatcttagactaattttagcctaacacctgacatttcaaattaacttctctcattttttgcgttttttcttcgggtttaccaattttttgtgatatatatttagcgatgtatttgcaatgttagaacaaatctgaagtcagagatgaagtttagtgatgattcgtgatatttagcgatgttcagcgatgatattcacgattttgcgatgtttcgcgacatcgtaaaaaaccagtaaaaatgtagaaaacaagcgtttttgtgaattggagaaatctagagatgtttcatgatttcacgatgtttcgcgacatcgtcaaaaaccagaaaaaaatacagaaaacaagcgctagatgggtcaaaaaccagaagaaaaaaatgtggtggtcgtggattgtcttgtgcttctcgtgggtcgtcgtggctcgttgcgagtcgtcatgggtcttctcgcactacaacatttgacttcattagctatagggtattagcggcggatttcggccgctattggttcgctgctaatgagtggccgctactaatagtattagcgtccgaaatggggtccgctgctattaatagcaatattagcggcggagcattagcggcgggaccccaccgctattaatagtattagcggcggaccccttttttggccactaatactattaatagcggccaag

SEQ ID NO: 144247 - DNA, 693 bp, Cannabis sativa
catcaaaataataattattaaattatctcaaaaaataataattattaaatattaaaaataataaataataatttttacatccattaaaataaaaaattaaataacatggggaaataacatatacaatttggcagtatactgccgaaattaaaaaaaaaaaaaaacagtaaaaacgtaaatttgggcgggtcacagtatttttgtaatacatggggaaaagtcagtaaagagtgtaaatttccctaatatttattgtagtagcccatcaaattagatggtatacttattttatttaaatataatattttagttatttctttgttaataatctataaaagaaagggatttgttacttttatcttgtttcatcattttttatatcgataaaaatatatgtactgtttcccacaactcaaaatatgctttaaaattgctagaaaaaaaaaataagcaacctcaagatatcctaaataataaaataataaataatatagtctaaaaattaaaaaataaaatcataattttaaagttatttgatcaaaataagtaactaaatgtgtatgagaaaaaattatcttaaaacatttttttttaataaaaaataactaattgatatattatttacataaaaagcaactaaaaggttacttttttaaaaacttgcaaaacactaagaggttgtttggctttaca

SEQ ID NO: 144248 - DNA, 919 bp, Cannabis sativa
aatgtatattattgaaaagttcccaaaaaattaactatatatatcaagtatatgtaccataaaaaaattaaatatttgtaaaaacaagaaagttgtacatatgaaaaaactatatttaaattatttcttttattagggaataatttgtctaaaattaaataataggggatcgaaaaataagaaaatattacgttggaatttcttttctttactttttggggaaaaaaaaaaaaccttttcccttttcctacatggaaatggaatgcaatctgtatggataaactaaaagtatttttcaatcatccaataagaaaaaggaattaaaaaaggaagaagaaatgagtcggccaatcatataatatgatagattttgaattttgatgattagataatgattttgatatacgaggtcccctaccaatgagagatcggacaaagggagctccacgtgaagcagatactgacacctgacaattcagtgtgtctgctgccacgcgtcgtgatgggatgcgcttatatgatccccatttccaatatctttctcttttacaatggaattacaaagaaataaataaattaagcactactctttcttcttctacaaacttaaatctatatatttatataatatgtttttgttagagtagatgaggtgccatatcatattgtatgagttttcttctattttctttgttctcttatttttttcttaattattaagtttttattaatttgttaataacttaataatgttttatcatttaataataatatttttatttaattttttcattctcttaactcccattctacttattatatattagtaggggtgtgcataaatcgatctaatccaatgagaaccgaccgatccaattacaaccgactgccaaacattagatatccaattgtaatcgga

SEQ ID NO: 144249 - DNA, 578 bp, Cannabis sativa
tccgctgcctgaaaaggtgcgcccgtgacatctagcttcttcttgatagtatcctttatggttttattaacggcttccacttgtccatttgcctgaggcctggatactaatgagaagcttttgataattttattcctctcgcagaattcagtgaacaagtcgtgatcaaattgggtttcattattggatactatcttcatgggaattccaaacctacaaataatgttctcgatgacaaagttaaggactttcttgcaggttatggagacgaggggctcggcctccgttcatttagtgaagaagtcgactgctactaccacatacttagctcctcctcgcccagtgggtaatgcctcaattagatcccccatatagcaaatgggttgggtgaggtcatcattctaagttctgttggcggtacgcgaggtatatgtgaaaacctctaacacttaacatatttcttgacaaactcgtgtgtgtccttattaatcattggccagtaatatccttgttcaatgatctttttagacagactttcccaaccctcatgatccccacagaagccttgataaatttct

SEQ ID NO: 144250 - DNA, 592 bp, Cannabis sativa
gctttttcatttagaattttcttagatagtgcttatgatgtcactctaatttctcttatgaaattgaatggcacagatgactatattctagatattctatcccataataatataaataatcgatcttagaaatctcctacttgtatatgcttactataggaaacttaaacttagagttagattagtagtggtggtccaagctaaaataattactcaaaatatatttggtataaatttaagtctttgattttaaattctagattctaaatagaaattttaaattttagttccaagaatgcattacacattacaatataacttttacaaggtttaatatctattttctgccaatggatctaaactgtatatttatgtatagaatatgaattttgtattctgtgaccaaaacccacttggactattctaagaactctttattgtaattagacctaagtcatcaaaagaccacaaccacgatgattatatctatcgcatttgtatcttgttcatagtggttttgacaagatcattttctgcaaagagaaattatgcctatatccacttgaaatgtatttgacatatggatgtacat

SEQ ID NO: 144251 - DNA, 628 bp, Cannabis sativa
taactaagaaaaatcagcgattcgtgtggtcagataaatgtgaagcaagtttttaggagttgaagcaaggtttgataacaactccggtgttagctttgccgccagatcgagaaaagttcgttgtttactgtgatgcatccagacagggtttgggatgtaagctgatggaagctgacaaagttatagcttgtgcctctcgtcaactaaaagactgtgaacagtactacccaactcatgacctagagcttgttgccgtagtttttgctttaaagatatggcgacattatctttatggtgaaaaatgtgagatttataccaatcataaaagtctcaagtactttttcacccaaaaagacttaaacatgaggcagagaaggtggttggaactagttaaggattatgactgtgagattctgtatcaccccaggaaagccaatgttgtggtagatgcactaagtagaagaggtcccgggtaggttttcactactgttatgatagcccctcaactagcttcagagatggataatgcaggaattgagttagtagttggaaagttgcacaccttgacacttcaatctgatttgctaaagagaatcaaaaaggcacagttagaagatcccgagctagt

SEQ ID NO: 144252 - DNA, 544 bp, Cannabis sativa
aggatacatgtcagaactcaacaaagtagacaggagaatcagaccttattcttagagaataggatacaaatattggagtagatgccactgcctgaccagaaggtacacaatgatgacatccaacatagttgagtcgataaattcagcaatacttgccacaagaacactgcccattactacaatgatggagagtctttcaagtttggtacaaaaatgggtttggacaaacgacaacgaagcacacggaacattcaccaaagtttcaacagtgacagaaaaaatactcaaagacaactttattcaagcaagaaaatatgaggtaaacaactaaatttatagatatatacacacagtacacattaaaaaaattgaacagctgtataaaataaccggataaaataattttttctgcttaaaataacagattacaccagtcacaaccatactctaccaagtgaatgtgctagagaaagggaaattcctggtcaatttactagacaaaacatgtgaatgtaaccggttccagcaagatgaaatcccatgt

SEQ ID NO: 144253 - DNA, 662 bp, Cannabis sativa
tatcacttttattatatttataggattcttctaaggtgaagaatttaaaaaatatcttgtagggtatttaatagtttattctaatcaaacaattatattataatatcgtaatcttaaatgcaacatattcaaataaaattgattaaaatattttgtcatatttataaaaaataattcaatattagcaatcattaaataaagctagccaaggattgtttttttcaaaaaaaaaaaaaatatttcaatattagcagttattaaatgtagccaaggaacaagtcattatcttctcaacctcacttcttgtgaattgtcaatactagtttattaattaatcatatttcatataattaacattagacattcagattaaatattaaataaagaatcggactccataaacatagaataaaacatatatatatattttttttcaaaatagcagaagctaagctgaaccgaaaaataaaatattaaaattatcagtaattattcttgtgttttttctttataaactgaaaattatatggacaaagtgttgaattgaaagttagatgaagaagaatatgattcttttgcgggtttacaaatttcggaaaatcacagttttcgaatttgatcgatctgaattttttacttttattttcattttaatttttttt

SEQ ID NO: 144254 - DNA, 706 bp, Cannabis sativa
aagacctcatcttaactgaacatcaacaaatagaatatatctatatgttagactataagtctaaccacaaccttagtttataaagagttttaacttatattttacttgatatacaattcagaatttatgttgcagtcttaactgtttctttccaaaacgagtttcatgaagaagaatgaataatcacacttctagttatgtccttatataaatgttaattacatctctcaaatacccttcatgtttttgcctaatattttgtattggaagacaaaattacatttctttagtagttgtgcaaaataatcttagacgttactcacttgattcgtcatacctcccatggttgtgttaaccgcaatagttagtttcaacgactttagttttcttgcctagttgttttgtcaactatggttttgaaaatttaaaagaaacaatgtctgaagattattgctcttatgaacaaaacaagtttcactagtctaaagacaagatactattattgatcattccatgaaaccatgaggaaatgtccaccaaaatatagcataaattcttagataatgaaactttattttgtcacttgatttttttatgttagtttgttgcccctttacaaaatctaaaatttattaaatcaaggggtcaagagttctattaaaaataagtctttctattctccttttgggagatataatcttaatac

SEQ ID NO: 144255 - DNA, 620 bp, Cannabis sativa
  modified_base (68)..(69): a, c, t, g, unknown or other
gaagctaagttgaagggaggtgagagggccaagcagtatgcttaggagcccttgaatcctgaagatgnngctgaggaagagcaggtgactcctctgaagaaggagaagaaactttcagccccgcccaggcatgttgaacatgccattcgtataagggagcccatttcacctgctcgatcgtccactctcgtgttcggtaaagggaaagctgtgatgtctgaaataagatcgatgtcaggtgatgatgaactttcgagtcttgtttgggccatcatcttgcatagtattttgtcttgtttttttagcttcctgactttcatgccttatgtttgtgatgtttgtttctttctaaccatgttgtttttcattctgcacagacatgtctcggcagatgtttgagcctctaaagaagagaatgggcgaaagctctagtgcctctcctccagccaagaagtctaagggcggtaaggggtcctcttctatggaaaagaggcctcctaaggaggtcattgatcttttcgaggagctaactgctgcaaacccctctatccccaaagctgctaagtccaaggagtctcggggaggaagcttggacaagtctggaccaccaaaggttgggt

SEQ ID NO: 144256 - DNA, 573 bp, Cannabis sativa
tctctgagtcaagtccctgttcgggtcagggtcggggtcccgatcattgtcccaatcaaggtctaggtgccggacaacgttgtggtctgggttttggtccgggttcaggtccttagtttttgtctaggttcaggactagatctgggtctgggtctaggtcttgggttccgatctcggtatgggtatttatggttttagggttttagggttttgggtttagtgtttagggatttagggtttagggtttagggataagtggaaagagtttaggatttagggtttaaggtttagggtttaagggtacgatttaaggttcgagtgtggttctgggtctgagtcctggtttgggtctaggtccatgtttgggttcatgtccgagtcttggtcccaaattcaaacaccaaccacatgtcgagtctagtttgagttctggttttggttcgggtctgggtccgggttaaggtccaatttctagatttagacactgactatgggtcgggtccaagcctcgagccttgggtcctgtctagagtccaaatctagatcctagtctagttctatctcatgtcttgg

SEQ ID NO: 144257 - DNA, 697 bp, Cannabis sativa
acagtgataatgccagaggggtgagatccccaaatgagagagtcagacaaagttggatccaggggaattttgacaatactttcgacttgataagaaggaaagtaatgcttaagtttaggtacattccaagtggaatcctggtcgataaagaaagaaacaaaagcctgggactggtcagtaggatgtaagagagtgggattgtgaatactagggatccaatttggtgcagataaagggacattaataccagcaccaatcttccaaaccagacccttcttaagtaattgacggccccaaagaagactcttccaggtaaaagaagaattatgaccaactggagcattcaaaaaatcagaatgtttaaagtaacgagctttaagaatagaatgaagaagagaatccttatcattccatactctccaagcttgctttgctaaaagagcttgtttatgagaagacaaagtacgaaaccccaaacccccaaaaaacttagagacagagatgtcatcccaatttttccaatggacctttttggcaccctgagaaccccaccaaaatctggctatagaactttgaattttctgatagatagatttaggcactctaaaacaggacatagcaaaagaaggaatagcttggaccacagccttaattaaagtttccttgccagcacgagagaagaacttgtcattccaag

SEQ ID NO: 144258 - DNA, 824 bp, Cannabis sativa
  modified_base (760)..(771): a, c, t, g, unknown or other
tgggtacattttgaacccagccctccgccatttagtctaacagttcaggttgatttgccaaagtcgaactcgagcgtaacaattattatgtgcatttaatcttatatatattgctatttgtctaaatatgtgtatttaagttctagttatatgtttttttttattttatgtgactatgtgacaagcatttctttaatgagtttagtagctcacccttatcaaacttaccatgtgtagattaaggttatacaacttagaaagtggtaagtgagaccttggaggcttgtgtttgtactctctgaggaccatataattgagggtggtatagggcacgctgcatttatgttattaagtgttattaatgtcgcagttatttttatttattaattattatgtcttttaagtccaaacttagctcaaatataaaatatattttatgtttataaataaaagtgacattacagtttttttgcattttaacgcttgtaaataaattagtaatttatgaaaaaaaatacgggcattataaatatcaacagataaatatttgtaaatgcaacatctagttgtacatccaaagatgacaacttagactagtgtttacaatgtgaaacaatgaagagattattaaaataagaataactttgactctcgtctaaatggcacatcgttggattctttattttaatcgaaattatcccttaattattgctcttagctttttcatttcgaatttgcttaaataatatatcattggatnnnnnnnnnnnnaatcatctgcttatgatgtcattctattctcttttatgaaattgaatggcgca

SEQ ID NO: 144259 - DNA, 535 bp, Cannabis sativa
tcaagatcttcacctttcttctcgttttctcctgccaagattgtcatcagctgatgaccggcctttctatgctgtagctctatgcgataacatttgtgagccagcatctggttgccacacacgattcccataccatctggggtttggaactctaaagacaggtccttaatcgagctgattgcccctagtccaatcaatgctggacgacccaacaacatgttgtaagccgagggtatgtcgacaacgaagaagtcttgcataacagtagtagttagagattcctcgcctacagttaatgcgagctcaattatgcaaaggctggcgatgctatccccagtgaatccacaaagattcaccatacaaggccttagattggccttttcgagccccattttctttagagtctctttataaatgatatttaccgagctcccattatctattaacactctcttgatcctcttgttggcgagttgaaatggttatgactgttgggtcttatgccctaaataaaactctttacaatctgattagt

SEQ ID NO: 144260 - DNA, 510 bp, Cannabis sativa
  modified_base (480)..(484): a, c, t, g, unknown or other
aaagcgaaaagagtttgttgagttggtaccaggcaagggtatgtcagtgactgaatacacaaccaagtttaatcgcttggctaagttagcctttgggaccgtaccaacggacttcagtaaaaaggagaagtacttggtgggggttgaatgccaagattaagcacgatctagttatcacaacaaatgataccacaacctatgccgaaatggttgataaggctcttcgagctgaaggagcagtcaagttcttgaaagaaacccgagagactcctcgtgctggtaggacgactactcttcctatttctggccctggaaaggagattggtgattccactcttaagcagaagaagagaactttcccatctttggggagttttcagggcaaggtaaaaggttttggggaaaccagggtaaagggggacgtcagacttacacctatcctgagtgcccgcggtgcaagaaactgttgggttttatgcnnnnnataaaactctttacaatctgattagt

SEQ ID NO: 144261 - DNA, 691 bp, Cannabis sativa
tgttgaattttatcactggaaagaggcagattggaatggatagcattgatagagctttctaaagcatgaattctacgagaaagactgttaaatctagcattccagtttttgatgtcatccacgcaagttttctgcttaaggagaaaagtattaagagttaagggaatttgtccagaatgggaatggattccaactaccccctaacagtctcataaaaagacgattccgtgagccagaagttttcaaacatgaaccttttatgtctcggacgaaccatactaacatcattaagggttatcttaagaactctatgatctgaaccataaaatcctagatgatagagagtggtatgaggaaaagtatgttgccaaatatgattgacaactccccaatcaagcctttcgcacacactgccatgtttccaagtatattttgagccaatcgggtttagaggcaaaagggaaaatttactaacaaaactttgaaaatgagtcattgcataagaagggggattagaactactcgatcggtcacttatggataagtaatcattaaagtctcctagaataagccaaggaagtaaaggagcattgtcaaaaagtctttctaacagcaaccaagaatgcattttatctatactataaggagaaccatagtaacacgaaacatgagtacttatattgtcattaaa

SEQ ID NO: 144262 - DNA, 502 bp, Cannabis sativa
tttatttttcaaaagcaaaatttttaaaaacaaaaattttactttcattttgggattaaaaaattagaaaacaaaagtgttaccaaacagcacattagtattatcataaatagttatttaaaaatataattttatattatataataatattacaaatattgttactattgtattttttaaatttatatcttaatcttaaatttcatttcaaattttaaatattttttaacatttttaagacattagagaaaatttattagtttgatatgttattattaattaatatgctttaaaaaaattaattattattttttaaatatcttaattaaaaaaatattaaaaatgtgatattttaattataagaaatgctaaaaggaaactaatcgtaccatgtcaccgctttatgtgctttatatctattctatataaagtgtacatatataactgaaatacttagtttatgagaaattcatgggtggctttttatttttatttaataaaa

SEQ ID NO: 144263 - DNA, 771 bp, Cannabis sativa
agggtctggccccccgtgattcctcagttggttgatgttgccagtgtattgacatgaggtaaatcgcaccagtttctgaagtttggtggatctaaatgtcttaagtgatccgtttcacttctcaaattgtcgctttgggtgtttccacctgctcccggtccttatcggttgaagattgggctttgagttgctcgctcccctcagggagggaatgtactcccctgtctggccaggggtactcgagtaggtgtctggctgcccaaaggctagttgatgggggctgttgttaagcctgagatccctggcgggccccccagcaactagttgtcaagatctggctgttctcgccattaggccttcgcgggaaggcatgtcctcctttaggtaaggaaagtcttccttggagtggatttctgatgagattctggcctcttccatcggttctctaattgaacgtccttatcaagtcggtggcttatctattgtggcgatctagctctacttggtgagatcaaaggatgtactcttggtcatctatccttctcaggaattcgcatctctactgagtgaatacatcgtaatcagtagcgcgtggttcttcaattatgttgtcgagtgaatttcgcaacaccaaattatattattttacgaatacgaaagagagtttcaagtgcgagtattcaacctagaacggcgagtactcgattgggaacgggaaaacaatcaacaaaactggaaaatatcaataagacagagaaatatagtggttca

SEQ ID NO: 144264 - DNA, 535 bp, Cannabis sativa
gttctactagcatagtagatggtatgaaatactctgtcaacccgttgtcccaagaccgctctgattgcgtagtcacttgcatcacacattaactcgaatggcaacgtccaatttggtgaagtgactataggtgctgatatcaatttctccttgagaactttgaaagctttcaagcattcttccccaaactcaaaaggaaccccgttaacaagcagattggatagcggttttgagatctttaagaagtccttaataaatcttcggtagaatccagcatggccaagaaaactccttactccttttataaaaataggagggggtatattctctattattgacaccttggctttatctacctcgatgcctgcctttgagatcttatgccccagaactatcccctctgttaccatgaagtggcacttttcccagtttagaaccaagtttgacccctcacatctgattagcactttctccaaattctccaaacaatgaccgaatgaagaactgaaaaccaagaaatcatccataaagatct

SEQ ID NO: 144265 - DNA, 647 bp, Cannabis sativa
ttatgatgtttagttgagcttgacatctaagattaaattgttaacttcaatttctctcatatgataaaaatattacttctattaattattttttatttttatcttatacgtatactttatttgtttttttattcaaaaaataatatgcctaaacaaaaccgcgcaaagcgcggtattattccctagtttcaaataattgaatgcaaaatcaattttaattgttaccatattatttgtaggcccgttgacgtttttaggcacgaccaaaaggacacaataaatcgtgcttacatatctataagcactaaaaattgagtttgttagcattaatttgatcgtgccaataatatttttgttctcgtagtagtgtgttataagtaattaatatttatcttaaatattagttttgaaagccttactactttttatgaggttatgcatgacttggtgaattagttaaagaaggaagagttagagttgttgattttgatcttgtggagagtggcaaagaaagaatcatttatctcagagggcccgtttggtacgcaggactggattggattagacaggttaatttgtccaatctagtgtttgggcatgttagaagtctggataactaatctagttgacctcatctgtctgggagt

SEQ ID NO: 144266 - DNA, 1201 bp, Cannabis sativa
ttacctgaataacctcgggatacaactcacgcatctgtgactctaattcccaactcacttcctcaaaaaataagttgtctggatttttaatatcatcgtaactcaaaatatgtgtcggaacagacacatactttctcaacatagaaatgtgaaagacattatgcaccccgaacaatgcgggtggtaaaactaatcgataggccatctggcctatcactccaatatctaaaatagatcgatatatcaaaggcttaatcttccattcttttaaaatctatgcacatctctcataggtgatactcaaagaaatactgagtctcccactttaaatttaatatccctatgcttcaaatcaacataggtttttctgtgtacttaatgaaacaggttgatgagtccatatttgtcatataaatatgatcaatttatgtattaattcttaaattgattctttaaattattgattagtgtgattttaatttgttaggctattttaaaggccattcatgcatttagagtcttttggagattttagcatattttggtggaaaatagtggaagctggggagctcaattttacaaggcaaaacttaagtgcaaatttgaaccaccttagaggtagaagtggacttggagctcaacatgaaaattttagatctcgttcttcgcttttcagaagatcttgaatcatccaattctgagtaatatcgagagagttatagctaaaatattgtcaatcgtcaaagtaggaaatttctgaaaaaaaaaaaaaaagatagcgaaaataaaaatagcttttcaagtagagttgcgatttttttttatctttttttcaaaagatgagttacattttcttttagtgagatttttcctaatactataaatagaatcctaattctaagaggatgcatctatcttttcaagcactataaatagaatcctaattcaaagaggattcatctaccttgaagcactataaatagtacatcttaggctacgaattgaaaaattctaaaagctacaactcagagagagagagagagcaaggaagagacggagatcgacttagaagtgttcttcaacatagttcttttcttctccttaaactcatactatttaatatgattatcattataatgtctagttctaagtagttttcttttagttaaggattgtttcaaaacccgaaacatgaattctt

SEQ ID NO: 144267 - DNA, 1082 bp, Cannabis sativa
tctctacatgaatggatagattttgagagcaagttcagaggtcctcctcaggctgacaaggaatccaggaagaaggtaatcccagttggcgtggtcatagattccactaaagaacccaactgtcccaagacccaagcttgcacaagaagacctttggaccagccaatttctagtgttgaaaaatttcctgaggctgtgaatgatgtctcggctgcaacaaatgggatcttttgatgcggagaatgaggtcaatgcagaggttgagaccttttacgtgtagacaatctttctcaagctacgtgtagatggtctttcttgagctatgtgtagacggtctttctcgagttcatcaaacccccatgaataaccttgtattctttgtttaggaaaatgacttaatggtttgcccctagtggcatttttgtaaagacaagtttgtaaaccaacttgggttttcttttatcttaaatgccttgtacttttgttgttcgaacttaatataactgcctttgcttgcgtttttattcacaatataaacaactatattttgatcaaatgtaaagtaattttggggttttcattgctcgtaattttcctgtttaagtagttagttatctaccaaacttttgatttttgaccagttgtcgattctgcatcgcaatgacagttctaatttgccttaagcaaacttgaatatacttttaatgattttatcactttgtatatttttgattgcttgtatgaatagttatattatatatccatttactaggtttaagtacttttgtcaagacgtcgcgatgtctcatttagtactttcctatcttgcacgaaccattaatatttagctttgtacgcaagttatagctttttgattttcctttctcgtcagacaggtttaaaccaaaaagttatggtggtttgatccctttctcatcagaaaggtttgatctgatcccttcctcgtccgaaaggtttgatcgaaaacttttaaaaaaaatttaaagttatgggtttgcattatatcatgtatttctagatgaatcccagttaatcatacacaaatgccccttaagtaattt

SEQ ID NO: 144268 - DNA, 2000 bp, Cannabis sativa
tgggacttgcggtgtgggtatgcttgcttgcggtcggtagctcctgcctgctttggcactccgtgatgaagtccgctagcgcctgcccttttatggaagtgcctgggatgtattgtagatcaaattggcttaactccattgcccatttgagaagtcttccagacgcctctggcttttgtaggacttgctggagcgggtggttggttaatactttgattgggtgagcttggaagtaggtctcagctttctagaggccattaggaggccaaaaactagtttttcgatcaccgggtatcgcgtctccgcccctatcatgcgcttgctaacatagtacacgggatgttgggttttttcctcttcccgtactagggccgcgctaaccgcattcttgagatagctaagtataagaataagtcctctctgagaacgggtttcgataggattggaagtttggccatgtgctcctttagttttttgaatgcctccacgcactcgtcggaccattcaaatttctgacatttcttcaagatgttgaagaagggaatgcatttttctgtggatcgagagataaaacgacttagggcaacaacctttccggttaagctctacacatctttgtgtttcttgggggaaggcatgcttaggagagcttggattttctctggattttcctctatcccccgctgactgacaatgaagcccagaaactttcttgatttgaccccaaaagtgcacttcttcgggttaagtttcattccgtatctccggactacttcgaagcattcttctaggtcatccgcgtggcttgcgtatgccttcgacttgaccagcatgtcgtccacgtatacctccatatttcgccccagaagccctttaaacatccggttcaccattctctgataagttgcaccagcattctttagtccgaaaggcatgactaggtagcaatatacccccttatcagtcctgatgctagtgcactcttgatccgcggtgtgcatcttgatctagttgtaaccggcgtatgcgtccatgaaggactatagcttgaatccggaggtggcatccaccatctggtcgattcttggcaaaggaaaacagttctttgggcaagctttgtttagatcggtaaaatctatacaaaccccccatgtcccatttggttttggtaccagtaccggattagccagccattctgggtaatacacgtctaggatcatgccggtggttagtaatttgtccacctctttctctaggccttctgcctttatcgagtcgagggggcgtcttttctgttgaaccggtggcatgtctaggttgacgttaaggatgtgggtttgacgtggggacttatgccggtcatgtcctcttgacaccacgcaaaaacatccgtggcaacccttagggtctttattattttttctttttcctccggctctagactttttcctagccggaggaccttggtggggtcgaggtcacacaccgacacttcctcgacatcctccatgggttctacaattttttcgaatcccacacggggatccaactcatcttcttctgccattcttggctcaacaacttcacagaccattagaacgggtcggtgggtagcaacattgtaacattgcctggcctctccctggttccctcttacggttcctatcccagcctcttgagtagggaatttcaaacacaagtgcctaatcgatgtgactgcaccaaaatccaccagggccggccggccgaggattgcattataagccgttgggcagtccaccaccacaaatgtgcagtatttgaaagtgctttggggtgtgtttgggcacaggatgactgggagcctcacttttccaattgggataagtgttgttccattgaaccccgtgagatgggaactgcttggtgagagatctcggtccgtgaggcctattgctgtgaaggcttctgtaaagaccgcttagtttaatttcgaaattagcagttaatcatgattaatt

SEQ ID NO: 144269 - DNA, 568 bp, Cannabis sativa
gggtctgctcatcaaaggcttcagtcaactagaaaagctcacacttctgtttcacctagactttacacacagatatgctaagcccattaactagtgatcaccaatattatgggctaatacagcaaagaattattcaatcaacctaaattttaataaaaccaataaaatctaatgtaagtctaaataaaaagtctaacaaaactttaatttatactaaaactaggtaacaaagccgcgctttgcgcgattgttaattttttttaaaagataaacctatacataattttttattgttgttgttttttgttattcgagaaaatttgatatatatgatatgagattaaaaaaaaaaatcttatgataaagtacaattctatataaagtacataaattaattattagagaatttcttatgaaatattaaatgtattataattttagaagttggtttatacacacaaattgaattttttttacggatgagatttattacttttgaaaagctacaaataatgaaatgttaatgaaaaatattataatagaattaggaattaatataaaacttaaa

SEQ ID NO: 144270 - DNA, 512 bp, Cannabis sativa
  modified_base (459)..(463): a, c, t, g, unknown or other
ctaacccttgtatcatttctgtaggagagtatcaccaagatctgagtccgaatcttcttctcttgaatctggattcttcacagccttagaggatggcttagactccatcgatttaagagcctctgacattgtagtgagcacagttacaacaccttgttcaaaccttttctgacgttgttgatctaaggcataagcatgagccaggtttttaaccttaaacaacagtttcaccttccaactagcagaggacaatcctgggagagcagctgaaggccgtgtagacgatgatggaatcttagatgcactagggctagttgtgggaaaggtgatcacaaatagaggaatgggcttgccaaatattggttgaaatgacttcccaatagagggaacatgcacagtaacatcctactcaaggttagcaagatgtgttggagttattttactaggatctagatttannnnnaagtatgttattaacatcctaaatctgaacttttaaaacgatatgaaat

SEQ ID NO: 144271 - DNA, 690 bp, Cannabis sativa
acattatttctctcaaggtctgctgctaattgctattggtgatcgagatagtgacatgatcaagagacatgaatatctgcaattagtaattaatgataaatgttacaaatagagatttttattagacttattaaacacattacatgagcttttatcatgtttttttgtacttggaccaaatttcatttgtgatacatgtattgaatattttgatggtataagaaatatattagatttatcatcttattttgtacttcgatcaaagtgttattattgagaaattatagcaatattaaaatataatattttttaatatataacataataataataataatgtaatgaaaaagtatatgattatatttttaaaatgttattaaatgaatataatataagaggaatgataacattaaaaaaatgttattattaaaaaattataacaatattaaaatgtaatatttttttatatataacataataatattgtaattaaaacttatatgattacattttgaaaatgttatcaataaatgtaacataaaatcataacactaaattaatgttaactatttataatatataacactaaaataatgttataaatactatttaataacatttaaaaaatgtaattaaatgtcaatacttttaattacatgggctgtcttaacagttgctaaaatgttataa

SEQ ID NO: 144272 - DNA, 621 bp, Cannabis sativa
  modified_base (40)..(41): a, c, t, g, unknown or other
  modified_base (95)..(96): a, c, t, g, unknown or other
  modified_base (309)..(334): a, c, t, g, unknown or other
ctcagatcgggattggaacttgggactcagacccaacctnnaccaagacccaagacgggaacccacaactagaacctgatctggacctagactgnnatccagacccgaacccaaactcaaacaaggactcgaactctgacccgaactgaaactcgaagtcagaattgcaaatggaactagaaccaaagtaggactagaaccaggacaaggacctaatcctaaaccggaacccagataaaaaaccaggcagagaccgaaacccgaatcgagactaggagtcgaactcgaacctagaccgggacccaaacnnnnnnnnnnnnnnnnnnnnnnnnnnagaatcaggatagggacctgagaaacaaaaataggaccaggacctagtacacgaccaagacccgaacttgaacctaggagctagctcgtgacgcaacacgaaaaatggaaccagtttgggacccgagattgggatccgaatctcgatccaaggcttggacaaaacctgtattcggtgtctgtatttgggacccagccctagacctgaaccctaacaaggacccgaacccacacccagaccgaaacctagtcccaaacttaaaagtggacctgaacccgtaccctgtg

SEQ ID NO: 144273 - DNA, 686 bp, Cannabis sativa
  modified_base (259)..(259): a, c, t, g, unknown or other
  modified_base (346)..(349): a, c, t, g, unknown or other
  modified_base (616)..(618): a, c, t, g, unknown or other
ttacattagtaagagactcatcgaagccgagggccgatatccgttgatagaaaagctcgcctactgcctcattctagcgacaaggaagttgaggccttatttccaagctcatcttgttcggatatatactgaccaaccgctacgacaaatactgcaaaagccagatgcttctagacggttactcaagtgggcggtagaattgggtcagtacgaaatcaacttccaaccccgaatagcaatcaaaggccaggccttggcngagtttgtggtagaatgcacaggcaaaaaagaaagcataccagaaaacaaccccgagccagaacctcagccaagtaacaatgaagannnnccggcctggaaactacatgtggatgggtcggctacagatcaattatctggtgcaggaatttccctcgtcacgcctgggggcaacacctgcacgttgcggtcaagtttggattcaaggcatctaacaacgaagccgaatgcgaggctctaatcgctgtacttaagctagcccgggaaatgaaggccgaacacattgaaatctgcagtgattcacagatggtgataaatcatgtatccggtgagtacgaggctcggggagaaaagatgnnngcatatctgagcaaaatacacgacctgctcgcacaattcaaaagctaaggtctcagacaaattccaag

SEQ ID NO: 144274 - DNA, 536 bp, Cannabis sativa
tttatttatttatttttttctttggtggtgggtttgtctccacctcttgttcttgtaatggaatatatgtggggaaagcaaattccaatattctattattcttaaatgagcatcgttaaattgcatattctagctctactatatgtagagtgttctatataatatacacatatgtatatatcttatatttctattgtatcaattatatcattacaaagatcaagtcccatataatgatattatacccagtactgttataatatatcttatttcattcttttaattaatatatgaagaatttacaaattgataaaactcagcagacgaattttcaatcaccaaggaaattaaaactacttttaatgtgcattatctatgaatgaaatttattgcaaaaatttaaactgttatgcttaatttttcgatctaattaataaaaaaactcttatttttatattatatgcgcttgggttgttctatcaacggagaggaaaaaaaaattatttagcaaaaaaaaaaaaaattgagtttgagtt

SEQ ID NO: 144275 - DNA, 531 bp, Cannabis sativa
  modified_base (49)..(52): a, c, t, g, unknown or other
atctcaagaattaacatgttcaacttgtaaagaggaaacacaatgagtnnnntaatcaattaacaagtgagcaatgattatttgagcaaagaaccaactcattcagcctcacaatgagccatacttaataaaaagatgcgaaaacttctttcaatccacatattcacacacacttgagaaagacaataaccaaaaaaacttttatcaggactttaaaccaagattttcttcggcgtgtgctagtgacctcatgtgagaacattggctcactctctcaattttttttaattaaactgcccatttttttgctgccttttctatctttagtcactccggctctttcttttgcaaccaactatggctttcactctccctcagagatgtagccgtcctcttttaatcagaaatattaatatagaatgagcatgctacttattagtaaatggactaaagagagctcttcccattgcatctaaaagaggtagcctttttagctgggaaaaataaaggttcaaaagatcctgaaaaatt

SEQ ID NO: 144276 - DNA, 941 bp, Cannabis sativa
attttcactactcttctcagaatagttttagtttaaaagcataaaaaataactctataccgtaaagttatcaacgttcgaggtgaactcagcgtgaaaatggccaaaatccttgaatgagggtcccaatcgtggaaatactcagcctatgggagaggacaattatgaaatggaaaactgctgccttagacgccacctggagaaggcacggtggcgaaacgctgaactagagcgtgatgcagccgtagctaaggcggcatagaagactaacactcaaaatcaacctaaatctggagtgagaagaccacgaggcaggcctcgtggctcacgaaccaggagacaggaaaacatctaggaagaacaacctaggaaaaatgagattccccttgacaatcagaaggatcagctagaaccctctcatagagatgagaatgggaggcaaccagaaactgatgaacaagaaattccacttgaaaatgaggaagatcttgggacttaacctagagaatgtaggtcacctacgagaaatcaccaggtttctccccgaacccatagaaagagggctcgtacagaccctaatgggggaaatacgacaaaccacactcaggggaaaagaacagagcgtgaagaagaaagtgtgacttcatggcgttcaaggacccacagtcgatcaactcaaagaggacaaagtacttgacgatctaatgatcaagaaagtatgggaaccaataaatctgcgagtcactcaaggatgaggtctatgagcaagactaggtccgtgagtatgacgcagtctgtgagtaaaacgaggtttgtcagtaattactcccagtgagatctgcgagagcacttgaatcggaagaaacctgatcttcgccaataactcagtccaaagcaagaggatcctatcaaattgcaaatagacgagttagaggacaagtt

SEQ ID NO: 144277 - DNA, 524 bp, Cannabis sativa
catccaaatcgagaactttaagattgagctttcaaaccaggcctgaccttgtcatcaaatacagagtacgtaccttgttgttgtggagttcgaacttgactttgagcttgagtacgagtttgccttttgggaagtctccaatttttgtcaccaagtttgagaatttcgtaacccttttctcatctcatcaatgatgaaaaaggttacgaaattctcaaacttcgtcacaaaaatttacaagatgagggtgctttaattacctccgcctgccccaaataaaaacaaaacatctatagatatataagcaattttgaatcacataaaataaacaattgaattgaatattactgttatttcaagccattactgttaattactgttatttatacgaaaagagatattaattaggttatataggattattaggaaaagagatatttatacgaaatcatagccattgttcaaaaaattagaatatatattatgagaaattggtctactacgtataatacttccatatatta

SEQ ID NO: 144278 - DNA, 561 bp, Cannabis sativa
  modified_base (523)..(530): a, c, t, g, unknown or other
atctgagagagctgactcgacggagcattggatctcattgaaagatgtctggagttgattagtgtaggtaccatgagtatgtttccttatagcaagatggatgcctcgatactcattgttcaagttcatccaactgttatgcttagtttgtataatgtacattatacgctaagtgttctaacaattaacaagtctcgcttacttttcttcatacatagcgaggttggttcctcgctttgtattaatgatgtcgtccttgctatcatatcttcatatacgaaatggttttcttgttaatacgtgaattaatagtttgcacatttgtgtctcgctcaagactttccaatcaacgagttatagatatactctaccagttctgcatttaatgagttattccattttaatgttcccaaatataattttcattatatttgttgaagcgtattctcccaagttggcatgtgtcctcctctgaagtaatagccgaatttcagatataacacatgtaaagaccgcttagttnnnnnnnnaaattagcagttaattatgaaaattatttat

SEQ ID NO: 144279 - DNA, 1015 bp, Cannabis sativa
tggtcatgctttgggacatgtgtgcaggtcggtacttgtttaaaatcgacggagatgagtaaggcatcttgtgtttgagggatgttaagatcaagagcatgatgctgaagccgatatgccatctgataatggagtgtggtgccaagagaagttgggtcttgatctactcctactgtttgtacttctactttaaaagcatcagtcagtcgattatctttgagagacatgttaaaattggaaaacagagtgacgaccactgttcctgcatttaaggtagtttcaatagtagttatacttgcatgttgatatttcctcattcgagtatcaagaagaccgatacgagtactaactagaaggcccttcctgccatgataattgagagcaaggcgaatagcaccaaagtggatgtgggtataaccttgtgccatccattgtggacggagttcaagtgaaattttgagagtcacaaattggacctctggtgttggtgcaagttggcactagctgaattttaaggcttgaatgtattcttttgtagctttgaaagatggtttaataagtgcattaacggatctagtaaaagaggaaggagtcttggtgaaaggttaatatggattaagagaagaagagaatcagaggtaattttatttttatctggaacataagaaagttcgtaaaggaagtctaacttattagaagttgatttgcgataggtaggagagggtgcaagtgcaagaggggcaaaaagaggagtactgagtgagcttgatgatttttcaaagttagccatagtggaaagtagagactcgtccataggatagtatgagttatggctctgcttcatttcaaaaaatcttacttttagtcacaataaaatttagggtaaataccatttgagatcctatgttttacaaaaagctaccaattggaccctctattttgttaaatgacaaaaaagaatcttgtattttctaaaattgtacaaataagaccctgaactgatattttgtcaaaa

SEQ ID NO: 144280 - DNA, 719 bp, Cannabis sativa
  modified_base (659)..(675): a, c, t, g, unknown or other
agaaagcaacaacactaaaaatacttagcgtatattatgcgatatacaaactgagtacaaatagtatgacgagtcaagataacaaacagcgaggtgtttatcatgccaaaagatgtcttgcatgcgaggaagatcttctcgaccccagaaggtgtaaccatcagggttaagacaatactagtctcgagaagctaaaatgacaagcagctgctcgctatcaaagtgatcttggctccctcctcgacgaggtatccctatgagatacagcttacggtatgtctttaattatgcgctcatctcggcccaataagggcgggatattcatagctgtgtaaaccctcatttatttggcttgatttgtaattcaattcccatgattttaaagataatagccgtaaatgtattttggtcagctttttaattaactgccactatgcaattataaatagtagcagataagatcaagagaaagagaaaaaaacagactctgaaatctaaataagattgactcgtggactatgcagaattttaattgcaaaaccacgtaaaaattcggtgttccttctttttctatagtttttctgtgttgaatcatatttgtgaggctcaaatttggttaacgaaaatttaggttaatagaacctaaccatatcaggatnnnnnnnnnnnnnnnnnagatcaaccattgatattgacttaaaaagatataacggtaagtt

SEQ ID NO: 144281 - DNA, 748 bp, Cannabis sativa
tcgagattaactccaagttaagtatgcttaactataaggtaagctcatggtgggttatctgaaagtagatgcatcattgtcgttcctaattatattttctacttttgtcccttcgttaattaaatctaatttccaccattcctttttattgacctcttaaaattccttatcagtattgttcacttaaccttgaggagttcctatcttaatgtcaatttgaatctggttcatctcaacttatttcaacctgtatcaattctcttaaactgatacaacttttaaattttccaatcatttatacataactaccattataaagttaattgattcaatacctatgataaaagcaatactactcataccaagtatataagttgaactggacgtattcatctctcgaatccttaaccaacaataattaatcaaagatcataccttgatcctgaaatcccattctttcttcagtagggatcttaataatattcccatcattaccacaaaggtttcactcccgggttcatacgctaccattgttcccttgaaatcaatgctaacttcgtacttggtgaattgttctaaatatcatattacatttaattacatagcttgttgtttaataaaacaacctactctattatctaataagataattaataatccatgttacttaatcaagtaactaatttcttctgttgcccaattaagacaaccatattaaccctacaatgggtttatagagtaataacta

SEQ ID NO: 144282 - DNA, 953 bp, Cannabis sativa
  modified_base (916)..(927): a, c, t, g, unknown or other
ttatcttaattttcattgctttctcttaattaagaaaataaattatgttgtcctatctcaatacctctcaaaactaaaatttactaagctaattatacaatttgaggtgtaggtttagccacgtaatcatatcaaaaatagttttaattatttaattaatatgataattatctttaattttattttcttttcttatatacataattttatttttatcttttgtatgatattagtttataatattttttagtgtgatttttcttgtattatttgtaaataaacaaaaacgaaactaatctatgaatatatgatatttgaattttttttttaacattattttttaagttctcctttaaattatatatctaatagatttattcatgacttaacataaattttaattgatgaaatacttaaatttattttataattaatttttaattaaatgatagatacttaaacttctaaggtataaagtaatcttaaaaagataaaaattattttaaatatttgttacaaaattgttataaaatctaaatttattttatgaagaaatttttatttattttaaatattattaattgacaaaatttattttaaatatttgttacaaaataacaataattattatattaaatattatataatattaatttactgtgtaataactatcttccaaatatgacaataaaaattaacatgtatttaccacttaacatccaagcacacattttattttaaatgtaatgtaatctatctagtataattgaaacttcttcaatagcagtaagcattatatgtaacaaccatataatgtctgattttatcgttctataaaaatgctttttaaaaaaaaaaaatgtgtacaattttttttagaaataattacataatgcactattttttgtaaaaaaannnnnnnnnnnnacatttttacatttaaagaatttttt

SEQ ID NO: 144283 - DNA, 1517 bp, Cannabis sativa
gtaaaataattccaacaataatcaattccaatgattagccctcctagtgttggttcgtaattagttttggtcaagatacatattgacttcatatttggccaatcgactgcagaattgtatttaatgatgatgcttgccacgtgttacacaataagaacaataaagtaaaagaacacatgattttatagaggttcggcccccttagttaacgggtaatgatctactctccttttagtcgtattaataccgagagataatactacttagttcactatagtgataggatctgaagtagctctctaaaggttacattataggattcagagttggaaaatctcacgtatgagtatagcaagtgggcgtgtgagagagagatgagttatcaaacttagaaatctaacttagagttttgaacttgcacttagtcacttagggccttacggtttaagtaaggttctttatataggagagcctacaccattcaaatcccttagaaataggtaaaataagtcattatttacatattaaattagtaaaatacaaataactaaaatgccccttgaaaagagatattttccctctattttcgtgggctgttaaggcccgattcacagtttggcttgctgtccacgtgtgaagcggtgcaccaaaatcctatcaggccaatgtctggtcagccatgcacctgcaggatgcatgctggccggccataggatgtctagaagttggctgacctatgttggccatagagctggccaggggtggccggctagcctccttgaggtggctggttcgtcattcgtcgtcccacttgagtgctcagaccccctattggttgaagtgccgagtagatgacttggccttcttgttggcaagttgtactaccacgtggcactgatgttggccacgtagacatgccatgttaggtgggaaaaaattgagataacatttgcccccaagtccctgggcgaatgtatgtgcaaatagggactttccagcttagttgagactaatgtagccttaactaagtaaatcttgcatgatatattgcctttgaaataactgctcttgactgtttgatctcacttgttgtagtaagttaactacattgctcttctgcatgctttttagttgaacactatatggcaagtaaaaagacagttccacagaagctatataagcttaatggagggaaaactctcttcactttccacatttcattccctctttagaaaaatcaacttttgaaagctcctccttctctctagaggctgacgccccacattgcttcctcccaagatttttgacgccattttgacgatccaagcttcctattctcttcaccaaagtaatcttagggccagtttggcacagctgtgctctggggaaaagcatttgcagctgtgttgtgagaaaaattagctgtagcataactgtggaaaaaaaagctgacctgagtgtttggtaaattataaattttaaagtgctgggagttgttaaaattctattataataat

SEQ ID NO: 144284 - DNA, 663 bp, Cannabis sativa
aattatattatatatcatcatataaaaaaaaaattaaagttacataagggtaaatattaaaaccaaaagattaaaaacaatcactaccatagttgtgctaaataacttgatagaatgaaattttaatgatttattttaaaggtttagagagtcacttagtgttctttttattatcattgtggcttttaaagtttgataattttttttaatttcttgtatttctatcataacatgttgatgtggatgttatttttttattttggcttggtttacaaattctcttaggggctatttgaaatggattaatgtgaaaagaggaaaaataatctcaatgatgactttgtttgttatgaaattttagattttttaagtcatttaatacttttaccgtagtatttcaactaccctaaaaaggtgtaatgttaaccccttaaaaaaaaagtagaattcaaacattacatcagttatttaaacatttgatgaaaatttttattaaataaaaagtcaaataataaatttaaataaaacaaaatattaagattatttattttaaaagaaaaaaatgacatttataaaaaaaaaaatgggtaaatgttattttggaccatgtatgtattttgcaaaagttactaattggatttcctgttttgttaaatgacaaaa

SEQ ID NO: 144285 - DNA, 524 bp, Cannabis sativa
gttaacttctcttttactattcccgctcttcctatgaatgttattacatacaaaaaacttatatttttctacttaatttccgtacctctattgtggattcctagccttgattgcaattagagtgatccttgagaaacaataattttcttatgaaaccttaatttcatatttattaatattagaacatatcacaatggtatatatatatatatatacgaaaccttaatcttgaatctacaaacttaaaattatagaatgataccttagatttaaaaggaaatttggcagagaaataatggtgctgatgatattgatatatttaagtaaataatagtggtgtatataaatagtaagaggttggtggtggtgatatatgagtatgacaagaatgatggagataaaataatcggttgcgattagtgttgagatgatggtttaatgatagaaaaagaaattgtaaaaaagatgatagagaaaatgatgaaggatgatggtattgatggtggcgtgaggtaataagcaat

SEQ ID NO: 144286 - DNA, 958 bp, Cannabis sativa
gtttaaaaatcacgtaatactcctatgctagttagggtgttacagttgatctcattcaaattagatagtatatgataacattgaataactatgagatcttttagatgtactaaattatcgaattgctacccttatattttaagatcaacaattgcacaatataattgttatctcaaattttgagttgtatgatttgcaatcaaaattgtaacatgtagcaagacaggtcatcataaaattatacctcgtcgatacattaagattgtagagaaaaatcaactattttaaatttttatgatagtatattaattaaagttattattatgggaaactcttatacattttgttttttcaaaaaaaaaaattataatttttgtatacaacaaaatataaaaattgcacaatataattattatcctaaattttggccttgatgacgtgcaaacaaaattgtaactgttattcgtgtttttggtattggacacgtggactccaggtcagcaccgtagacctatcagtgggaccctcaacaaaggagaagtgggccaatcccacctggatatgtccttccatgaacatatcttggttccgcattcgtaaagccttccgtcttcagtaatttatacccagaagacatgtctggtaccactagaccggagagataatactatgcgttttttgtgcagccatccaatcttcatcagatgacatctaaaaaaacagaaaaatcaaaagaaaaataagttgtacacaaaataaaaaaaatataataatgatacaataatattatatacatatatgaataaaaaaatacataccttgctaatgttgttgatagtgtgatctaaaaaaatatatatttttctgattattgagaagaaaatataattatgttaaaaatgtgtactactaactagttcatgcatgctttatatagatagtgtaattaaaataaata

SEQ ID NO: 144287 - DNA, 673 bp, Cannabis sativa
cctggtaaaataattctaacaaatctgcctactgattcatactttgtaatcctaagggtgctattgcagatcccacctatagtgatttgggtagtatttccctcagtatatataaccaaaaggggagtaggtcattactcgctatcacaagggggccgaacctctataacaaatctttgtgtttattgcttcattctatttgtgtaacacttggcaagtatcggattaacacgacctggctgtcagttgatcactttttgaggtcaacattagatttgatctaaattatactttcactagtgaattaatggtacaaaaggataattaagtaattagaagtgtagaatggtaatttgaccaaaattaattacgaattagcataaggaggaataatcactagaattgattatattaatggacactatagtaaaacttagtaaatataattttataattactaagaatttaattccatatttatattggggtaatcatataattaataaacatgattatttgattgatgaaattcaataaataatttagtttatgagagcttagtattatcggtccatggtcctcgaatctccaccttgaaacactgtcaagggtatggataaaatttgtataatgatgttcagaaaaacctattttgatttgtcaaaatagtaat

SEQ ID NO: 144288 - DNA, 640 bp, Cannabis sativa
  modified_base (570)..(574): a, c, t, g, unknown or other
accttgttaaacacaaagctgcacgagtccatgaaagaggaagacgaggcacttaatgtgccaatcccgaccctattccagcaagttttgatcactggacaagtgactaaacaatgggttatggactcatcagcaacacgacatacagggcagagagaacttacatcaaccatttaattttacatatttggaaaaatctttcgcccttcctattgttgtggtggtctcttaatgactcttaaagatatcaaactgtctccactcatggcgatgaggtcaggcttggatcttcgtcaggagaaaacaaagcaggggtgaagtagcattaaaggtttttccacaagtttgattgcaatcctactaaatctttccttaacctcttctcatttttaggaccagtttagtataattgtgctgtgagaaaaagcaattgtagatgtgtgtgagaaaaaacagttgcagcagaactgtagaaaaaaattgaactaagtatttgataaattataaatttcaaagtactgtgagtcgttaagacatattataatgataagggtaaatagtggcataagnnnnnaaagttttaagtttgtaagcgacataaacccaatgattttttttagtggcataagtacccaatgtt

SEQ ID NO: 144289 - DNA, 1574 bp, Cannabis sativa
ttaaactaagcgggctttacacccgtactttaggaaggtggtagacttcttctttctctgtctgacccaattgactcccaagggcatcaattcttcgtctgccctgttcgttttctacagcacccagaagtggggtatgccatccccgcacgaggttagctagttttttgacttgaagtatactcccaagcaaggcaagtcaggatacttttatttttcccagccagacttcaagtggttgatgggcaccgaggacaaggccttgagcaaaatcgggaaatttgttgacgagtattacatggtggaaggtaagggcaccacctatactcggttccagcagattcttatatattttcgtccacccttcacacgagctctcagggatagggctcaaagaatcactcagctgtcgggtgctgcccggaatatcacttttttgacctcagacgataactttgtggagtacgggctctacccaaaggatttcatttcctagcctgtgaaggagaagaagaggaaatccagtgttggctgggctgagggagctcatcaggagaataaacacattcaactcaagcgtgaagctaagttgaagggaggtgcgggagccaagcagtatgctcaggagcatgctgaggaggaagatgaggttgaggaggagcagaagactccgctcaaaaggaagaagaaactttcggccgagcacaggcctatcgaacatacgattcagatcagggagcccagtctacctactcggccatccactcctgtagtaggaaaggggaaagccgtcctagaggaccaaggagactcgtcagatgatgatgatccatcaggtcttgctcggacggatgcttcttgccaatgtgaaagatacttcatcttgcctttaactttcttgattattatgctttcatatttctcaagctttttcctaaccatgttgctttcatttcgtacagaaatgtctcaaaaaatgctcgaagctctgaaaaagagagtgggaggaagctcaggcttatctccttcgaccaagaagtctaagggtggtgagacaaccttgtccagagaaaaggcaccgggcgaagaagttattgatctctttgaggagccaaccatcgttgacattctaccccaaaagtgactaagtccaaagactcttgaggagggagctcggacaggcccgagcagtcgaagggcagatctgagcttgtctggagtagatatgagcagatctgggcccctgccctacctcgtcatccagctaagagaggcaaagatatgctcacctactacatgactcgatcggtccctaaggtgaatgagcaactcggcggagctgataacgacctttctctggagttactgatgggaggagtccttaaggagtttacgaggttaagtcaatcttaacagtttcctcttatccttcattacttagcttagattttaatgttatttatctgcgcagactggtctgaagatggcatatgcttattcctgagctaagtcagctccctctaagaacgctgccatgtccaacaccatgcgggcggaagttgacttggccagga

SEQ ID NO: 144290 - DNA, 613 bp, Cannabis sativa
taactttattcatattggtcattgcgatatataatctctaacatatactacaccttcacttagatgtcatgctacattagtaattcgaatcaagattacttgcattgaacaatgggcatcagtgaactgtactagcaaccgttgattaaagactcctaaattttaatatattgctgactattttattcatggctaagtgatctcaattcttcatacaactataagtcacaacctcttatttgaataatgaatttttttatatttatgtataaattatttaatattaaatattaataatttaacaaataagtatatatgaaatattcaactcttatttataatctaaaaaatatctttatacgcttttcaggcttaatagagcaggcctcggctaccccttttaacttctcgaaggcaatagatgatccggagttcccatctaatactcttatatacatatgatatattttttgtgtggctgtatatagtaactttttaattatggggagacatttattaatagccttttttcatggcttatattttttagacaatctggtaaggtagcctttatatatttaagacaatatttatatactattttttaattttt

SEQ ID NO: 144291 - DNA, 689 bp, Cannabis sativa
cagagtacatggctggagttgaggcaataggaattagcaaaccaagaactgacccagatgaggttgatagaggattaagggggaaagggagaatggtgccagtgtgcaagtttgaactagataaagctcaattagtcgtgatgaacaataatgcagaggtttagccatatacaacgtcagtagcttttcctttgattaacatttctaaagtcacgatgaacaataacttaatttaccttacatgttttgtagtgaccatatggagatgttacaatcaatggttccaagaaatcataaaaataaatagaaatgggttgcagaccagcatcgtcaaactttcattgggtggttaaggaatactattatagcaaagttaaacgagccgaattggagtatctgatgtgttgagtcgtattgcccttggactaacttttgcggtagcaaagcatgaagcgtacattgtaagggataaatatttccatacaaagtctagagatgatgctcaagaggttcaaaatagtggcatacatatcgttgcagaaaccatgcattttgcaagtgcaaaagatagaaaccatgttttaggaactatgacgtattatagggttattgaaaaaatatgggagctcaattattttgcattctgaattccactttttaaatgttcttgggttgacaacaatgttgga

SEQ ID NO: 144292 - DNA, 999 bp, Cannabis sativa
tataatgactgaagacacttagtaatacacagtatacaaactaaatatagcagtcgggtaaacccaaacaaactgatagcgagacgtccatctcgttataggaaggcacgctcgtggtaccttcactaatcagctccagacatcttttaatgagattcacagctccgtcgagtcagttctctcgaataaaagctgacattcaaatgatgttggctgttgaagttcaccttgtcgccaaaaattgtgatttttcagatggagcattatgtcttcaagcgcaggaacgacgaggcttacatcatcaacctcggaaaaacatgggaaaagctccagcttgctacaaaggttaggttactgatgtggtgttctgttcccaccgaaccgagacatcccagaacgttatgatttacaacgtatttaatacacatttatattgacccggtaaaagtggacccatcacagctgtatgatgttcaaatattaaccacatttattttacgtggtatgaaatcaaaccccacgattttaggggataattattgtaagatatcagtcaactatgtaattaactgtcctatgatgtaattataaatagaggcaagttatactgaaaaagagacaaaaaattcataagagaaaaggccttagaactatatcagaaatctaataagatcaactcgtggactatgtagaattttaaccgcaaaatcacgtaaaaaacctttgtgttcttatctcttctttgccatttttaatttatgtgcaagattatcattacttaggctcaaatatagttaacgaaaatcagcgttaacagtttggtgctttcattgagagccttcgtgaaaatagctcaaaaaaaaccctccctacattcgaaaaaaaaaaaaacaattttcttcatagctaacaatggagagaacattgacacaccacatgaaaaaacccctcaccgtctaggaaaagagccaatgggctccagaaggccttccaactcac

SEQ ID NO: 144293 - DNA, 548 bp, Cannabis sativa
tttaacatgtaaaaaaattcaaggggcatgacttggtacatgtcaaaattcgggaggaaaaaatcttaattagcttttttttattatttatttatttcttattcagatttcatttccttggctactctatattttattttttattttatttttatttgaaattatataaaatatgatttttttttctaactttataaattgttttatagggatttaacttttcctctttatttatagttttttatacttaaaaattaatgatatatgattattttcttataaatttataaaaagaaatataatgatgccatatttttagtaatagctataatatttagggaattttaagagttattttacaattttattaactttttcaaattattttattattttaatttttttagttgagaaaattacatattttcacatgtatttataaattttattattacataattattctaatatattgtcatcatttattattatttttaattattttttttttcaacgtatatgttttgttctacattaagggtctgttt

SEQ ID NO: 144294 - DNA, 500 bp, Cannabis sativa
  modified_base (329)..(337): a, c, t, g, unknown or other
ctcgtaacatgtcttccagtatctgaattgtccttttagactatccatcagtctaaggatggaaagttgtactaaattttagtttggacctatagccgactgaagactctgccagaacttaaaggaaacttcggatctctatccgagactatagactttggaacaccatgtaaactcactatctctttgatatataactctgcgtacagatccactgtaaatgttgtttttaccggtagaaaatgtgcaaacttcatgaatcgatctaccacaaccataattgaatcatacatacttgtggttctaggtaatccaaccacaaagtccannnnnnnnncctcccacttccacttaggaagtgttaaaggctacaacaaacctaccagtctctgatgttcagccttaataagctgacaagttaagcaccgagatacaaattctaccacattcttcttcatctcgctccaccagaagtagggtttaagatcttggtacatctt

SEQ ID NO: 144295 - DNA, 642 bp, Cannabis sativa
  modified_base (36)..(49): a, c, t, g, unknown or other
  modified_base (112)..(118): a, c, t, g, unknown or other
aattcatacattatatatattatcatgaaataaatnnnnnnnnnnnnnnaacattaaatgttatttttgatctttattaataagtaaatgtgattatattgaaatgagtttnnnnnnnggcataaaacccaacagaaacacctacacgttgcagtaaagttttggttcaaagcatctaataacgaatccgagtataaagctctgattgctggcctaagactagcccgggagatgaaagccgagcacgtagaagtctggagtgattcacagctggttgtaaatcatgtatccagggaatacgatgctcgaggagaaaagatgatagcatacctgagcaaaatacatgatctgctcgcaccattcaaaagctacggtctcagaaaaattccaagggaagaaaacacaactgcagacgcgttagcttgattggcaagtagtaatgtaagtgacaaggcgaacttggttcctatccagttcctcgaagagcctagcatcactggcacagaagaaatcaaaatgattgacacttccccaaacaggatgactccaatagccgcctacctcaacactgggaaactcctagataatcggaatgaagctcgaaaaatgagaaggaaggctgcacaatatatcatagtagag

SEQ ID NO: 144296 - DNA, 636 bp, Cannabis sativa
cgatccgagttttgatttaagtctgcgtcccaatccgggtttgggtctgggtcgtactcggacccaagtttggggtacgggtctaggtctaggtctttgtccgagtctgggtttgggtttgagtcagggtatgggtcctagatccaaacactaactgcaggtcaggtctaagccccgggtgtagatgtagatcatggtctcgggtcccagtctagttccacttctggtcccaggtcctggtccgactctggggtcggattctgggtctaagtcccagttctgatgcccgtgtcaggttcaagtccccaatccaggttcgagtcctaggtccaggtctaggtccaggacccgatcggtgttcaagtccttgtccgagtctgagttctgatcttggcttgggtccatatctcggtttgagtctagctccacgtacgggtccgagtcctgagttccgatctaggtcagggttccaaggcccaggtcaaggttcgagtcctaggcctcggtctgggtccctgttcgggttttggtcctagtcctagtttcgatttcgatttagtatctgggttcgggtttgggtctgagtctaggtcagggtctgagtcctggtccgagtcttggtccgagtctagattt

SEQ ID NO: 144297 - DNA, 610 bp, Cannabis sativa
tctgatcttgtaggtagttttttttttaatatgaaaaatgagcttatggagctctccttttacaggtgaagaaggtctacaaaaataggagaaaatacaaataagatgttcttgaccattgacgatgatctaacagtgaaaattagctcttggtggtgatggccattttttggagcccgatgcgtcctactatgagtaactcgatgcttattttcgtaactccatggggtgaattttaatgacaatagcttcagaattacaattagagtgtgagacatgacttgatatatcattgaattagcttcaaaacgcaagttgaatcacatcaatcagatcaaaattgagtgagttatgcctgttttactgagggcagttcatgaccaagtgcccaagtcgacatccaacgcccaggttgacatcccagcgcctaggttgaaatatggcgtcaacctggatgatgtacattaagatgcctaagtgatatttaaaatcacttagtcagtttctgtgttctagcgaagttagtcaccagttctcagagatgttgctgtttttgcaaaaatgagagactcaaaactctttatttttgagtgagccagaaatgagaaat

SEQ ID NO: 144298 - DNA, 731 bp, Cannabis sativa
tttatttttcagttgacagtttactctatgttatgtccccgagcgaatgagattgagtttgtgaattgcatcactggcggtcaggcgcctttattgttgacttgaaagaacttgtgttgggtgacgatgggaaaccaacacaagatgctttgcgaagccaggccgaaaagcttgcctcgacattggaagaacgagcagatgcagcttgaatatttagagactctacaccacgtgcaccgtctttagtaccaaatgagtctggtgttgcaccatctgcagcatcacaagatcctcctcttcgcttctcagcatctattcccaacacctcagaggctggcgaaccagtataccctgccattttggcaaggttggagactgtggagagggattgctttgagggaagggcagaccgctttgctaagacagacagcgattatggatcagttgaagcccataatgagacttctccaagatccttgaaggccgacaccagatacactgccacagccacaaccagaaccaaaagaagaggcttagtcactggaaaattaaatcatgctcccaaatgattatagatcggatgatgatgatatgttctgtacacctaagaacacgaatatcacaaacatcggggatactcaggattctgaggtataggtgttagagaaagctccagaactagtggagaactggaggagagaaagcgccctaggtggttcgatgagtacact

SEQ ID NO: 144299 - DNA, 776 bp, Cannabis sativa
taacaatctcaatagttcggagaaaatttttaacgaccaaaaaagttcagggggcacgatttaatacatgtcaaagttcgggggaaaaaattagtaattaatctaatttttaatgttcttattaaaattcgggttgctttttcggaaaaattacataagctattacttttggtaaaaaatttacaattttacatttgaagtttttttttttttacatttttacattattctataaaaatacaataaaacaataaaaaattcgtattaaagtaacaagaaaataacataacaaaaaattatatataaaaataataaaaaattacaataaaatagcaagagtacaatgtaaaaatacatcaaaagatcgtattttatgtaaataaaatcttaaaagccgtaaaaaaatatttaaaattccgtacaaccatatttttataatttttttgttgtttttgtatttttttttttaaataattctttgtttttttgttatgttatagcccatattgttagtgatcaatagttaatagatttagcatctgtgtgtgtaaacaacatgaataaaaattcatgattacttaggatttttgtcgatctaccattaatcattattataatatgaattaggtatctataataaacaacatatttgataaagatggtttaattacatatcggtcattgcaatatataatctttattatatacaacaccttcacttagatgtcatgctacatcagtaatctgaatcgagattacttgcaccaaataacggg

SEQ ID NO: 144300 - DNA, 1040 bp, Cannabis sativa
aacatgagttggtgaaataacaccgaggagaatgtcaggggtacggcattccaaaagttaccgaaacgaccttctttcgctgtgttattcaaattgtactcctcaaactgagacttgattttcgcaaaagttccgatgcctctatatgtcatccggccagtaaaatgctcagatgctggaattatgagtgtaggagccatctgaaaaaaataaataacaaagtaatattactgtcaaaaaattataaaatggtcaacataacgtcgacatcatgtcgatattctgtcgacattatcaaacaataaacaattacataattttgtcgataaaatatcgacatcctgtcgacaacctatcgatattccaataatatcattacacctattcagcaagacaaaattgtcgacatcatgtcgacattcggtgatattatcacactcagcaattacaggaagcaataaaaataacattgtcgataatatatcgacatactgtcgacatgctgtcgatattccaacaaaatgaatcacatctactagcaaatcaaaattgtcgacacaatgtcaatgtcgacatcatgtcgacatgaggtcgacattatcaaacttagctatcacagaaagcaactacatcacaatgtcgacaacatatcgacataccgtcgacaaattatcgacatcttaggtcaaaaaataaacttaatcaactaaattagtgtgtcgacatcctatcgacacacctacgacatcctatcgatatacattaacaacacagacaattctaattgtcaaactactttcatgtttcgtcaatattatatcgataacctatctatatagcatcgataacattgtttaaacaaacaaacaaacatccaaatatatcgatatcctattgatatttcatcgataccaatgtaaaaaacacagacaccattgaaacatatctaacatctacaatctatcacaagaaagagcacaaaatctacaaaaatttcactaatctcaacaacatgtaataattggcatccaaatctatga

SEQ ID NO: 144301 - DNA, 854 bp, Cannabis sativa
acattaaccgaccaatttccatctctaaccaagaccccaccctggactcgaactaggactcaaaccctaacctagatggagacccagacccaaacccgagcccggagacgaaatcgaaatcggagctgggactaggacctgaacccaaacatggacccggactaggacctaggactaggacctggatgggggactcggacccggacatgaatcaagaatcaaaccaaggactcaaacctagatctagacccagatagggatcaaaaactccaacccgaactcagactaggacttgaaccccaaccgggtcctagactcggactgggacctaggaaccggaccaggatggggacctggatccgggacccgggcttcagaaactagcaccgatacccaggacctgacctcggacccaaatcctaaacccggactaggaccaagacctaggacccgaagtggaactagactgggacctgagacttggatcctgatttagacccggggcttaaacctaacccatagtcgatgtttggatttgggacccatacccggactaaaacgtgaacctagacccggggcttaaacctatacccaaactcggacctaaacccggagccagacccagactcagacctaaacctgaacccagacccagactcggacctaaacccgtaccccgtgacccaaaactggatccggaactgtaagcgtaccgggacccgcgaataagaccaaccgagggactgctacccagtctcattcccggaactagaatctgactaggaccaagacccagacctggaccgggacacggagccaaattaaaactcagatcaggactcaggacacgaacc

SEQ ID NO: 144302 - DNA, 1371 bp, Cannabis sativa
acccgaccccaaaaaaacaaaactgaaaaaaaaggaagggttccatccggcccatcgagccttcacccctgccaaccattttaacagggcatcaggccgcccataaccccccatcgggcctgacaaaaataaaatgcaaaaactaggaaaaaatgcagttttcacaggcaacaaatattttaacacaaaaaatagcaaaataacagcaataatccacaaatcaagcatcaaaacaacattctaaactaaatataacaacaacaaacaagattacataaacaaacaaaaaattatccattgcttgtagaatgttgctccgtgtatgatgctccctcaaaattttaaagaaaataggtagaatagcttgtagtgtagtacattatagtgtaatgaaggtaagaaaatgagtggagaataagtgaagagaatttttttttaaggattggtagtgtgggagctcgggtgcagtgaagaagagagagggtaggggtaatgtaaatgggggtaaaattaggttttaggaaaagttatcccattttacaaatcatgcatagtattaaattaggggactaatttttaggtttattaagcaaggaatttcaaatttccctatataagtatgcgtatattataatataattacatatatgtacgaatgagactgataaaaaaatatagagcccatgttcatggtcagtgaaacagggttttatataaacctatagtcagtaaagaagaaaaaagaaaatatatatgcaccgttatgtatttgtcagcaaaaacataaaagcttactctagtgaagaaaatagtcactatccgctgagaggcatgtacaactttttaagaaaaataatatatgtgtatatatattatgtcatatgatatataaagataaatgggtatacataatacactgatttacagttacataattcaattgaaaataggaattgaattataaaataaatatcctagatactatctttaactttaattgaataatttaaattaaatttgagatagtatttgataaaagataaattattatttcccaaattttagaataaataattaaatatcagtcaaataatctttttatttctaaatataataaaaagatcgcaaatatcaattttatcacaaaaaaggttgtaaaattctaaagccatacaaaatggcacaaaattccaaatgaggtcattaaaattaactaaagatgtcattcacctcacaaaattttaaagaggtcattaacctcgcaaaaattgcaaaaatagtaatttcacctaaaagttaaaaagtgcactaaaattcaaagccataacaaattaaatggcatcccaaaaaaagaggtcattcacctcttaa

SEQ ID NO: 144303 - DNA, 951 bp, Cannabis sativa
ggacttggacctaggccttggaacccagacctagatcgaaactcaggactcggacccaaactagaccataaccaagccctaaaactcgagcttagacctaatgccggacctggtcccgaacccagactaggactgagactcgaacctgaacgcaaacttgaactcgggacttgatctcggacccagaccaagcccttgatcgagattgggatttggacctagacatggacacgaccttagacctagaacagaatactgacccagacccagactgggatcaaaacacgagacctggactagaacccaaatgtagacccagacccgaacttggggcccaaactcaaacctggacccagcccgggatccgaaaaacccgtacccaaactcagattaacactcggaccccgaccctaacctggacctagaccctgactcgaaaccaaacccggtcccagaattagaactgaaactgtgactaggacctggacctgagaccagaaccgaacccaaaccataacccaaacctagacgagacctagactgagaccttgactaggagtgggacctgagaccagggacctaaacttgtaccgcgacctggacatgacctggtcctatacactcaccgggacatagactaggttctggacccaaatagggatatgaacccgaacctagaccaagactgtgaccgagacctggacccaaacccggacggggaccaggactcaaactaagactcgggaccaaaaccaaaacctagacccagaccaggacttagtaacccgacttagatgggggaccaagaccagggacccaaacccgaaccaggacctgacctacacccgggaatctgaagtcggacccagacccggacacaaaacctgccctgaacaaaaaccaggacaggaacctagacacaaaccaggacaaaacctgaacccagagttg

SEQ ID NO: 144304 - DNA, 621 bp, Cannabis sativa
  modified_base (49)..(82): a, c, t, g, unknown or other
ttatatgtgtttatttcataatcattttagaagttcatatttagggtgnnnnnnnnnnnnnnnnnnnnnnnnnnnnnnnnnntggtaaaataatttcctacaaatcataccgaggaggaagaactaacaacaacagctatggtggtaggggcagaggaaccaacagaccaatctgtcaactctgtggaaacacatgtcatactgttgtgaaatgctatcacaaattcgacatcaacttcactagaccacctactgaaaatggagcctcaacttccaccaccccaactgaaaaccctcaagctcacctgtcacaaacctcgactacaccagatttgtcctttgcttcgtatatagacagtggtgccacccaccacatgaccaataactcaaacaacttaagcaattccacagattataaaggcaaggcaaaattaattgttggtaatggctctacccttcccattctaaaagttggctcaaattctattcatactaaatctcttaaacatcctttaattttgcaagatatcttactgttgggattttatgccttaaataaaacccatttcaatctaatctgatttgttatcaataaaaaattagaagtcatttatgtttaca

SEQ ID NO: 144305 - DNA, 865 bp, Cannabis sativa
tgtaaaattgctcgtcaagctccaataatttctcatatgttatttgcggatgacagctatatttattgtagagcaacggaagaagaagcctttaatgtcaaggagttattgcatactttcgaattggcttctgggcaaaaaataagcttttcaaaatcatctgttttttatagcagcaatactgttgttggccaaagagataccatatgtgatttgctgggaatatttgaagcagatgaaaatggtacctacttgggacttccatactctattggaagaaacaaaaattctatcctgggttttcttaaagataaacttaggaaaagaataaatggctgggaagggaggatgctttcaagggctggaaaagaagtgttattaaaatcagttgcccaagcattaccaaactatgctatgtgtgttttcctactgcttgttgatacttgtaaagagcttgagaggctcatggcaaagttctggtggaatacgggcaaaactcaatcaaggggtactagttggatgagttggagacgcatgtgtcgacacaagcatgctcggggtttgggattccgtgacttgcgtgattttaatatcgctctccttggaaaactggcgtggcgattattgactcatgatttatctctggttgggcgggtgtttaaagctcgatactaccctgcagcaaatttcctacagtctgaattgggtgacaacccaagttttgtttggcgcagtgttttcgaagctaaggatttgttgctttctggtgttagtagatcgactggggctggagaaactgtctctattatgaatgatccatggttgcctgacactaatccttttgtaatttccactcatcctgctt

SEQ ID NO: 144306 - DNA, 975 bp, Cannabis sativa
cttgatttttttataacaaattagaggttattcttgaatagaatattctcaaatagaggttctactgtatttgatttttttaattatatatatattgattttttaaattttgcttcaaagatggtaaatttttattggttcgcctaagttaaaaataaattttaaaatataattttttttgtagtttatataaaaaaaaataatattattatataaacatttttaattgttatttttcttattaaaattatatcaacaataaaatataatgctaagatataaaaatatgaagggttaaaattctccatatagctattatatgtgtccgctagtatttatttattttttcttattattaatgtatatgaatataataaataaaaaaatatttatataattattttactcaaagtattagaattaaaaaaaaaaataaaattatttgaatttaacacaaaaacataaattaaagtaattaaaataaataataaaaatatcaatatctgatagtggaatcttaatgttgctgaagaaataaaattttggggattaatttaccaaaatataaagtttggggactaacttgccaaaatttatatagtttggagactaatttgccaaaaaataaaatttgaggactaacttgccaaaacatgtatatttagggacctgcagtacaaattttatttttgaaaaataaaaatgtattctataagggaaatttgaaattgcatgcttataatatcttaaattttttttcctaaattcataattaataaaattggtcaaatatgaccacattattatttttccacaaattcctctcccatttaaaaaactaaaatcaaaagacttagttctctctctccctctcgcacggtacacccacacaccacatcagcttcacctccaacgacgacggacgaccacccaccgccaccgatagcaccgcacgatgacggacgaccacccacc

SEQ ID NO: 144307 - DNA, 650 bp, Cannabis sativa
aacaaaacagaggatccaattggtaacttttataaaacacatggtccaaaatggcatttaccctaatttaaaaatatttaggtaactttaaaaatttatgttagaaactaataagtttccatgtagtctagcaagttattatatttgttattttgaaagctaattaattattatataatataatataatttaattaacaaaattataaaatgaatattaactattgcttggctgatgaattttgataatatattaaaaaaattataaaatagtaactaattgctattggtaatactaaatgatttctttttggaaataataaaaaaaaaatatgtgtttcttacattttaaaatgcatgttcaaattgaagagtatatcatactatgatattttttaggtttatttgagtaacgacgtgatcaaaattatttttaaagtttcagatatacaaaaaaaaaaagaaagaagaaagagagaaaaaaaagtataaaagtgttatattgatacctgatgactaactcatttttgacaattaaataaaaacataaggtgtgaagtataaaattctctttttattatatgttggtaatttatagtaatgtagttgtagtctccaacgatttttatgaaattttaaatattttataat

SEQ ID NO: 144308 - DNA, 536 bp, Cannabis sativa
tgataaatataaaacataccatttctggtcacaacaaggacgacatgagaaagtacccttatgcatcaatagttgggagctcaatctacgcaatgttctgttcaaggtcctacatatgctatgttgtagggatttttagttaccaatagaagtgaagcacattctcaagaatcttaggagaatgagagatctcattcatgtatattctagtggagagttaaatcctactgagtatactaattccaattttcaatcaaacaaagattatgaaaaatcaacatctgggtcagtattcactcttggtgggggagctatagtctaaagaagcattaaggaaactagtattgcttatttaactatggaagctgcatatatatatcacaacttgcaaacagataaggaagcgatttggttgaagaaattctacctagatctcgaagtagttctagaagttaaaaaaaaactagtgctctactgtgataacagtagagcagtggccaactcaaaggaaccaagaagttgttggaaattatttt

SEQ ID NO: 144309 - DNA, 937 bp, Cannabis sativa
  modified_base (299)..(303): a, c, t, g, unknown or other
aattacattctgcttctgcaggcgtatatagttttatattttcatatatattattgacatttgcaaaaactcggtttttcaatttctttaaaaaaaaaacttagagaatttattcaattctatcattcaaactatgtgacttttattttagtttatagaatgtgtttaaaaatttagttcaaaaccatagtaaatttaaataaataatagcaaaaataattattagattatatattaagtaaaaaaaaactaatattttaaggcatgtaaaaataatctctcacataataattttgagnnnnnaaattataaatatataataaaattatcaacaaattttattatacatggttgtttatgggtttactatatattattgtatgtatatttttatatttgtcacacttattattggttagataaataatatagtgtagtgtttaaaaaaattgacttaagcttataaaatatcaaaagtacttgcttaattaaagagagagagagagagagttttgagtattgagtgaatattaatattttgatttttttaatggcaaaattgtcttcttatcacactatatttaattttactaaaggcaaagttgtcattatgattatcacactattatgacacttttataatagtaagatatatatatatatattctattaaaatttgtgtcttaacgatgttttcttttagtattctttatattatagtttttaggtggtctttggttagaggtaatgaaatagaatagaccgattatttcattttaaaatgaaagaattcatcatttcaatggaaggaatcactatttatattcttatatgtttactaggcaactaagccgcgcttcgcgcggtcttataaatttttatttttattattattgtgattacaaaatattagtactgaatgagtggtatattatac

SEQ ID NO: 144310 - DNA, 557 bp, Cannabis sativa
gttcaggaatttattgtccaaaagttttagagtttgagtcccctacagaatcaaccatcccatataaacccacccttcaaagcccacctctaaattagagctaaacgattctacggttagtgaacacatagtgagaacccaacaggaagatatttctagtcactgcaggcgcttcttgcaagaaatatccaaaggcagacgccgattcttgcgagaagcagcctgggcagaacctcccagcgtgttttttattcttgtggcaaaacctttgtttttacccaacgtcacaatttcttttgaaccaggtgacttggattttgaaattatgcctcccaagccacgtatgtctaaaactccttaggatctcagcgtcaccttcgaggctgtgttgatagaattgaagttgcgatctatttcagcctacagggcgagatgttgaaaacctgtggaattgaacttgggcaatgatgccaagttagatgagtacgagagggtgagttcagttgctaccaacctgcacgctttgccatcagtaacccggggaccagtggtgagac

SEQ ID NO: 144311 - DNA, 595 bp, Cannabis sativa
tgcctgaattgctattagtactgaattaatgagagtaatccgacctgcaaaggagagatttcttgaactccaactcttaattctagcagtcatttttttaaccaaaagttcacaatccttacctgaaatcttcccagagcagataggtatccccagataggtaaatggcaagacttatctagagaaacccgatactttaatcaatttcttcacacttccttcctccatgttactgcaataaattgcagttttgctagcattcgggtgaagaccagaagtgagagaaaaaagtttaagagcttgaagcatataagtgatgctctgtgtctctccatgacaaaagagaaggacatcatctgcaaaagccagatgattcaattgaagtgaagaacacctgtcatgaaataggaagtcctttttctctcctatcttcttcataagtctagataagtattccattcccaagacaaataatagaggagacatggggtccctttgcctaagtccccttctagcttcaaagaacccatgtaaggacccattgaacataagagagaacctaggagttgtaatacagttcattatcagcttaatg

SEQ ID NO: 144312 - DNA, 685 bp, Cannabis sativa
gtaagggtgctatatgatggaaagttagtgtagggtgccttatgagaccattattttgtggtaatgattttggttctaactttggcaacggagagttttgtgtcttttttaaaaatttccaccttcttataaattacaacaaataataaaataattaattatacaaagaaaaagaaattaaggaattatatttgtcaattaatttgataagcaactttcaggtagaattgagccaaaagattttctaattacattggcacaaaaggattgagctgatttgtttccaaaagtttgaattattacgactaatcaccaacaatctgaaattaggtatgttctctttaaattaatttattcattgggcttatatatttgtgtatttatgggattattagttaaaatattttattcaattttatatataggttttacatatatgacaataatattagtgaattataaagtgtgtgatacatatatgaacttccattgaaacttcaatagctaattgacacatgatatgctgtttctaactgcttctggataaataaggaacaatatttaatgtgcttatgttctgttctttaatttactgttcgtttacgacaggaaggaataatatattgggttaatttcacaaatgcacaaaaacaacaaaaatacagtttcacggaattttaaatat

SEQ ID NO: 144313 - DNA, 545 bp, Cannabis sativa
  modified_base (228)..(228): a, c, t, g, unknown or other
tctttgaggtagaatacacatgtactgtattatcttatacatatatatatatgtgtgtgtgtgtgtgtgtctccagtagttatgttttgagatagcttcatttcttctgtaatgactatccgttgtacgagttggtgcatacacatatttttaagtgtgtgattgtgtaacttgtcgttgtttttttttttttttttgcttgctttgtaataggccattttaggtatntataatgcatatatacatatagaacgacatttacattttaagttagtattaattttattttttacaggttatgttttactctcactcgtgtagaatgtaaaaagtagagaatgttttatcatctcaataaagctaaattagttaatatgcatatataaatatatattgtataacaccaagagtagagaatgtgaagatgcgtatatatatatatatatatatatatattaagttttatttcttaaatgtcatcttaataaaataaaactaaactagttaatatatattatgtgatacaaagagtagagaatgtgaag

SEQ ID NO: 144314 - DNA, 744 bp, Cannabis sativa
tacgctgtttgttgtaaatcgttttttttttttttttcatattttctatataagttgtctcagtaaaacctaaatatctccctgaacattgatctaattctagcgatcctggtactgttgaaaagataattcgattttctaaatgttttatgaagaaactattcaccaattatttattattctaagtcaaaatcatcatttaattgctatagtctgaaatctgtttgcttcaggatttctaaaaaactgtttcggtaaaatatctatatctcatacgttataagtccaattttaaagattttagtgtcattcaaaaagaaatttgattttctaaaacttttatgaagagattactctctgatttggaatatttcaatgtcaaaactttgtatttccaatgtctcctctgattcgttactctatattctttcttagaaattgtttcagtaaaactatgataactctcagagttttaatctattttcaataatcagcatatcattggaaagataattgaattgtctataatttttatgaaggcaacttttattgaattcatttagttgttggtcaaaaataatattctttctgctgtattgaaagagttagaattttaatgttagggtcttgacctatgtgttattatagggagtagtgacgggattacaaggtcttaaacatcggaatttgaggtaagaaaattaagtatgtaaagtacttttttggcaagttaggtgacaaaat

SEQ ID NO: 144315 - DNA, 919 bp, Cannabis sativa
ttcagagggacctgtaggaaccggtcgaccggttggtccccaaaaaaccccacagaactgaaattctggttggggaactggtctaccagttggggaactttagggaaccctacttttctcatttttgcaatatttagggtattaccatgttatccatcgatagtgaaacttagtttcaagtttaagtcctcgaaaagtgatttagcgtgtcacatatcaattttgcgaataatgtgatttaagggcctgtaattcgtcgagcagctgttccactcaggttggccgacatacctgaattcagaaatgaagtaagattagtataatgatatgcatatatgtatacatgttagtgcgcatgttgtggccatcagattagcatatcagagtatcactgaagtgtacatagagttgcacagaaataccatatgataggcctccagatagtatgaattactgctaccacatcaatacgactagagtactgagtataggctggatttgcagttagtcatactttgtcgagaacgttcccgactcagttagtagattgtgattatgtgtatgggcgcctggttgcggcctgaatatatgtttacgtttatgattatgcttttcttactgagtctatcgactcacagttattgcttgcatgtgtaggtacgggcaaggcttgggctaagcagccatgagggcgagcaaatgaagattgtacatgttggggcagttaggcctggagcgtacggtctttgtgatagttgagcgtattttgtttagtcgctaggcaacaacttttgttctatcaactacgaaacgtttgtaaatatttttttaaacgggatcctacttctatataaatatgcatttttgctatgtataaataaagttttaattattcacgattttcaataaactcattgat

SEQ ID NO: 144316 - DNA, 545 bp, Cannabis sativa
tttatgtttattttaaaaagaatacttaagtttttttttcttattttcttttttttttttttccttaaaacactaattaggtgttagtcttggaggagatacgatttctttcgattctaagaaatgaaattttgttttacactctcttgataccaagtttatagttaactctagtaaaaattagccaaagagaccaaatggctacgaatctcatgttggtatctgttcgaatttagtaatgttggattaaatctccacatatactgtccaaatcaacataatatagttacaacaaaattaaaacaagataaagaaactttacatcagaaagtggccttcacacttaactctcaagtagaaccaaagttagttaccaagtttgttaaactgttaccaagtttgttaaactgttgcaactagctttcatgcttgctcacctaagctattactgctataaatacaaggaactaaaatcaggagacttagagatcagaaaggaagaggaaaagcttactgtgctaagctttggagcactagggttaagg

SEQ ID NO: 144317 - DNA, 634 bp, Cannabis sativa
ttttatatttaatgagatcattacaaagttatgtatgttagatataaaatatgaagcttatataaacaatatgttagatttttagtctttgatctttgagtttcaatttcagtgatagcttcggaatgggaaatcgagcttccaagctttcttaactctctttagatagattttactgtttttatcgaatgagcttacaaagctataataattttagtatcttatgttagagagtttcacattactaatgtgtgaaaagataataaaatatataagatgaatgagctactcctcctattgccaattggttttgagatggaaattcattcaccttatccaagagccgaagtccaaaaagccacttgtgatttgaggataataaacaaaaaaaaaaaaaaagagtcaccaatccaaaaatacttgtaacgtccctgtttcaagcctccattgggcccttatacctacggaatgaatggatcttatacacgggtacgccactttggttgcttcctggattgatgactaaccctacaaattaatacgagtgtttccagcgtgctttgtcctcactcacacgctttttgggaaaacttcccaggaggtcacccatcctgaaattaccctaggtcaagca

SEQ ID NO: 144318 - DNA, 545 bp, Cannabis sativa
tgacaaactttaaatgcctcatttacatgcattggttttgcgccatatgatgcatgatccttgtggaactttaaatccaacaaatgtttgtatgctacaaaacaaaacttgcaaaagtaagtatcttaagcctctttcttcgacaacaacccgtggtgacatttcatatgctatttataggcgtcgtaacactggtcataaagtaacagtccgtaaaactttattggataatggttgggttgttccatacaatccatatttactagcaaaatttaactatcatatgaatgtagaagtttgttctactataaaggcagataagtatctttataaatatatatacaaaggccatgatcgtgttgcattcaaccttaccgattttgataatgctactaccattaatgaaattgatacatttcaagctggtcgatagatttcagcttctgaagcaatgtggcgcatttatatgtttgtgatgaatgaaatacatcctactatttactctttacctttacaccttgagaataaacaacttattacctttg

SEQ ID NO: 144319 - DNA, 620 bp, Cannabis sativa
  modified_base (581)..(582): a, c, t, g, unknown or other
tttttcgacaaatttcgaaaaagtcgtcaaaattggtatagttgacgaaaaaatcaccaataaaccagtttgttgatgaaaaaatcagtttcttggtaatttttccagtgatttttccgacaacaatgccaatttcgatgactttttcagtgccagaagcaactccgacgatttttttgacaccggcagctacttcttggacttttccggtaccgacagcaaactctagaaattaaagtcgtcggaattggcattgttgcagagaaagtccaaaaactagtttcttggtaattttcctggcgactatgccaattccgacgacttttttgaagtttgctgtcggtgtcaaaaaagtcgccagagtagctgtcggtaaaagtcgtcggaataattggtattgttgccgaaaaaatcagcaaaaaagtggtttcttcatcccatagtgatcaacataagcatgattgttttttggagaatttccaattttatgtacattatagtacttaattacattatatgggcaaaaaaatcatttacaatttattatacattttattaactatgagaaacatattcttaanntttatgtacaaactatatatggtaaaaataaataataa

SEQ ID NO: 144320 - DNA, 901 bp, Cannabis sativa
agaaaataaagtttagtaaaaattaatgaattataataaatatatttccccaaaataatgaaactaaaattgtttttttagtgcgtgaaactattctaaaagaataaattcatgtttagtgttaataattacagtgtttattaattacactatattttaaaatatgatgttgtatgtgttgttcatgaattcttaatattttatttaacaaaataattagtaattatataagaaaataatatttttttaatagttaaaaaatattttttttttaataattacatggtgtaattacactcaattttcatgggggccatgagtttcgtagagtgtaactgaacctctcaattactcttaattatataattacatacatggtaagacaaacatactaaattatgtaattaccttcaactacactcaaatttaattacaccatgacaaaataacaagtggaataataaaattcaagaaacaccctgttatttttagtgatacttatttggtattggagatggtctaataaaaagataacaacaatatgtgattggtaaagaaatgttttttttttaattgagaaagtttattgtccatttaaagacatattcaataaatccatatacattggacttacattgaacttacatgataaatagatgtaaaataaaaatatacaataaaattttaatttaaaaaaagataataataagtccaaatctaaccagttgaaattgaaattgcttaaaatatgactatatatctgcttcttccctcatctcagctcaattgttatcactctcgaagacattctatattaatttgattttgctgattacatatctcaatacaataagaatagactcatatcatcatcacttgttgtggatttcttagcggtttg

SEQ ID NO: 144321 - DNA, 535 bp, Cannabis sativa
gggggtttcaccagtcgtggatcggggagttgtattatacgaccatagaacttgtggaagctctactggccatacccgtttacgctcttcaagcttcccttaatggtatgcttaattatcttatttactgcctctgtttgtccattgctttgtggataggcaactgctgaaaatgcctttttaattcccaattcatcacacagctggcgcatttccttacattcgaactgttttccattatctgagatcaacttgtaaggtatgccaaatctgcaatgatggaattgtacaataattctcgcaacttaacagttgtcatagtcgcaagggcttttgcctcagcccacttggtaaaatagtcgactgcaactacagcgtattttactctgcccttctctttgggtaattctccaattaaatctatgccttagactgtaaaaggccagggactcgttatggagttcaattgactttgtggttgattggcatacgtggctatccgctaacatttgtcacactttttagcaaagtttga

SEQ ID NO: 144322 - DNA, 1038 bp, Cannabis sativa
ataaaattttttaattttttaaaaattttttaattttttaagtatataaaatcaaatttccctttagttattacaaaaaactagacagatggtcgaaatagaatcagaatcaaataagcagaacccagtgcaccaggctatttgccaacatgggcgctgggtgcttttttcaaagcttccgggatgttgttttgatacttccaaggtttcagaacttgaggacgaggtctcctaccccgttttgaccattccagattgaatgcttggataatttggcatttgaatgatcgaaactagcgcactaggttgattgtcaacctgggtgatgggcttagcaccaagtcaacatgggcattaggctttgcttctatggcctcgggtttgtggttttctccctgagtttgcttgaatcttcactatttctgatgacagaaaaaatactcaggacaatttttcaagaacttgattggaaatagcccaggttgacaatatgtcaacttgggcgctaggtcccttttatggcccttcgaaagttttgtttgggcccaaaaatagttgaatcttaatctttgctgaaaacatagaagatgctcaaaagaattctcggaaaacatcattgaaatcgacctaggtttacaaaatatcaacttgggcgcttggccttgcttctagcacccaatacgtgttgtttcttcctcagaagtatctatttccccatttttttatgaagacaaggaagatgaaaaagtcggatcgtcgatctaatacttagaaggtgcctagattgacaaattgtcaacttaggcactgggtgctcaagcgccgagtgctctgtgtgctaaaaatgaactttctccgaatctgattatgatgcctcaaatatgtctgtggtatgtctagttcatgtcacaatgcaaagtttgacccattctcactaagtcagtcccgaaaactaaaaccctagttgaggatgtcaactgataactttatggtatagagttaatttttatgcttttaaactaaagtattgtgaggaga

SEQ ID NO: 144323 - DNA, 841 bp, Cannabis sativa
tttttagaaatgccattagatgagagaagtttaatgtgtggtagggtgatgatttatttatttatttttaaatagtattgtttaaagttggttgtaataagaagatgatcgatagttgcccttttcacagttagtgaagacattatttcaaaacatatctcaaccattagacttttttacaaaaaaagtcatgatgaaatattacattcttcatgggaactattagatcataatacattcaatgaacattaggatgatgcagtcattgttaacttatatgtactagaagtaaaatttttattgaagaatactttatttgctaaatgggttatattttaactttgcttcacttattaatcagaattgttaaaagtattatgggtgtctagcaccctcctcgatgtcataccactattggtgtaattaagtatcgtgtctcatataattttaaaaaatagttttaagggaatatcattaatcaatcttgagaccctacttatagaagatgttagataccactggtactcaatagcaatgctctttattaattcacatatccattaaaaatgctctaagtttttttatttagttattttttaatttttttcttatcaatattatataattaattatatttattagtgttttcttttttcatcaatttatttagtttatttttctttttcacaatgcataataatttttttaaaaaaaatatgtgttttgtttttgaaaaataaccacatatatcatattttaactttttttaaaaaaaatttatagtttgggttgcttcagtgattaatctggtagtttttatgtaggttgctatgtagatttt

SEQ ID NO: 144324 - DNA, 527 bp, Cannabis sativa
ttagtaattaaaatcacataaaaggtataaatgttgtctttaccttatggaggtatttttgtaaataaatgtcaatttatattttctatgtaataattcctaataaaaatagtaggggtgttcaacaaaatttacaaaccgtccaatccgaataaatcgcccaaaccaaaccgaataaaccgacaaaaaatacaacccgaaataatacaataaaaatccaaaccgcccaataaatatattaggtggtttacaaattattctaaactgcccaattaactcgaataaaccgaattaaactgattaatatattttttaataaaagtgtatataatatattacataaattatatttattagtcaaactattttgtatttaaagtttggacattttagattttaaatctagagtttatagttaataatttttattttgtttgaatattgaagttgaagtttaaaatctatataatattattacttttttttattattttattcaattatttcatgtttattcaattatattt

SEQ ID NO: 144325 - DNA, 531 bp, Cannabis sativa
gcacctagagccgaacctgtttctaaagctccagatagaatggctccagcagaactcaaggagcttaagttacaactttaggggatactttatattgggtttactcgacccaatgtatcaccctggggatctccggttttgtttgtgaaaaagaaagatggttcctcagaatgtgtattgattatcgggaactaaacaaattgacaatcaagaacaagtatccattacccagatcgaccatttgttcgatcaacatcaaggaaagacagtgttttcaaagatgacctacgatccggttatcatcaactcagaattcgggaagaagacataccaaagactgcatttcgaacaagatatgggcactacgagttactggtaatgtcattgggattgactaatgctcctatagcttttatgggtattcaaggcttttctcgttaactgcatcatagtgtttatcgatgacatccttgtatactctcagtaagaagaggagcatcagcatcatcttcgaatggtattgcagcgact

SEQ ID NO: 144326 - DNA, 941 bp, Cannabis sativa
tctacaaccgaggcagagtatatagcttacacagaagcttttaaagaagcactttggcttaaaggaattatagcaaaacttggcatatatcaaagagaaatacctgttctatgtgacagccaaagtgctctccatctcagtagaaattaagtgttctatgagaggacaaagcacattgatctaaggatgcattttattcgagatataatctcaggtggaaagatcaaactactgaaagtccctactgaaaacaatgcagcagatatgcttacaaaatctttgctaaaagtctcaggattcttccttaggtatattacaggttaaggtggagaattgttgtatttgttgtgtccttctaatatacatagttaaagtagttaggtcataactatcttgatagttatgacagttagtttcttgtccactttggacacctataaatacattgtatattttgtaattcaagttagttgttaagtagacattgtaagcttcctattctaaagcaataaagaataaacattttgtctctctaattttagtctctctctctctaagtttgtgacagtgtgagtgcaatgtgttcgaatggttaattggaattctggtttaagtgatgatcggagctgtatgtttcgaacagaatctttcacatatgaaggcatccacaagatgagttttttgggttttttttttacttaattttagtttttaggggagtttacaataatatacatttttttgtatataatttaaaataatggcgttactactattattgacgtgctacatcgactaaatctaatgtatctgacgtttttttttatttttttttagtttcttgcatttttaaaagtaactttttggttactaatagtgttgataagaaatcaaccagttacatgtacataaaaaacttatttttatatcatataatttga

SEQ ID NO: 144327 - DNA, 639 bp, Cannabis sativa
  modified_base (28)..(75): a, c, t, g, unknown or other
atgagtattttgtaagttttcgtctctnnnnnnnnnnnnnnnnnnnnnnnnnnnnnnnnnnnnnnnnnnnnnnnntgaaacaatggtggaagtgttggattaaagttttactaggatttagatttactaccatgtacgttgtttaacatcttaaatatgaatttctaaaacaatataatttaaacacacataaattttaagaaaccttacattgattgcagtggaattaaatgactccttctgctcagatctctaacccttgtatcctttacgtagtagagtatcatcaagatctgagcccgattctccttcacttgatttggattcttcacaatcttacacactaattgagtaccaacttgttatgtgtggccatgtactctatcactaaggcttgaatttagtttgtgaagaatgctatatgattttcgaaattagaagaagaagaaggaagaggtctcataaacctagagagaaaactaggtttttagcattagaagcattagttggataatgagaccatcactttccttttatagtaatttcacctaggtttagggttgaattatttggaataaaaaaattgataaaaatagagtaaaataaccacctagcggccggccacatagtgggtcctac

SEQ ID NO: 144328 - DNA, 1844 bp, Cannabis sativa
  modified_base (779)..(780): a, c, t, g, unknown or other
catagccactcttccgttgggtcttggtggcaagccaggggtctcctgagggattggtcctcctgagggtgcagttggtgccaacgctccgggcgcaccctctggtgtcccttggggcaacggaccccctgccagaaccgggttgagatggggtagccagttcttaatccactcatacaagtgacccaatcaaatcaagttttcgatctcatctttcagatttttgcactcattggtattgtgtccaatgtcgttgtggtattcgcatctttttttgggatcccttcgcgaactatctctgtacagaggaggcgacctcctgtagtgcgtatttttcctcgtggcgaaatacacacgctattgtgtgttcgtcagctctgtgtactgggtatattggggagtataccctcttttttggcgcttgtcctccgtctggttgctgccttttgaggacctcttgctccgggagccttgagaaggtccggttaggcttgcagcaagagcggagtgagatgggacttgtccgcttacccctgaggggttcccgtaatgcgaagatgcgggagccaaggcttggctctgattgtatcctggagtagcggagaactgtatatcactcatttgtggagtagctaaaggtagggttctcgagagttgaaccccgagtacatatcctgccactccagttgggtagtatcctccgtaggccactatttgggcctcttccaagttgatgtacttttggactctcttctggaaatcttggaggttagcagctnnttcttgttgtaattcgttccagaacggggttcctgtacggatcccggcttgaagaagcgtaagttgctgcccgtcatcaactttcttggtttttgaggcttcttccttgaacctctttataaaatttttcaacgtttctgtgggtagttgcttgatgttagtcagggcactgacttcgagattaatctttcttgcggcgacaaactgtctccggaagctaacttgcaatttgttccagcagtccacagatcctggttccaactttttgaaccactcctccgcggaaccgcttaatgttagtggaaagcataagcacttgacatcattactgactctcataaccgtcattactcggttaaaccgagacaaatgatcgctggggtatgagtccccagtgtaggctgccatttcgggcatcttaaaatttttggggagctctgcctctaaaatgtgtctggcacacggctcccggtcctcacaatcagagtctgagtcatcccccttttgtctccgggagactcaagcaatgtccttgcgcagtatggatagcttagccataattccttcgttcagcgttcctgcggagactgccggtatgtgtttctttttgtccaagtgatcccgcaaatcaccgtgcttttcattgatctggtgtcttaagtcaacaggagggtatcttcggttccctcttcctttttccccgggttcctggtgtacaaaaacgctctttcggtcctctcgatcctgagggccaagacttcctttttggagtttgcccctctgcggacctttccctttcgagaaatctgagcggacctttcgcggatcctgtacctttttcttcttccctgggatggaagtagggtttttccgttgatttccttcaaagggataccgtatgggctaggttcccttgacttatgcttttgagtgcttggtgacgactctttcggcgtttccttgagtcctgcggggatggccttagggtgtatgtggatccctgctgtctccatggctttttgcatggcgaccatcacctcttgcatctttttgttttgttcttt

SEQ ID NO: 144329 - DNA, 534 bp, Cannabis sativa
aattgagcattgcattggtaaacacatttttacataaaaaattaatttcagaaaattaaaatcacataaaaattcgtatgccccaatattggcttaaattattttctagaaaaatgataatgaaacctacacccattttttatcaaaaaattaatgatccatcatctcacacacattcataatacataaccattgattcacaatataaatataaatacataaaactcacacaacatttaatatatatacatatataatagaattgctctggtactaattgttagttttacgatactaaatcaggtacctaacggaataaataattctgattattatcgtaccatatctccaagatcaccatatgtatatattaaatttgaaagtaaaaacatgaaaatattatttacattttgaagtctattaaggtatcttcgagtcttttcgtatgttgtatcctcagaacggtgatgtcaaaactcacaccttgatctttcagattttcccccacacacaaggtgtaaagaccgcttagtt

SEQ ID NO: 144330 - DNA, 528 bp, Cannabis sativa
ttggtttaaaaatatttcgttgaaaattatgactcgattacttttgtaaacattaatgtttaaaaatttataaatgaatcaagtgtttttgttttaaaataatgagatctaatgctttggttattttcaataaattagtttattgtatttattataaatagctttaaacggactagtaagtgtgacgtcttgggaaatcagggcgttacaatatggtatcagagcaatacgaccctaaaaaatctgtggttagccctaacatgtaaggttcatcgccacgagacgagctttactcactatactttaagtttttgtcaatatgttcatgttagttttacaaattttatgttgcgttacattttaagtgtgactagaaattttctttgtgtttagaagaatatgtcttagaattttatgggtaagactcgatcaatggtatatttttagaaaaatttaaggaaatatttcaaggtattgctatattacgtaatttaagtttgattttcgataagttgtacttattttcat

SEQ ID NO: 144331 - DNA, 742 bp, Cannabis sativa
  modified_base (666)..(699): a, c, t, g, unknown or other
atcattttacttatcagatatttataaatagtattttaaatatttaaataacctagtgttatacccgaagttcggtaagcacatctgagaaggacatgtgtcgagctgggaaaaactcaaacacgcaaacgacaaatacgcttagcatggaacaacttgttagaaatataattcgcagggtaggtttataactcggatggctgaatagccttctgcgagacaaaaacatacgaactgctaatttatgtattaatgagaaaccatgtgagtgcatacactcttgacaaggcctcaacctcgctgcgtgaaaaagaaagcgacaacactaaaaatacttagcgtatattatgcgatatacaatctgagtataaatagtatggtgcatcaagataaaaaaacagcgaggcgtttatcccgctaaaagatgttttgcatgcaagaaagatcttctcgaccccagaaggtgtaaccatcaaggttaagacaatactagtcccaagaagctaaaatgacaagcagttgctcgctatcaaagtgatcttggctccctcctcgatgaggcatacttatgagacacggcttaccgtatgtctttaattatgcgctcatctcggcccaataagggtggaatattcatagttgtgtaaaaactgttgggttttatgnnnnnnnnnnnnnnnnnnnnnnnnnnnnnnnnnntcaatttagaattttgaagtgaattatgattacatgtatgtta

SEQ ID NO: 144332 - DNA, 856 bp, Cannabis sativa
tgttagctcatatttgggagcttaatcgcgtctcgttcgtgctgttttttgtgctggatatttaagttcaatttatagttgctaaaacaaagaaagtgaagtgtggatttgaggttagactttttatttggatttacattaacttttattgcttctaataaagtatgggttaatttgatagttatttattgtgttaactcatattattagtgatctataattaataggcttaatatcagtataaagtttagttgaagcagaagtgtggacttttctagttaattgaagtctttgataagcagacccaattcaactagagttatgtagctaagtctcctcctctataaatacatattatcttattacaattgcatacttttgataatcagataaagtaaatctgcgtctgatttagagatatagggaggaagacttaattgatagtattgctctatcaaattaaggtaattgatatggatcgatcaggtatatgtatacctaattattatctattattattgtgttctaaattatatataaatttgtatcttgggattattaattttttaacatgtggtatcagattgtttattgtatatgatttaggacctataatttgtctaactattgataaatatatgttaattatctataattacatattaatttcctaattattatatgttaaatttttcgtttttcaatcataaagcttaggagttatattcctcataaaattatgtttttattgatatattatttgcataaaattattgagtaaattaggagaattttaagattaaacttttagggtttatatattttctttatgaaattaattttgtgtttttcaatt

SEQ ID NO: 144333 - DNA, 743 bp, Cannabis sativa
  modified_base (430)..(434): a, c, t, g, unknown or other
taataaatttattagcatatacgacgataggctatacgaaaaggctactatacaaacaaaagaataaaatttatttcaatatgccaaaataaactaataaatttatttggcatatatgactatgtataggcatatatgccaaataaacttatgagcaagatatttaatcatatttgagaaatcatatattgttatctaagtttactagtaagatatgttacagtcatgtactttgtatacaaccagatttgatgtatcgacttaaaaaaatagattaattagtttgttattttataggcacccattgtgtttgaattaaaaatgaattattgttccaatatacgaaaaatagactaataggtttattggcgtatatcgctatgtttgattacatagtttaccctgtattgaaaaaaataaaatgttgttnnnnngacaatagaaactagtaggtttattgaaatatataatggtgggctacataaaatgaaatgaattgttgttccaatatatatacgaaaaaaatgaaaatttattttgatataccaaaataaactaatagatttattagcatatacgatgatagactatacgaaaaggctactatgtaaactaagaaaataaaaatttaatttaatatgccaaaataaactagtaagtttatttggcatatatgagtataggtatatataccaaataaacttatgagcaagacatttcatcatatttaaatttttgacaag

SEQ ID NO: 144334 - DNA, 691 bp, Cannabis sativa
cttagacaattatactgtatgatggaaagaagtagcgtactgactatctatactaagaatatgtgtatggtatacgcatattaatattgatatttatctgagtttcaagtgtttgaaagatgtggattaaatatgtgacaagctatacggtaagggtaattgaattgcttgattagcgagctgtctgggctcgcgacaaatagtaaggaaaagaatcctttattgttgtaatactagaaacatgtaattttctctatgcatgatgtgattagacaacaaggggaagcaaatctgagaattgagaaaacaacaggctcgtcttgtgtctatttttatactactgacacttcctgttgtaccactggatgtggtaaaatatatgaaaacccaacttacgagcagatcagtaggtgtaaactaaataaaccaccaattatgggatagaaagaaaggttctagggtgaccaggatagcgatcaaagtgagaataagaaatggtgaccttatcctgagtgttcaagatgtaaaaaaggcgtcatttgggctaatgtagagccaaatcttattattgtggggtagtgagtcatctgaaaaaacatctgcccacagttaagaaagattgatgttaaagaagaaaagtgtacgagtcatgcccaagtgctaattatgattcaaggggacctgggtatcg

SEQ ID NO: 144335 - DNA, 503 bp, Cannabis sativa
acttctagtatattgaataatatgtgtaggatttttacccacttaccctacaccaacaagaaaccttaatatcagtatcaaggtcaaaatcgacatttacaagtctaacttaacgttagaccaatacggcatcgttcaatccccacgacaccaaacttgatgtcgtattgaacctttggtttaaagactgtgatcgaagagtctagaaaccctagccactcaaacacaacactcagcctcccaaaactcgaaaccctaacagagcaagttcttaaagaacttgctcgattctgcgctagaaacccagatccacacccacacacaacataagttagattaaatgagtgaaaaacgaaaaataaggagagaaaacaccagaaatttgtttcagagttcacccaaaactgggctacagctccgtcaagctcatctcagagatagaagcttgatatccactaccacaatgtcgatttacaaggtttggagcttcctgtcacagaaat

SEQ ID NO: 144336 - DNA, 648 bp, Cannabis sativa
  modified_base (434)..(436): a, c, t, g, unknown or other
tcaacaaccccaacgaattaagcaacaataccacacttatgcacttattgcgttaaaccccaactcaactatttactccatataaataaacacttaacatacagcatggatcacatatcacataaatactctagatgcttacatactgcctaaaatggaaagctgtaaataaatgatcacataagcagtaaagtatttactctcaaacacttactgcaccatgagttgagattatctctgacgatgattgtacatgttcagccggtctacaggaaatttaaaaaccttggcgctctgataccatattgtaacgccctaagatttaggcatgctacccgatatgattaagaaccctaatcccctaaacaggatgactaataaaataagcgcagaaattaaactttaaacaaaaacagaatgaaaataaacctgtnnnattttaaccttacaaacaaaagttacatgtttcgagatcccaaatatcattttacaaaatattacaagtcttttctccttagttgacctaagcggaaaaacagagttacaaacgtttcaacactggtaaaccccaacccgcttggtctagtgtggaccgaacatgtacatacatcgcccaactcccatactcatggctgatcagagacagat

SEQ ID NO: 144337 - DNA, 584 bp, Cannabis sativa
aaggccgatacccattgatagaaaagctcacttattgcctaatcctaccaacgagaaagttaatgccctactttctggctcatcctgctggggtatacactgaccaaccattacgccaagtaatgcaaaaattggacgcctctgaacgattactcaagtggatagtggagttgggccagtatgaaataatctttcagccccaaacaacgattaaaggtcacgccttagtagattttatggttgaatgtacgggtaaagaaaatagcacttctgaaagtaacccagagccagtacacgtacctcagccgagcaatagtgaagacaagccgacttggaagctacatgtggatgggtcagctacatgtgcccttgtcacacctgggggcaacacctaaacgctgcggtcaaattcaaatttaaggcatccaataatgaagctgaatatgaagcttttatcgccggcctaagacgtgctcgagaattgaaagccgaaaacgtcgagatctgcagtgattcacagttggtggtaaatcatgtatccggagaatacgaggctcagggagagaagtgttgggttttatgcc

SEQ ID NO: 144338 - DNA, 533 bp, Cannabis sativa
gcccgtcgagattggtcaaaaaaagcccagcccaccctttaacctctccctttcatcttctttccattacattttctaaccagcctttttcttccccaatttgaaattggcagtcatttttctctaatccaaaaattcaaagaaaaactgatgttctcttcttctattcatcacaaccacttcaaaaaaaaaaaaaaggcgagcttaaatgtaaactattaatttttttttatattcttatcctaatagttattaatttattttagtctaaaaagttagtaaaataataaaatgttagcttgtatttgaatgttttagattaatatatgtttgggtaagcttcataaaacataaaggaagcttgatattgattggagcttcattttggtgagttttaattttttttttctttgtctttttttttttgccgaaaatggtgttctttgactaaaaattgtgttttttctttctttaataaaaaatgttagtaaaacaatgaaattattgttataaatattaataattatgtggat

SEQ ID NO: 144339 - DNA, 674 bp, Cannabis sativa
attaaacatatcttgaaccagggggatatcccaagaggtctcatgaatatccataagagagttgaccatgtggttagtgaggccgagtaccaacgtttgtttataccttcaaattaatgtaaattatatgctagacttaaataaaaagtaagagtatattaagcaactcactcacaaaaattggtatattttaatgaaatataaataagagtattttttattaatagatatagaaaagaggtactctttacttataaaaaaaaaaaaaaaagttgtaacacgagtttccacgtgactacatgaacatgacacaaattttactttcgaaaaaattgagtataggtcgaaaataaattgttacgattgatacaaataaaaatcgatcgaacacaatacttcaggtaacacgaacttgacatgtttaacacaattttattaaataaaataaaaaattattaataataatataactatataaaaataatttcataattcagttaaaaaaaattaaaaatatttttaaaatccaacttttattatagaaaagaaaaactatataaaaatagatataaataagtttttttaatggaatattaaagggaaaaaaataggaaaatttcaaaaagggaaaaatattacaaaattactatgggccggcccattcaacatttata

SEQ ID NO: 144340 - DNA, 752 bp, Cannabis sativa
atactttacatgtgtttattttataatcgttttaaaagttcatatttagggtgttaatcaacatacttgtgaatagatctaagatcctggtaaaataatatccaacaaaaatctaatgcattaaacttcctacaactttctcatatatattatttaattggttgccgaaaacctcggtcaacaggtacatgtcaaagttcgggggaaaaaaaatcttaatttgccaataaattattaaaacatgaaaaattaaaattatatattaatttatttataagatgtgatgtaaaaatataaaaatattcaaattgctaataattttttgtatataattatatataaaatattgttgaaaagttatataaatataattaaagctataaaatatacatgtactttggtaattatacaaaatatatatgaataagtaaagcacaaatttaaatttgtatatgaaaatagactagtctgtttaaaaaatatgagccgacacaagcaaaacaatatacgaaatcgagcatgacacgaaaattctgggcctaccctttaaaaatgttggtacaaaatagcatgatccatatttttttatgacacgacacctttttttaaaatcacatataaatatgggtcagactaacacgacacacacaaacttacaatactaaatttatcaagggtattattttgagataattacataaaacactaatttttataaattttttatatttttacgttcaaagttttttttt

SEQ ID NO: 144341 - DNA, 724 bp, Cannabis sativa
  modified_base (287)..(287): a, c, t, g, unknown or other
  modified_base (540)..(548): a, c, t, g, unknown or other
gcgatctaaaatctgagtgggtatatcgctgttcatattccttcaattgaaggtaggcataagcgatgacccgatcggcttgcatcagtacacaccctagaccctgtttggatgcatcacaataagccacgaacttttccttatcagaaggtagggctaacactgtagctatgattaacctctgtttcagctcttgaaagttggcttcacacttgttcgtccacacaaatcgctgattgtttttagtgagctcggttaaggttgttgaaattttagagaacccttcnacgaaccgacggtaataaccagccaaacccaagaaacttctaacttctgtaactgttttcggtcttggccaatccctgacagattctatcttccccagatctactttaattccatctttactgacaatgtgtccaagaaaggacacctgagatagccaaaacttgcactttctgaatctggcgtacaacttatgttctcaaagccactgtagaaccatccggagatgctgctcatgctcctcttctgattgannnnnnnnnaggatgtcgtcgataaatacaataacagaaatatcgaggaaatccttgaatgccctattcatcaggtccacaaaagccgcgggagcattggttaggccaaaagacataaccaaaaattcataatgcccatacctagtgcgaaaagccttctttggaatgtcctcctctcggattct

SEQ ID NO: 144342 - DNA, 802 bp, Cannabis sativa
gtactaggctgttaagctcttccttgaatctcttagctcgtgccctagtcactggacccactggaattggacttgatacttggtccttgatgtcctcatcaggtttgggtccagggtcgtgttcaggtcccgagtctttgttttagtccagttcctagtctgggttcgggtccaggtctcgatcctagtctttgtctgggttcaagtttgggtccttatcagggtctggatcctagtctcggtcgctagtctcaggtctctgcgaggatttaggattaggtcaggtctaggtcccggtctaggttcgggtcccaagtctcatgtcccaatcctagtcaagatctcagtccaagtcctggtcttagtgggttatggtttgggttcggttcttgtcttaagtctggatcctagtcacagttccaattccaattctgggtccaggttttgttctcggtccaggttggggtcggggtccgagtcttagtccgagtcttggtacgggtgttttggaacctggtctgggtccaggtctgagtctgggtccaggtgccatgtttcgattctggtttgggtctgggtctgggtcggtattcaggtctcggtttgggttggtgtccatgtccaggtccaaatcctagtttaggttaggggcttggtcttagtttaggatcgagttccgagttcgggttggggttcaattcgagtctcaatactagtttgggtccaggaccgggttcgggactcggttcgagcccgagtttcgggactgggttttggacgagttccgggtcccggtccaggt

SEQ ID NO: 144343 - DNA, 557 bp, Cannabis sativa
  modified_base (531)..(531): a, c, t, g, unknown or other
aaaatttgagaaattaaaaaaaaaaaaaaaaaaaaaaaaactcatatgtgttacaaatcactctttctaaaattctcctttatatataaagacttactcaaaacaataaaattaaaaaaatatatatatataatatcatatatttatataaaaaagggatcaatttttaaaattctagtttcacacataataaaatcaatatatatatatatatagaaaaatagaaagaaaaaaatgatagaatactaaataaacttaattcaattgatatatatatatatattgatattgattaatgaatatatataaatgatagaaatgatagttttttattttagaatgtcataggtcaatttttgtgattttttagtataaaaaaaaataaaaagtagaagatttattttccttaactatatattatgattgataataaataatattttagatgatttatgaagggataagtcattgttgtgaaaatgaaaattattagcaataaatatgagcattgtgttaggttttatgccctanataaaactctttacaatctgattagt

SEQ ID NO: 144344 - DNA, 589 bp, Cannabis sativa
tattttctaattatttaaaattatgtggctcactagacaccaaagtataaactaaagattaaaattttactaaatctaaaattgcttatgggttaaatttaaaattttaaaaaatagatgaaccttatgatagatttaattaaacaactagtttagaaaaaatgaaagtttattatctattttaataaaatttgtgataatactattaaattaaatctcaaattaagagaatttagtttaacatattgtcctaattaattatataaatacaataaaattcatgcagagtaaaattattacacctatataattttaattacaagttaggtccattaagataaattttatttaaaaaatacgggttggcacgaacaaaacacgacacgaatctgaacacgatacgaatatatcctgatacagaccttatcaaacttaccctttaaaaatattagaatgaaacgacatgactcatatttttctgtagcacgacacaaacacgaattatttttttttttgtaaaaaaaatactgataaatataatgaggttatctctgttataaaataatataaaattatataaagtagatga

SEQ ID NO: 144345 - DNA, 916 bp, Cannabis sativa
  modified_base (271)..(274): a, c, t, g, unknown or other
cactatcctatatggcaaagaaaccttgactatgacagaggtcaaggcatcactcaattctaaggaagatacagaaaaagaatgatgagaggtctgatggtgttgcagacagtttattgtcaaaggcagaagtgattcaaaagatttcaagggtggatacaacaagataaattataagaacaatcagaacaaatgacacaattaagggtacaaatcaaaaacaaaatccaaaccaggaaaacagtattactactgtaagaaggaaggacannnnagagatgaatgtagggcactcaaggcaaaattgaacagagaaaagggaaaggaaagaggtgatgcaggcattgcctttgatggttatgattctgctgaagctttggttctgacaagtcaagaaacaggatgtgattggatttttgattatgggtgttcatttcatatgacacaaagaaaagaactgtttagtgaatttaagaaaattgagggtggatcagtgctgttgggggacaacaaagcttgcaaaatctcaggaatgggaagtgtgttaatcagaatgcatgatggtcaagtcaaactcatacaagaagtcaagtatgtccctgaactcaagagaaacttactttcagttagtgaacttatatctagagactgcactgtcaatatagacaattcaatgaaagtaatgaagggttctaggatagtaataaagggagacatcaaaaatgacatttactatctgtaaggaaaaactgttgttggaaaaaaaatagttgttaagaacagtgatagagacaatacaagactgtgacacatgaggtaggtcatggtagtgagagaggtctctatgaatgggagaaatagggcattatcaaaggcaaacttggaaagaaattggggttctgtgaagagtgtgtgt

SEQ ID NO: 144346 - DNA, 1210 bp, Cannabis sativa
tgcgcagccttctcctcttctgttggccccgtggagaagtccaggcctgtaatgagtgcaaactcaagcactccaaatctgagctccttccgactaatgtaaaactgcatcctcaagtcctcctgagcatcaaccttcatcttgtgcaacatcagttggtgaaataacaccgaggagaatgttaggggtacggcatttcaaaagttgccgaaacggctttcctttgccgtgttattcaaattgaactcctcaaaccgagacttgatttttgcaaaagttctggtgcctctgtaagtaacgcggccagtaaaatgctcagatgttgaaattatgagtctgggagtcatctgaaaaaataaataacaaagtaatattattgtcaaaaaattaaaatattgtcgacataacgtcgacatcatgtcgacattataaaacagtcaccaattacataattatatcgacatcctatcgatatcatgtcgatattatgtcgacattgtcaaacattcaacaattataaaattatgtcgccataatatcgacatgctatcgatattcagttgataatatcaaacataaagcaacaacataacattgctaataacatatcgacatactgacgacatgttgtcgacattacaagaaaaaaggacataccaactggtaaatcaaaatttgtcgacaacgtattgacatactgtcgacaatttgtcgacaatgtaagacagaaaataaacttaaccaatatatcgacatcctattgacacacatgcgatatcctatcgacatacaataacaacacatacaattctaatgatcaatccgacacccaaatatatcgacatcctatcgatatttcatcgataacactgtaaaaaaacacgaacaccattgaaacatatccaacatctacaacctatcacaagaaagagcacaaaatctacaaaaattccactaatctcaacaacatgcaataattggcatccaaatctatgaaaaaattaattttttttcaaaacaaaatccttacctttgattgagcttggttgtggtggcgacagttcgtgcttgtggtggcgatggcctctgttcggtgtcgacgagcacgggtagtggtggtggcgacggttcatggtggtttcgacgaccacgggtcgaattcgataccgaccgagagagagagaaagagaaaaaatagagagagagagag

SEQ ID NO: 144347 - DNA, 835 bp, Cannabis sativa
tatattgagaagtattaatagatgtaatcttcattctcttctaaacaagaattaacaagaatttcaagataaaaattcgattacatgacttctgatataattaaattaatgaaataaactatgtgcaggagatttttttgagcatctcctgatttaatacttgataacatcaatatatttttgaaatctttcaataggtagttattattaaaataaaaaaaaaattgttaaaacaactcgaatacaaatacaatacttagtgacaagctagattgggggaataagaaaaattcttatttaatatatgttagacattttacataaaatatgaagcacgtatgattatgaaaaacagaataaattgaatatatatccattatgaataaaggattaaaatacctctagcaatgtatgattatgtataaaatgtcgaataaatcgaacatatatgcattatgatcaaatgatcgaaatacctctaacaattaattttttgagagtttcaatcacacacgagctttggatctacaaaagaaaaggatactcattagtgtgggtaattgagtttccaagctttcttcactctctttagatagaattattatgtttcacaaaataatagtgtgctcgaagaccgagactgtatatttatacatgtgagatttttcatcaaagtctctttcataattaattatcaaaatatattgaaagtcatttaggaaattaaattagaaaacgagttaattagtgaataaaaaacttaccatttataaaatatttatatttattgcaatttaggaattactccatatactgtttttaaaatttttttttt

SEQ ID NO: 144348 - DNA, 532 bp, Cannabis sativa
tataaaattattatagtaattaaataagcatagataaaagctatacttaaataaatttttaacgaaatgctaaaagaaaaacaaaatttcataaatttatttttgaataaaagtataatctaaaatatttaagttcaaaagagaagctgagataattatttattgtgtgaaggaacaaagagaagaagaagaagatggtggtaaataataatggcagtagactaaggagctatataattttttttacgttcattttagttttttatgttaatgtaggtgatggaatatttgagttctactttttttaaggagtgggtattacacccttttaggatagttagaataccaccgtataaatattaatgggtttaaaaattttaaaacttcataacaaaccgggtaatatttaagattacattttccctcctaatattaaggaataattacatagaaaatataaattgaaattttatttacaaaaatacctctataaggtaaagtcaacatttataccttttatgtaattttaatt

SEQ ID NO: 144349 - DNA, 649 bp, Cannabis sativa
acttcttaatagaaggtataactcgagaagaaattttgcttgttcatcgagacgcggacacttggaagttatatgtggatggtgcatccaactagtagggctcgggtgtaagggtaatattaatttcaccagaaggctttaagtttcactatgctttgagattttaatttgacgcataatcaaactacgaggctgaatatgaagccttgattttgtctgcttaaagatagttgaggcgttaaaagtcaaaaatcttatctgccatagtgactcacggccgattgtaaaccaggctctcaaggaatatcaggccaagggcctaaaaatggctaattatttagagaaggttcagaagaacttgaaaagatttgattacttgaaaatcaaacaaatcccaagagagcaaaactctaacgctaatgccttggcaaaactggcctcgcagaatgactttgattacttgaaaatcaaacaaatcccaagagagcaagtatatgtgaaatggaagatgtggagatgatagacagttcacctacatggatgacccctatcattaactatctactcgacaggcaacttctaactaacgaaaatgaggcgtaatgtaacaacctaactagcataggcgtgttaacgtgattttaaacat

SEQ ID NO: 144350 - DNA, 503 bp, Cannabis sativa
acaatatcgatttaatagataaatctgtttacagaatgaaaccaactatttatacccaacagaacattccatgtggcactaactaacacctaacgataagtcataacagactcacaccaacttaacagtacgcaagtgcagatataactgactaaaactccagacatgactggacattctattaaaataatctatcacaaaatagcgacacttacattctcccccttgacagattatgttcaatgactcaaaaaaatgaagactaaagacttcaaaagacacccagtaatcacagaattaatgcaccaaaaaaatgtctttagaattatgagcatagcaacccataaaaatatatatataaaaaaataagtacaaacatctcccctttcattgaatatgagcgctgcttgatcttgttctttgccagactccccttgggaaggtggcccagtcgacaccaagggtgttgcagtggttattggagacgagtcagctggaggatg

SEQ ID NO: 144351 - DNA, 521 bp, Cannabis sativa
ggtgaagtagtcttgagagacctttcgaacaaattaaaaaaagatatggcgaaagtgggtcaccttgccgaagtcctcttgttggccaaacattacccacaatttctccattcagttgaaaagagaaactattagacgacaaacatcgcataatgagagagatccattgatgagcaaaacccattttttccattaccgcagagagataatcccattcaactctatcaaatgctttgctcatgtcaagcttgagtgccgagtagccttcagttccttgtgtcttatgtttgagatggtgaaccaactcaaaagcaacaagaacgttatcagtgatcagacggttaggtaagaaagcactctgattttcagatatcaccaaaggtaggacatctttaaatcgtagtactatcacttttgagattaacttatagatcacattacaaagactaattggcctgtagtcccccattccttttggctttttgacctttggtattagagtgattacagattgatttatg

SEQ ID NO: 144352 - DNA, 752 bp, Cannabis sativa
tcggatgtccgaaccaacaaccgatctgatccgattggatttttaaaatttacatctgatccgatctaattatgtttgaatatccgattgcattggatcgattaagattgaatcggtcagttataattggattggatgaatttctgtccaccctaaataattatctatctttcattaattactccatcttttctaccaatataaaagggtattccgaataaatgaagtataatagctacaaagctaaattatatctcaaaactcttaaaatgacccttttaatagatgaactataatactttattaaaattttaacttatgaatagtacatctccacatttagctaaggtttacctcttagctaaacatttattattattttcttctttttctttcacatcctctatatctataaatacataaaataaattataaatgaataaaatatattaaaaaatataatacttaaattatataaagagaaaatagagtaactaataatatatggtgttatgtaaaagtgtgagctaaaatagataaaatagaattttgttaatgtattttaaaaaaagagtagagaaactattgggagtgctcttttcctcttcatctatattctccatcattcatcaactctcatccatcctactctccctttctcttcttaccagggccggccctaggcataggcaggctaggcccgtgcctagggcccacactttccgtgggcccaaaataaaaaaaataaaaaa

SEQ ID NO: 144353 - DNA, 530 bp, Cannabis sativa
aattacatggtcagacaaatatgccaaattgtgtaattacctccaattacacacaaatccaattacattgtggctttccaaacgtagcctaaaactattgttaattcacaggagaaacaatcgaaacccaacgtggaaatcgtgacaagagtgatggggccagagattggatatgtggccacaccaataattctggtttagtgtgctcttattgttctcaaccaacgtcataaacttcctgtgggaggagttttcacacctagggttgtgtttggtcatactgatctccaacaaagactccaacacaatggaatcacctttgatgtcgtttcaataaataaatcttaggttgcgtgtttggtttgctttaaaagttgtgtaacgaggattacactagagggtacgttatattttagtacatttatggctcatttggtacgcaggattggattggattagacagactaatctatccaatccagtgtttgggcatgttagaaatctggataactaatccagctaacctcatc

SEQ ID NO: 144354 - DNA, 1081 bp, Cannabis sativa
cacttacaacacgctacgtgacagccaagcatatgccaagttcttctccgtccagaaatttccagagtataggaggttttgcgatttgcgtttttagctcttgaaaagttttttcacattcctttgtccactcaaattgcttgtttcctcgtagcacgttgaagaacggaacacacttgtctgttgattttgaaacaaatctactgagtgtggcgatccaaccagtcaaactttgtacttccttggttcttgttggtgatttcatatccaggagggcttgaatcttctccggattggtttcaattcctcgggcgttgacaataaagcccagaaacttacccgagctgactccaaaggagcacttgaagggattgagtttcattttgtattccaagaggactttgaagcattcgtccaggtcatctatgtgccccccagcattcctagatttaacgagcatgtcttccacatatacttcaatgtttcgtccgatcttgtctttaaacatcttatttaccaatctttggaatgggctctagcgtttttgagaccaaagggcatgacattatagcagtttagacccatatttgtccggaaatttttaagttcttagtccaatggatgcatttttatttggttgtaccccgaataagcgtccatgaagctcaatatttcgtgccctgctgttgcgtccacaagatgattgattattggaagtagaaaacagtcttaggggcacgccttgttgaggtctatgaaatcaatacacactcgccattttttgttcggcttgggtactagtacgggattggcaacccaagctggttagaaagattcaattatgaagttgttatttcgtagcttccctacctcttcctccaggactagagctcgctctttgcccaacggccttcgcttttgttgaactggtcggaagttgggatcaatatttaggacgtgcgaaattacatccattccaatcataccctcatgtgaccaggcaaaaatttccaggttcgttctttactggactcggtgtcgtccctggaatggaaaaaccactggttttactttgtgataa

SEQ ID NO: 144355 - DNA, 534 bp, Cannabis sativa
gaaaacatcataatagtcttcgataaaatatattctaataaatgatcgtattttgctgagatacgatttttgaatatgtcttctctaataaatgtagtgaaaatattttattaatgaaatatatctgttggataaatctccatactaactgtcacatggaaaatacattaatcaagttacaaggaaaaataaagtaagattttttacaaacctcaagagaccattataacttttagggtagtcggttttgttttcataggcttaaatcttttagctctttactagacaagaaataaataacaacttctcaagactccaacaaactttcaacaacacaaggaaaaatcaataacagttttctaactgttttctcagctcaaaacacaacacatcacagtcaacaacaacactataaataaaggggtcaacctgcccatttcgtgtggcattctttagatagtgttgcagcagccatttcatgaagaaataacctcagaaaataagagagagaaacagagagagttagagagtttt

SEQ ID NO: 144356 - DNA, 549 bp, Cannabis sativa
tatcggtgttttgtagtaggattttcaaaaattgcaatgcaattgtctgaattaaccagattgagtcaaaggtttgtgtggtcagataaatgtgagaaaatttttcaagaattgaaacaacgattgattacagctccagtcttagccctgtcatctgatcaagagaaatttgtagtgtagtgtgatgtatccagatagggtttgggctgtgtgctaatgcaagcggataaagtcatagcttatggttcacaacaattgaaagattatgagcagtattatccaactcatgacctggaacttccagcagcggtgttttccatgaagatttggcaacactacttatatggtgagcggtgtgagatctatactgaagtctcaagtactttttcactcagtgagatttgaaatgagacaaaggcatgtagagttggtgaaagactatgattatgagatcttgtatcatcatgggaaggcaaatgttgtggtagatgccttgagtcagaaaggacctgatcagactttcaatatggtaatgatttctcctcagtt

SEQ ID NO: 144357 - DNA, 501 bp, Cannabis sativa
ccttagtcaggggtatttgactcttacttcccacactacctttaagcacaagtcaatacctcctttaagcattttattttatatccaagcgcaatcatgttatcaatacctatcttgttcttttcttctaatttcttcactttcaattggacaaaacttacttgtgtctaataagttggttactgtcggcttgagagagtccttccaaaaatttctgttactagtccctttggatgaagaaaactttcaatatttgtcaaaaaaattctcaactcttgctgacttttacttttgacaggtctattttcattctattgtcaaaccagctcttttgaccaaaattaacactctttggattttttttccctcgtaatcatttcttatgatgatacttcgacatacttatactattatccgtaaagtaaatcataagttgattgtagtatcctttgcttacatcgtatcttgaatccatttatgttgcatgagcattttctaatc

SEQ ID NO: 144358 - DNA, 501 bp, Cannabis sativa
  modified_base (264)..(272): a, c, t, g, unknown or other
  modified_base (307)..(307): a, c, t, g, unknown or other
  modified_base (383)..(384): a, c, t, g, unknown or other
tcaagtctcccaacaaattaaaaactaaataaagatgaaactaagaatcgagaaaaaaatatctttacacttgtaatctacaatgattactagttcattaccgttattagatcttcatgatttaaacatatgatatgattatggatgataatcaaaataattttaattatcaataatatatattatagaaaaattctataatgcaccccttaaaagggatgcaccgatatatctctatgtattttagtatctgaaataattttnnnnnnnnnttttttctcatgatcatgtaaattatagttatttnagacatcctgcaaaattttaagaacttcagaaaagttttaacacgccaaaaactgcgttcaaacagtgtgttgcanncgtgactattttattttatacgcgcgtaaaatagattgtttaaacattatattctatattataaattattgagaatctttcaaaattttgtaaaatatcttaaatagctataacgta

SEQ ID NO: 144359 - DNA, 706 bp, Cannabis sativa
  modified_base (219)..(220): a, c, t, g, unknown or other
  modified_base (300)..(313): a, c, t, g, unknown or other
acagaaaataaaagtgtgttctgtaaagttcattttttttgattttatttaagtcgggtctaggtctagggttgaattcgaatccagatcagaggtcgggttcagcacaagggccgtgggagaagatttgggttcgggtcttgtcgaagtccaaaatattgattaagaaaaaaaatgtttaaaaaaatattaaaagtgatttttttttttatttttaannttttgattctcaattaaaaatttaaaaagcaaaaacagttttatagatcatgtttttaaaaaatattttcacttttctannnnnnnnnnnnnnaaactgattaaaaaagtgttacccacctaaattattctttttttttttgctcttcaaactcttcacaatgcttgaaacctcataaaactcaagctaaaattcttcacaagaagaaaaaaagttatcatcttgcagaattgactaagattaatgaaatataatgcaatagtttttaaaaaataaaatagtattttattagcctttcaaaaatagatttttttaattaaatgaattatgcacaccatgactttaataaaatttaataacaataatttacttttaatggtaaaaattataacttatattgtttagactttagatacacataataataatcttaccttataactaataatattttttctttaattcttgatagtatcacttttaaat

SEQ ID NO: 144360 - DNA, 607 bp, Cannabis sativa
tacagtttttatattttcttatatacaactgacatttgtaaaaacacggtttttcaatctatttgattttttttttagtttgattcctaaaggatacctcaatgacaacgaccccaatccttttttttttattacgacaacccaattcaataataagaattattttaaaaaaaagataaattcaataataaaaaaatatatttagataaaaaaataacaaagaaaggataaagttacattactaagatacaagaaaagatagtggatgcataacaagcaaaccacataaatattaacaattcacgacttagacaaaagaaattaacaactcagtattccaaaataatacacaaaaaatacaatttattgaaactattgtcaaactttatttgaaattagtaaacataaagaagttgctaaagaataatataaaactctagcccaacgtatattccatttatttatttatgctatttttaaaaagtgtaaaagaaaaatagaaaaaagaaatagtgataaaagaaactcaaaaattgatatgcctttgatcatcacagaaaataggttatatgcatgcaaaaaaaatattttaaatattaactttttt

SEQ ID NO: 144361 - DNA, 535 bp, Cannabis sativa
aaaaatgtatgttatgactaaaaaattgtcactaaaagcggtcttttttgtagtagaacatcgtattgatagagcttcacaaggcttgcaccagacctatgaaattgatctctaccataatccattgccaatcttaatctttgatccaactaagagcccccagaacacccattgcctatggaagttttcgttcaacaataccagaagaaaatactaagcaaccttctacattaaagccattcgagtcatgaaccaccatacccaaactgtaactttgagcacaatcagataatactacatctacattgaacttgatactattttgttgtggacgtgtccaatactcgctgccataaccctctcaaaaaactagggcatcacaattctatttcagatttctgagtatttttcctttgtcaatgtaacttttgaaaaaaaaaaaatctttgtcagctctcactagtttatcattcaaaactagatctttatggctcaaatagcctaacatacaattgtttggttttgtgccctaaat

SEQ ID NO: 144362 - DNA, 864 bp, Cannabis sativa
  modified_base (27)..(27): a, c, t, g, unknown or other
aggatgttaatgaaacatacatggtantaaatctagatcatggtaaaacatttccaacaaaatattaaatatagcaatagttattttaccatatcatattacaaaaaggtttataattatatttaaatgttatattgtcaaatatcaatatatgaaagataattaattttgtaataaaatgtaagagataattaaatattgattggaaacttttctatgaaatgtatatgcattattttttttgtcatgaattaatcttctttaaattattaaaatgaataattaatttctaaaacttgcttagccttaatctgacttttataggtgactactaaaatttatttaacatcatagtatatagtatgtcaagtacattaccatttgaacatttatgcctaatgagaaaataaaaataaaattattattaaattcatattctctaagactattcttaattattgctaaatcctcctttatgcctaattaagattcggtacaacatttgatttaaatttaatgttttgttttgttatttttttaaaatattattatactataactttaaagtatgttttatctttttactaattaatcttgcattttatattttttttaataatagattaccttacaaaattattaggagtgtttattgtcttattttaagactaataaatcacataattaaagtctattctaaactagagaactaatccgcgcttcgcgcagtgttggacaacatttgttattcctttttttttttgaaattgctattttttttttttaccaaattactgatataatatagaatattatatagtattgtgaaaattattgaaattatatatttttttatttttaaat

SEQ ID NO: 144363 - DNA, 633 bp, Cannabis sativa
aggatgaacaaggattttctttttatttttcttaggctcaaaatattattgtatagggtcaaaagaaaaacaagatgtcaatatttacgctctaattgggtaaaactagggaattaacaaatagggtaggcttgaaaggctatatcgatccaaaaaaaatttatatcatatctcaaaatcatatgtaatttatcaattttgcctcaaatgattatcgaacaagttctagagtggttgagacttttaatcaaaagtcaaatatgcacttatctttccaaatattagcaaatatgattactcaactgatgtgcaaaagtataaaaaaaaaacaaacttgagcagtaattaaacatgagttaagcacacaaatcatgagaatctatcattttcttataattataactaccacacaatcaagaatttcatcattaacaaaattattttcacaagaccatgcataagacattaaagtaaaaatacacatcaaacacgagtaatcattgtcaatagaattttattcaaaccatgctcactaaaattagagaaagaacaactaatataaactaaaaaaagataaaaataagtaaataaacaactaagggaaaaaaactagatagacacgacagttaatct

SEQ ID NO: 144364 - DNA, 1020 bp, Cannabis sativa
tattactggtttctcatcatatatattttttggtgtacagttccttaattttgaatttttcaatttcttaagaagtggcggttactcttggtgtgatggtggtacctcgagaaccgtttttcttataaataccctattaatttcctaacctctctctgtgttttggcgacgcactctcgagtataagactcccaatttcgaaaattcatttcgtgtttttctctctgctgctcgtttcaacttctctgtgttagatcttgctgtcttcaggtatatatattatgcttctctatttaacttaagttttatttctttttatccctttttctttctccctcccttttttatatcttcctttcatccttgcatccttttcgttcatttttaccccttttatacgtgttgttttaattactgtgtatattttttgtatttccatccttccattgtcttccctcccatttttcttctgggatcttcccctttcttctaccctattctcttatttcccccatttagtcctggcattccctcgttatggttagattgtaagggcagttttcttcttagggttagcctctctccccttttttcttttttgggtaggctttggattccgattgtcgttttagccatggtgtaatgtcgaatacggattgtccaggtgtctctccttcggtttccgattctctttcctcgagtattgcttctagattcgtcgaatcgttgttagtctctgatactcctcctatgcagctgagaatgttgaagtccccaacgacccagaagttgagtgtttaggcagcgcctccgtcattccccgttcccattctggaggcgaggcgggcgttagtggccaagcagccccgtctgaaggggttactctagcaattcccccgttgaagaaggccaaaaagaaaaaacatgctctgggtagttcttatccggacgttaggtcgagttgtctgtcggtcctcacccaacgtgagcttgattccttagttttgtcgtgtggttttc

SEQ ID NO: 144365 - DNA, 505 bp, Cannabis sativa
ttttcatttaatcgaatgagaatagatttaatgaggtgaaagtatttatttgatgtaaaagtgaaagcattaatagtggaaagtgattttgggggatagagatagataaagaaagtgccggagagtttaaaaagttaacagatgagtgagagagcagaaaattaacatctgacatttatttattggagggacagggatgggagtggaaaaattgggacagacgatttttttccaacaaatgaataatgacctaaaattctcaaagaaaacctatgtacaatcaattatctttaacttttaggtaaaaacatgtcctcctataaaattcccctatatacatataaagaaagaaaaaacgtaatttgttgtagctacagtactcaagcattttagcagcaaatttatagtgttttgttgtcccttggagttgccttaataaaaacgtacactcagataatatatatatatatgggtgactattgaatggttacatttttattgtaac

SEQ ID NO: 144366 - DNA, 772 bp, Cannabis sativa
ttagaagaatttttaaaaataaatatctatataaaaataatttaaattaatttttaaaaataataataattaaaaaataaaaattaataattttttaaatattaatactatttaattttttaaaataaatatattattaaatattattataatatgtataacattttaattgtatataagcaatcctatagtaagggtatataccttacatcataataaccacaagatctaaaatcaatggtaaaaaaaagttctctaccggtagagaacttttgctaggtcctaccatagtgttaccctatatatatataaaatactttttaataggtattacaaattggttactaaacaaatttaattataaatattaattttaaaaatattaaattattaaatttcgatccaataaagaataataaaaagagaaattttaatatgtatgcttaattaagatactaaattaaaaaaatatttttaaaaaatatctctttttacactatatcaaaaatatatttagatacaatgtatttatgtcaaactctatttttttttatttttttttcttttgctgaaaaagtttaaatattaatttttttttttcagccgatagaacaaccccaacccaaataatgtaaaaatgagagattaaaaataagatagaaaaattaagcttaaaaaaaataagatttaccaattgatgggtaatacccattaagagtgcacacatatatatatatatatatattacctgcaatgcccttatttgttatat

SEQ ID NO: 144367 - DNA, 740 bp, Cannabis sativa
  modified_base (36)..(38): a, c, t, g, unknown or other
atcggaccaagatctaatagtttaatatttttaaannnaatatttatagttaaatttatttattacccattaatgagtaatacccattaagaagtattcctaataaatatattttaagtattctactatgacccatttgtccctgtttaattaaaagctactttttaaaaaatctatgatgaaaatctgtttggtaaataattcaaaaatagcttcttaaaaaatttattaaaaaattgtaactaaaaattaaagatagtataactgaaaaattctataataaatttatcttacttatttattatatattacaaaaaataaaaatatttaaataaataaattatataaaataaaataaataaataatataatatttaaattaaatcttttattttttaaaaaatatttaatatttcattttcaatattaacaaaccacgtcaatttacagttcattatatatttgagtttttaatttattttttaaagtgataaaaatataatttaaaaatactataaatatttttatcaaatgtaaataaatttagatacttggaaaaaataattaaaattttattgaaaataaaaattttatataggataagtattttttttaaaaaaaaaaatgtgatctggatcacattaaaacattccggagaagacttcaacaatcggtgtctgttgcccctgattttgcccaatatacgtggaccaaccagacaaggacacgtggacacaaag

SEQ ID NO: 144368 - DNA, 515 bp, Cannabis sativa
  modified_base (484)..(490): a, c, t, g, unknown or other
gccaatggtcattgagtttcctttggaggtactaagatgctcaaactcctttttctctggatgtagtgccaattgtttcacgagcgaatagtccttttcatggaaactcaaacactaatttggtgttgggcgatgttgatctatttgtggatgttgacattaagatcaagattgagagattggacttggggcaatggtgatgtggggagtttctttgctcaacgacttctccagttgggtttactactcatgtggtgtaggtggtggctctactgtaaggtcttcttctttgtctcaggcttggatattttttaaaattgtacaaataggaacataaactgattttttgtcaaattaaaacttaatattaatatgatctagagatgttatgacgaaattggttacattttctatatctagtagtattagaaattatcttaaatttggttatattaaaaaataaaattaatgatttttttttttnnnnnnncaaagtgattagaatcactcatgaa

SEQ ID NO: 144369 - DNA, 1680 bp, Cannabis sativa
atctcaagtatttcgaaatgccaaatggatttgcaaggggtacggggagatgtatgctgcagaatcttccctaccactctgtcggaaaccgctcagcaatggtatttcaagtcaagttggctcttgcaaagtttagttcatggaaagccctctcttcgaaattccatgcacaattctcctcctcacgccaacttccattgcattttggagacttggtcttagttaagcaacgaccaggcgagcaactccgggcatacatcagcatattcatgacggagccaaccaaagtttcacgggtaaccgaggatggaaagttatccgcgatactggggggcatcgaagtccttggtaaacttcgaaagcatataaggaagaacgggccggtagactcaatgagttatttccttgaccaagctaaaggcttcatcaagctcgaagaagccattcaacgaggggaaggtgaacaaaaggctggcaagtcaaaggctccttcaactggaacatccgcccaacttcccaactacccaaatattcaaagctcaagtggcaagctttccaacaacaaccacaagcaagggaacggaagaatggaaagttcaccggaaattccaaacagactcctcgggagaatcatgccaaatacactacattcactattttgactgaagatatagaaagtgtatacatggcaactcagtcgctggcccacgtacaagaaaatcgggcccatgaagaaagacgccaacaaaagggacattacaaagttttgtcagttccacggagactacggcaacgacactaacgaatgctacaactttaagcgagaaattgaatttctgataaggaaaaacaatccacacctgcaagagtatgtcaagaccgaccagggttagaacaatcaagatttgctacctccaccagtagatggacacttgcaagtaattattggaggccctcacattgttggagagtcgtgcaaagctcgggagaggtatgcccgaacagtgcagcacgaacaagaaggagttatcctggccgtggaagaaaggaagccctaagttccacgagcaggagaaccgaccatatccttccatgattaagacgctgtcaaaattaaattttcgcacaacgacccgctgttcgtggaggcgacccgctgttcgtggaggtccagatagcctcgtggaggtccagatagccaatggaggtccagatagccaataaaatggtggccagaaccatgatcgataatggagccccttccaacatcttgttcaaaactgcttacgaaaaatgggactccaactcgaggatctaaccccatgcctccagcctgtctatggtttctctggtcaaggagttgcacctcttggacaaatccggctacccttcactgttggacaagctccaacgagcatgactattatggcacagttcctaatattggatgttctttagcttttaacgtaatgcttggccgaccggccttgtatgacttaaaggttgtcacatcaatatttcactcgtgcttgaagttcccaacaaagaatggggtagggtgtttgagagaaaaccagcagtctgcacgagaatcttataaccttccagttgccatggctaagaaggaagtatcctccagccagagcacagataagggaaaaaacattcccaagtagggaa

SEQ ID NO: 144370 - DNA, 870 bp, Cannabis sativa
  modified_base (747)..(753): a, c, t, g, unknown or other
atgtgggtggtgacccatctggcgtcactttccatgaatgtgatgtcatctcactccttcttcaatagtttttctggccgttcactaaaattatttacattagtgagtggcctctcccttgcctccttggcatatcgtttctgtgattttttggagtcccctgcgatgtgaggtcctccaatgatagttaagataattcgagaagttctcgaactgctctcgttgttattttcttccttatcattcgcttggggatgaccttccttgcttttcttgtacttgccaaactttccatgtctgatcagttcctcgatctcatcctgcaaaaaccaacattccagagtggtatggccaatatccttgtgatacttatagaatttctttggatctctcttgtcgcgatttaccctgattgggggaggttttttgatgaccccatcgttctcctaaatcgtgtagatgtggtcttatgggaccgctaattctatataattcataaaacgtggacctccttttctcttaggagacgactctttcttcagagaggatttggccaactttggactctgctgtctttggggactgcgtcttctagggcttctccctctggaattctttcctctaggactgcaggatctcgatcgcggtataggtgactcccgtttatcctttcctttctccagctcggccagagaattttcaatccttttatgcagctcagccatagcgaagaactcgactaacgannnnnnnctttgagcctgcaactccttccagaaatcggctcttggcaagacacctgttatcaacatgcaaatgacctcttgcttaatgttagccagagtagtatagggtggcctataagtcatc

SEQ ID NO: 144371 - DNA, 1037 bp, Cannabis sativa
  modified_base (44)..(52): a, c, t, g, unknown or other
  modified_base (591)..(597): a, c, t, g, unknown or other
gaatacaaacaagtaacacgcaataactcaaaccgattacaatnnnnnnnnnaagaggaaatcagttcctaaaacattgaaacatagattaaaaacatagttccacaacaaaataccttataaaaccggatataattttttttaataaaaaaagtgaggatcaattccaaaaaatattgaggcataaatatgtaaagaattggttccataacaaaataaataaacacaaataataacacacaacaaatcaaatataatataaagaaatcaattatatttatcaactagttaaaaatttgagataaaaaaattggttccataaaacaatcaagataaaaactcacccacaaaaaccaattaaataaaataactcaaataatattatccattcaacatgctccaacttaccaaataattatacccatattatgtctactggaaaaaatactcattcactatgttatataaccgattatattttagtcataactggtttgagttatttcgtttatttgtttttattcattgtaacactgttatcaaacttgttccattttaattataaatgatttgagttattttgtgttattnnnnnnnattcattatgttatagaaccggttatattccaattataaccggtttgagttattttatgttatttgtttttattcattatgttatagaatcagttctatttttatttatatctaagacatctacttctggtgaattttccagtgacagtgacttttctgacaccgacaacttttcggtgactttttcggtgccggtgacttttctagccaaacttattattattttacaaatatgagattttttatcttttttttataaaaatatggcacaaaaaagtccatataaatgtaaaaaaataaaataacccataacctcatagtattatttatttatgccaaaaaacatattggggtatagtgtaatttccagttatcatatttggagtaaatttaaggggtaagttgaaaaataccctctttattaatcaattaattaaatt

SEQ ID NO: 144372 - DNA, 1052 bp, Cannabis sativa
aaaaaaaaagaaagaaagatatattccatatttatatataccctaattgtgtcataggattttagtaaggatttttttttatatatatttttatacttaaaattattttttatttatttatttatttttttgcatttttactgaattttatataaaaattcctattgcaacataaaattgtacagaaactcctattgtaattagcactgcaaccactttagaaatccaaactgtaaatttaaaaaaaaatggttaaaaaaaatagtatatgaagtaatttttctttttaataattaaatgtgatgaatctataggtgacgtgtcttattatttgtgttgtagtttagtttgcattatattttgctaaaatgaaaaaagatcagccaatattaactattatacttccattttttgaccgacaaaatctttattcatgtcctccacctcatccctttttaaactttttcctctaatcaccttaacctcatactatatattattcactctatatttttcaataattaaataaaaaacattttccacattttggcatgcagatgatcaaataaaggtatacagaaaagatatccattaatgaactagggtttagagaagatatgtaatatgtatcataagatcatagaggaagtggaccccataagaatggcactcatcacgtgtagtgcattgtgaattaatgatgatataagttaaagatgaaataacatatatagcatgtatttcgcggtgccacacttctgaaatattggcttgaatatcttctcaaataaataattaaatataatatggtaaaaattacattggaatttaaaaaaaaaaattacaaaaatataatatttataagtttgctactattatatgatatttttttatatttaaaatttttgtagtatttgatatgtgatattttttaaaatttaatatccaaactcatattttatgtttttatttctagcttaattagttttatttttatttctttagtttattttacatttgtattttaaggtgtgtttggaagtaaatgtgta

SEQ ID NO: 144373 - DNA, 636 bp, Cannabis sativa
  modified_base (445)..(447): a, c, t, g, unknown or other
tctttaaacttggaattatttttcattttacagacaacaggctgaccgggcagcttttaatcctggtattacgtgccgttgttatctttaaggaatttcattctctgtttatcatcatcgtgcaattgtgtttgttttatctttaccaaatgatttgtacaggtataggtgcccccaagtgaccgagcagacttatgactcttggtcactttttttttacaagtatgcttttttatctgttcggagtcttgggttcgaccagaccttttgtacgcactggatggtaaattagcaacacgttagtaatttcgactcaatttgaattttaaaataaacatctttattcatttattgatcaaaaatgtgtttgttaccgtagtaacttacagcagggctatttgatctaatttgatcttttaccttaacatgaaataaaacaaattgnnnaaataagaaattttactttaaatggtggtcatccgacctgagtacttttcatttttgccgaaacctttgagcgttgtccgctcagcaagccattcacttaaaagtgaatattctttcagtacctagtatggtcgtccgacctggtaccttattggtagtattttcttaagtgttccccattccaatacc

SEQ ID NO: 144374 - DNA, 853 bp, Cannabis sativa
  modified_base (366)..(367): a, c, t, g, unknown or other
attttaaagaaaataggtagaatagcttgtagtgtagtatattatagtgtaatgaagttaagaaaatgtgtggagaatgagtgaagagaaaaaaaatttatgggtgtgtagtgtgggaggggagttcggctgcagtgaataattgagaagaagagagaggggagggggtaatgtaaatgggggtaaaattggattttagaaaaatttatcccattttataaattatgcatagtattagtttaggggactaatttttgggttaattaagcacgaaatttcaaatttcccttacataacttaaggagtctaattgggacatcatctataaaaatagatgggaaatttgaaattctatacataataaannctaatattatttccctaaacctaaatgttataccataggctatatatgactacttttcctttatccccataatacccctcacatttgaaccaaaccaaatctaaagcttgtctctttctctctcgcccaaacgcacgactcactccacggctcacctccatggctcaactccaccacctccgacgaccaccaaggaccacccagcccccctctctcggacccagcccccctctctcggacccagccctcctctctcttcctctctctcaacccgtgagcctcaacccaccaaaaacccgaagcctcaacccacggtgacggtgcacggcgcagcggccttcgacccacccaatcgacgacaaggccacggtgaccggccgaaccatgtataaatcgaaggtattgtttgattatttttttttttaagaaagtgtttaagatttattgggtttgtgattttgtttggaattgtttgtgtttaagatt

SEQ ID NO: 144375 - DNA, 537 bp, Cannabis sativa
ctcaattatatatagtatggcataacatttaaactttaacatttactagggtaataaccctaggccattaaaccgctcactttagagtaataaccctaatcccagtttctaattaattaaaaatataatattcaacataatcgccaccgcgcatatctttacgtacaactactgtcttacttgacgtcccacaaatatggagattccaaacccccaggtgttctcgagcaagcgttggtagtcctagtcacacattcctgggacaaatagggttaatcccaaaattccctttcaatattcacgtaattagcattacacttacagattaacatatagagctcgaaaggagctttcgaatgatataaagaacatccaaaatagggtcttgagtcaaaagttatggccaaaacaaaattcagcaatccccgacacagtccaaccggaattccggttggaacagtgctaaataaccggaattccagttgtctgggcagaaaaacacgaaaaacttcaatttttaagcctacataacctact

SEQ ID NO: 144376 - DNA, 764 bp, Cannabis sativa
tagcaaaaggaacagtcaagtgacagagctccccaccctgacaaccaattagaccatcacaaaaccttaattgtgacaaattagaagcaattaattaataaaatttttaaaacacatatagaaagttaatgtcataaatcaatgctaaccttgtcagcaaaatcaaatatcaacttcttccccatattttttttgtaaaaatctctcttagttcaaaaaccagagtatccaaggctgtagcaccacgcctctcaaaaacattttctataattgaaaagactttctttcttatagccatttgtcgttttgagaaatcccgagtaccctgaaatgtaacaaatatccaagtcagaaatgtcatttttatttatctgtcaacaaaatgttctacaaccaagaacaccattaataatagtaaatgataatttctgacttactcaatctccttgaaagcttgagaagccttctagtttcatggctttccacaatctccttcactttgatcaacaagctatcaaactcaaaaccctgaacttgcataagcatctaacttactcaatcaacagccgtgaatttgggggttattcgttaatctcaaccttccccttcaacttagacccattcaacaataccttcatatcgccatccccaaaatccttcaattttatcgcggcctcaatgtttccagcgcagtagcctccttttgggtcaaatctagcaagtcaatctctagcttttgcgagttcttcgtgttcaatgcttca

SEQ ID NO: 144377 - DNA, 654 bp, Cannabis sativa
gggcaagcaccagcaacctatttcttatgtaagtaaaaggttactaggggtagaatctagatatccccctctataaaaactcgcattgtgcctagtccatgcatttcgtaaactacgaccatacgtctaggcgcacctcataaaagtgttaatcgatcaacccttgagagaagttttatcaaaaccagatgcttctagaagattgataaaatggttgattgaactggggcagttcgacataacataccatcctcgaacatccatcaagggccaagctttggctgacttcttgattaaaggtataactctagaagaaattccacctactcagcgagacccagaaaccttgatgttatacgttgatggtgcatccaacgaatagggttcgggtgtaggggtaatattaatctcgccagaaggctttaagattcactatgctctgaggttccgatttgacgcatcaaataacaagggtgagtatgaagccttgaatgccggcttaaagatagctgaggcattgaaagtcaaaaacctcatctatcgtagtgattcccagctgattgtgaatcaggtcctcaaggaataccaggccaaacgcttaaaaatggcgaagtatttagagaaagttcggaagaactgttggaatttatttta

SEQ ID NO: 144378 - DNA, 616 bp, Cannabis sativa
aaaaatgcaaaaaaaaaaatatatattttgaagtgtaaaaataaaaaagtccatttcttatttcacaaggattaaaacaaatattattttctataaaatgatatatttctctatttaatattgtttaagaataatattatacttaactaattaatataatttcattcaataaaactaaatagttaaatactattaattatacaatttataatttgcataattaatcaaaataataatttcacaaattactattttacccttaagaatttatttctcatataaattaattctcactcaaaatttattcatcaaataagattttcccctgtatagtattgtatagaggtgactcggggaccatggacctatattttgaagctccaataaatacttgattattatcgatctcatcaatagaacaaattagtttattaattctattattactccagtataaatatagaattacactctttaacaatatagaattatatttacaaaattcttacttgtagttcattgatataatcaatataagtggttcgacctccaagtattagttcataattagtgttggtcaaaatactgttttacccttctaattatctcttcattc

SEQ ID NO: 144379 - DNA, 723 bp, Cannabis sativa
  modified_base (626)..(656): a, c, t, g, unknown or other
aaataaatatgtaatttaaatttaaattaaatcaaataacatataaattaataaatatataatttaaataaattaaataaaattataaaaattaaaattctggtatatatggcgtcggttcttacgccatatatggcttcagttaaattaaaacctacagcgttggtagtaaattttgccaaaatcgacgctgaccatttacccgtaataaaatataaggacccgtaaaattagtagtgtatttttacaatagaaataaaattaagacattacaactttattacaatataatataaggacccagagccgaccatttacccgtacaagaagtgttgatgcacaaggctcaaaaattaaaaagacccaatatgacttttcagaattttttttaacccaaccttccactaatgtgtcatgccaaattaaaaaagaaaaaagtatttttttcttgatttttttccttatttaatgctttttaattttttttttccataatatttgataactaaatagtgaatagagagattttatggtcttatcttttgacatggtgagatattttctttagttttctccgttcttagtgttttgcatctgttgattatggtgtaaagaccgcttagttnnnnnnnnnnnnnnnnnnnnnnnnnnnnnnnattatgaaaattatttatagctatctaaataattatttatactgttattattgaattctgagatgca

SEQ ID NO: 144380 - DNA, 614 bp, Cannabis sativa
gtccaaaaatgggacaccaaccggtcgaccggtttgtttaggtcccctagaatcggtcgaccggtttgtttaggtcccctagaatcggtcgaccggttccaaaaattcccctacaatgcataaacaacagtttccaacaagaatttcacagaacaaaccatcaatactcaagttgccattaaagctcaaagctttgaactcaaagcttaaagttgaacaaaactcaaaccaatcaataatacttgctgctaggaacttaaattaactcaaataaactataaaattcgaaccctaagcataaggaaacctaacagcccccaaacctagaaatcaccccttgaaactaagcgaaacttgagaaaaaccataactagagagtaactaaggttaccttggttaattcctccttgaattcttgctaaatcccagagaaatggaaggaaaaatttgatccctgccctagctttgccccagccgaaagaaagaaagagagagttcaagagataactctaatttcttatttttcttctttttcttaatttcctcaaatgaaaagggttttcccaattaactcttgctgaaaaaattacttggctaggtgtcaatcacctagg

SEQ ID NO: 144381 - DNA, 569 bp, Cannabis sativa
taaataacaagaaggttttaacatgattttgaagttaaatcttcatagtccacgagtctatcttattaaggataaatatgtttgaatacaaaatacaatgaaatgatttagcaacaggatttcttctttctctctaaattggtcgtcctttttatcctgggttccgtctctatttatagatgtacgggatgacagttattctcttaggatctactcattcataaccgttcatgaaacgtggacactccccacattttattctttatgtatatggggtaatgttaaataactattcaattattttttgtctttatctattgacgattatgttgaatgtattggatagttctctctgagtacacgtaatctttcttaatcatctttgtagggaaaatgttgtgttaagatacaatgcatctcgcggttctcctttctcatttgaaatggtattagcgaggtggttacttccatacgttgacagcgatatgaataaatgttgaagtttccattccttaagcatactcgcgagtatgtggatcaatgagttgcaagctcttactcacaagtat

SEQ ID NO: 144382 - DNA, 782 bp, Cannabis sativa
aaaaccattcatgggtgagcatggtggtgtatattatgtgatttactattttatatgatactaatacatatgatatatataagttatacatatgtgacatatcatataaatatatatagtagaaaataatatattgatatttgaattttatatcatgttattatatgtatatatgtgagatatataatatatgatatgtatatgagtaatatatattatatatatgtagagcatgtgatataatatatattagtgaaattaaatatgtagaaataattatttctatgtatttatacgagacatacatatataatatattttatgtatataatatatatcatgcatgtatatcaaagtttatatatatgttatatatgtaatatgtaacataatagttgtataattattaatatattatgtgtatgttacatatgagatgttgataataacatacataatatattaattagcataagattacaatttgagagttaaaattttatgtatgggagttatatattaattttatattaatatatgagttacatagcatgataataatattaatgttgatagtaataaaataatgtttattattattgtgagaattattattatttattttgtgaataaagaatagttttgaattcttgttcaatttagtggtgaagaattaataaaagatgaattttaaaaagttacatcttttcatcttttattagattataagagataatcatctcatattatgagataacaaaagtgaactatgagagttacac

SEQ ID NO: 144383 - DNA, 783 bp, Cannabis sativa
  modified_base (640)..(641): a, c, t, g, unknown or other
gtggaaatgatagaatgctaaaaatataataaattggtgaaaaatggcccaaaatttgaccttgcacgcgcccccacgcgccttcccttttttttttaattgctcgaacgacatgtcgttttccaaaaacgacatgtcgtttgtggaggacgacgtgtcgcagggtcaaaaacgacccgtcgttttgctgctcaaaaaggaccttccagtcaatgcaaaacgacatgtcgtttggctgacagagcccaaacgacatgtcgtttttctgctccaaaaaaatgacattttccacccataataaatgacatgtcgtttgcccgacagaggcaaaacgacaagttgtttttcgttaccccacccctgtcacccaacaaacttccccatgggtccgcgggtctgcaactcggatcgacgcgacccgtttcgtgacccgatcggttggagcattcccggccatacaaaacagacggcgtttgaggggttttgttctattttcaaccctctatcaatttctatcatccatttcatccatttttcacaaaaaaaatataaaacacaaatccgaaaataggtttccaccattgataaactcaatgaaaaacttgcaatcttacaataaaccatgcaataatcatccaannaataagataaacccattctaaaatatttaaactcattttattcgaaaatataaaaaaaaaatcaaatttgaaaaaaataaataaatgggttagttcaaatattttggagctctaaaatcaagtattctagctcttgatacca

SEQ ID NO: 144384 - DNA, 525 bp, Cannabis sativa
gagagagagagagagataaacttctttcttaaattttgatttttcttcgattttttaataatggtgctaaaggataattaatccaaaattattcttatttcttctaatggccatttgccaaacaaggaagagccacctaattccctaaagcaaaatacccaaaatatcttttttcttgtaacttaagcaattaataggcctaggggtaaaatggtccaataccataatccctcctaaccccaacatttaatatatctcttatgtttgtcccgctaagaaatagattctaaacttatctatgtaactctattggtcatccatcgcattttctattgtcgctgagcaaaaaaatcataaaaattgcataattcatatttagcataaataatactcttagagtttaataaaatctccaaaattgagaaattacaactctaatgcccaattctaaaaagggcccacaacaaatataaaatcatatatatacttataaactaccaataattaatgctaattgcttttact

SEQ ID NO: 144385 - DNA, 756 bp, Cannabis sativa
ttaccaaattctaaaataaaaaatccactgaaacttaaataaaactaatatttacgtgactcgacactaccatattcaatttatcaacgtaaaaatggacaactaaattatatgcgaactcgactagaatgaaacgtgtaaaatataaaaattacactattgtctctgtcgaagattaaaatctacccatgagtatcattatttttcttatttataatttttagacagatgttatcttcaattatcaacaatttggagattgatttttaattttattttttatcttacacacaacagttaagttgtgttttcttaagtatttgaacatcaatttttagcttatctttggaataacttaagaacatatttatattatcaagctttcttaaacactaatatattgcatctggtatttttttttaattgttaaaattataaattatattatttagatatacataataataatcccacctaataataactaataatattaataatatttttttttttaattttcaattgtatcacttttaaataaactaaaaaatactcagcataaatattagtatacatgtctcgcgcgtaacttttttgctagtatatacatatatataaatatatactaaaaaaataagtatatatataccgtacgtataatgtatataatatatatatgaaccgtatgaataaaaaatatatatatatgtatatacgtatgaaaatattgttggatatattttactaggatctaga

SEQ ID NO: 144386 - DNA, 580 bp, Cannabis sativa
ttactattttttcaattcaaaatagatttttctaatcatctttatacaactctttattcctacccttaacagagtttcaaggtggtaattcgaggaccatggatctataattctatgctccaataaactagattatttattgagtctcatcaaccaaataatcccgtttttattaattctatgattactctactataaatatgtaattgcactcttagtagttatataattatatttactgagtttaactacagtgtccattgatataatcaatccagtaattagccctccatgtgttggttcgtaattattgttggtcaaaataatattttacccttctaattatttatttatcctttagttccattaattcactagtagaagtataattcaagatcccatcaaaaatttacacgtaactttccaataccaaaattaacacataaagggaaccaacattcgatccgttagaaagttaagattccataattgtagttcatgttcctagccattcacattattagattttcaaaatagaagttgtaagaatcatcttctttgagaaactttaacgagtgaa

SEQ ID NO: 144387 - DNA, 1353 bp, Cannabis sativa
aacacattaacaagtttaatgttgcaaatatttaatttcaattaatacataaatctttaacaaatactatttgtttgtagtatttgtacgatattgatggccatcccaagcctgaaagagtgatacgaactctttatcatgagatgaagagaagatgttctgagagaaagaatatcaggcacacgtgatttcaggaacattatcctggggatccaaatgatttggcaagtgttattgaagttgtgtacctgatcactgcactacaaagagctggaagcaaaccattgacttatttttgagcccaaagtttgttacgcgatcaaatcaaaacaagaaaaatagaggggaaatgaagtattgtccacgcaaggcacaaagtcgatggcagcgtctcataatgaatttgtaagtaaaattattaactttctattagcaatttcttttattattaataacacaaactaaccctatttttgaactggaagtccctgaagactacgcaattcatacttagaaaaaaggtcaccttagaaaaggaacagaagacatttggattagcgagacatgcagagaactacatgtaagtttaaatttttttttaataatatttttacaatgaatgcatggtggtattattgcgtttctaatattttatttgatgaggagaaaatgcttgaagaggttgctagcatgacggaaacagaaaataattccagcgatggatcttctaggaaatacaaagcaatatcaagctatgaaaaaagtttttgggagtcggtcagactatcaaagaggagtgggttataaattgaaagatagctcggaaacaagttctagtactcaaagtttagctcaattacaaggacctactccatccattagtccggaagatatgagagtcttcgccgagtttatgttaaaaatgtgtgataagatttattagtctggcacctccagtgacgcttctctgcatgacccacggtttgataattttttacaaaaaattttacgatcacaaccgcaaggtagtgcgtccagttcagccccccttcaaatgtcagtgccacaacaacaaccacgatcgcctcagatgtctcatctctttcaacaataacaacaacaacaaaattctcccaacatgtctgctgtctcctcacaatcgcctcagttacattacatgttcgggcatccctcaaagtctcctcccatattttttctggatgtcgcaggaggatctcagacacaacaatctatggttggccattttggaggctcatcctaacaacaataccctatgtatggtcaatttgggtcatcccaacaccaacatgtgtatggtcaatttgggtcatt

SEQ ID NO: 144388 - DNA, 911 bp, Cannabis sativa
ttatttagggctcaaaacccaacaccaaatcccatctcaaatacatcactaggcctaccaagctgactaagaacttttgttgcaatatacgagcgtgtagctccataatcaaatagtacagtataaataatgttgttaataggaagctgacctgtgactattgaagggctggcggtatagcatctgcctaagtaatggcaaacacacgcgctggtgttggtttagctttaggcttaggctcctctttcttcaactgaggacaatctttcttgaggtgccccactaatccacactgaaaaagccctccgattataagtctcagggtgatgtttcttacatatgagtaggtctgacgtccccctttactttggtttccacgaaacatcttattttgccttgaacctcttgaagatgggaaagttctcttctttttctcaatagtggaatcaccactctcctttcaaggacgagaaatagggagagtagtggtcccaccagcaacaggagtttctcgagtttcttgcagaaacttgactgctccttcagctcgaagagccttgtcaaccatttcagcataagttgtagtgtcatttgtagtgataaccagatcatgcttaatcttggcattcaaccccaccaagtacttttcctttttactgaagtctgttggtacaattcctgaggctaacttggccaagcgatcaaacttcgtcgtatactctgtcacagtcatgttctcatcctgtaccaactcaacaaactctttccgctttgcactgcggactgcctcattgtaatatttagcattaaaaaagtcccgaaattcttcccaggtcattctggctacatccttatgttgggattttatgccctaaataaaactcattacaatctaatctgatttgttatca

SEQ ID NO: 144389 - DNA, 541 bp, Cannabis sativa
tgaaaacaaaaaagttcaacaaaatcacaactcaataagcttccattatcgcaaacaacctttgagaagaaaaacctaaaaacacctggacataatcaaactcctggttaatctggtgaggtttttggatcttctccttcaaagatcggagagcttcagagaagttgcagcttcggtggtggttgtagacgattgggcattgactgccggtgatagttcgttcggcttcacagaggtttgaccgtgaatggcggagagaaaaaatggagttcacgaggcatttcgacgagaccacccacaacctccatttttgcctacggtgacctgagtcactagccgttcacgatcccagtgatgcgattgttgtgagggtgagagacgagagagcccgtaacttgggcaatagggtggagagggaccagcaaggttcatcgggttcgccttggggttggacgatgaaaggatggtctggtgaagggttgccgtcggtgtgggtagagcacagtgagggaaaatgttgagtttgaggctttagggtttc

SEQ ID NO: 144390 - DNA, 913 bp, Cannabis sativa
  modified_base (455)..(468): a, c, t, g, unknown or other
taaaaattttatttttgaaaaaaattctgaaacaaaactataactttaatctaatatataatatatattacatatattataattatatataatcttaattaattgaataaataaataataattaaattttttatattttaatttttattcaattattaataattataaattaaaactttaaatacaacattaaaataatttttgatatcatctttttcgttgggtaccaaagaaatttagtatttttaatagtgaaatgtatccgatatttttcttacatttaataacctcccctaagtaattttctctaaagataatggagtaataataacaaggttaattatgatttttgtccgctaaactttaacatgtacaaaattatgtcctttgaacttttctgaccgttaaaaatttcccttaaactattgatcatgagattgttagatttaaagacnnnnnnnnnnnnnnattcaattttactatttcaatgatggtttatgtactcatatgctccccagactttgatatctaccaaatcatgtccttcgaactttgacatatactaaatcataccccttaaactttcattcatgttagactttttttataagtccttaaatctaataatctcaataatttaaggggcatttttaacgaccttaaaagttcaagatgcatgatttgataatgtcaaaattcaaggagaaaaaatcttaattagcctaataacaaaatacaataaaattaatagtttagacatagattggattcaatatatatattcgtaaagacactattaagtccctgtttcggtttgcaaaaaaaaaaatacattatttattaaaagagaaatgctaaagagcaccagtggtgcctagcaccctcctatgtatcaatatcgttattggtccaa

SEQ ID NO: 144391 - DNA, 696 bp, Cannabis sativa
  modified_base (39)..(39): a, c, t, g, unknown or other
  modified_base (442)..(442): a, c, t, g, unknown or other
  modified_base (623)..(624): a, c, t, g, unknown or other
gatctacactttcttccatacaacagttcatagggagcnatccctatcgtactctgataactaatattataagaaaactctatcaatggtagatacttcctgcaagagcctttgaagtccataacacaagctcgtaacatatcttccaatatctaaatcgtcctttcggactgtccatctatctgaggatggaatgttgtactaaattttagtttcatacccatgtctcgttgcaaactcgtccaacacttggaggtaaacttcggatctctatccgaaactatggattttggtaccccatgaagcctttctatttctttcacatacaactctgctaactgatccactgaataggttgttttaacttgtagaaattgagcagactttgtgaatcgatctaccacaacccaaatagaatcaaacaaacctgtggttctaggtnacccaaccacaaagtccattgtgatgtcctcccacttccattcaggtacggttaaaggttgtaacaaccttaccggtctctgatgttcagccttgatctgctgacaggttaagcacctcgatacaaattctaccaaattcttcttcattaaactccaccagaagtaaggtttaagatcctnntacatcttggtggtgccgagatgtagggaatatggagtggtatgagcctcctcgagaatttcatttctaagt

SEQ ID NO: 144392 - DNA, 638 bp, Cannabis sativa
  modified_base (500)..(502): a, c, t, g, unknown or other
atgcatatgtgtatacatgtttagtgtgcatgttagttaagcctgctagattacattagatatgtatgttggcttttgtactatccgacaatatcacatcggtacatccagagtacgactagtataggttgatattatggtcgatagtaccgtactacttgacagtatcacatcgatacgactagagtatgactagcgtaccaagtataggctgtactatgtcaatactactgtcgtacgaatcatatggatgtaaaaaaagcttctgattatacattctggactcagcaccgtgcgggtcatagggatagggttatgattggggatatgggcgttcgatcataatctaggttattactatgttattgtttattcttttcttactaagtttgtcgactcacagtgctatttccatgtgtaggtaagggcaaggccaaggctgagcagccgtgaggacgagcagatgaagattgtacatgttagggcggttaggcctggannntacgatctttgggacatcagggcttttgtcgtctggtctctaggcgacaaaacttttgtataagaatagtgaacttttgtaaatgtattttgtaaacgggatcccgaaattctataaatgtattactttatgtttt

SEQ ID NO: 144393 - DNA, 657 bp, Cannabis sativa
  modified_base (61)..(64): a, c, t, g, unknown or other
  modified_base (524)..(525): a, c, t, g, unknown or other
tggtacgtcgccagatatattgcaccacctaatcaggtgagaccatatattgtatctatannnncattacattatcattgcctaatcaaattatcgataattttagaacctgtcatgccatgtggtacattatacttttcttacctcaagttccggatcaggtatgttggccgacctgcttggagaatgatcgataatctcgggccctatgttctaacaatagtaaatcaataagtatttatcccaaaacaccacttaacacttgcgtaagacaatttaggattttccacaaaactccgtggtataaatacactaaaataaaacttatactttggctcttaaacatacaccatatcgtagagctcatcacaagcttcaaaacggtatataaaacgtccaaaacgaacacccaagtgaaaagttatgataaaaatacgatttctgatcttctatgaatttctaaaaactatgaaacacgaaaatcccaattttcgcactgatcgaaacactaccaaaacttatcnnaatcactccaaacttcacagggcacatctatgcattgaatactactattcttacgtaacagaaattaaaatcgagcccttaaatggaaaactccattaacgctcggactaagctttaaaaagttgcaaactc

SEQ ID NO: 144394 - DNA, 1101 bp, Cannabis sativa
tcattaaactaagtgtatttttcttaaattaatttcaaaataatctgatgaaaaattaatttcatatattttgaaaattatctatgttgctaatcattttgttaggttaaactagtgtaattaacatattacaattttcaaataaggcaaatgggctttcacaattggagttattcatgtgagggagtgttgggttaagtatgtcgtatccactactaatggccccctaactctcacacaaggcccaaatgagatgaatttaaccttaattaaacaattattatttattgaataagcccaatactaattggacctaaataaaaactatcaaagtgacattattattttagcaacctagtccattttaataatcaaaattaaatgggctccctatatgcatttaggcccaaagcaaaaatataggcacaggcacacactgatttggatggatcctatcatgttactaggtttatacaccaatgaaaaaagattataaaatttacatgttacaaattattaatttgacctattgacaattggactaccgttaaaatcagatcattggatctgtcaacaagtaaactatagtaacttagatcaaacaataataagttctataacacatgtttgaatattaaacaataaataaaacacacaagcaacaaattggatagttggttataggatttatttaagtttaactaaattaatctttttttaaaaaataattaaattttattttcaaaaattaaataaattaaatcaaataattaatttaaaattaaacctacaaatttaaaaaataaggtttttaacaaacctaaatatttattcaaaattatcaactaatttttcaaaaaaaatgttatttttaaaattaaataaaaattaaatgtctaataaaataaaataataaatagatattatttatctaattttataatttaaaataaataaaataataaattttgaaagttgataaatatttagtcagttttcaaaattatttagattattttattaaaatatatcatattttaaaatttcaaataaggtcattttattaaattatttaagtatataaaatatctgaccttaaat

SEQ ID NO: 144395 - DNA, 544 bp, Cannabis sativa
  modified_base (496)..(500): a, c, t, g, unknown or other
caaaataattaatttacgagtaacaacatattttaaggataaaatatattgaataaatttgtctctactcgatgtagaccatctatagagaattttttgattattttgattgaaacaatgtataatttaaagtgcatctacttttggtatatagagcgttctatgtaatcaggagtacaattctaaatctatagtggagtcacgatgaattaataagttaaaaaatttacttggtaaatttcaaatttacttattgggagcttgtttacaaagggtcatggtcctcttaattaggataatatgtcttgtagactcaattaatttattttaattaatcaattagaattctaaataaaactatgacttgtttttgaattttcactaaacaatggcttatttgagaagaaaagaggatttagggtttatttaataattaagagactttgtaaggtttaacaaataaataagttaaatgaaaattttatttaataattannnnnaattattaaatagatagaattgacatttatagagttagaattaa

SEQ ID NO: 144396 - DNA, 1020 bp, Cannabis sativa
tcttttgcaattcaaagtatctttcttgcgctttcaaactgacaaatctatctttttcaaaagtggactttgacgccggtggcggcggttttgacgatgaagaacttgattgccccgttctagtacgcttggaacccatgacaaactttaaaattatcacacaaaaattttctcggaaaaattcggcagcacctccccttaatttcttcacttcccaaaaattcaattgtccaccaaaatcataccacaataatccaataacaataatatttcacaatattgaacaattcctcaaaagaaatccacaaattcccaaatgctgtagaaaactattgaaactatcggaaaactcgcttaattaatcaaagttttgaaaagaaatagacttactaagcgagaatgccgtccatccacctcgattattgcatatccatagaaaactcaaggttgaagatgatgaatagtagcaaattcggatgttggtgaaaaagggtaatttgtggtgtgatttttgaaggaaaaggaagatttatgagaaaaagaattgggtttttggtgatatagatggaagatttgaagagaaattgaagaaatttgatgatttatggtagaagagggttgtggtggctgagaaaaggcaagggatcgggttgggttttgatttttaggttaaatggggttttatgtgaattggggaatttacagggctgcaagggggtcctgtcgcgacgggcaaggtgctgccccgtcgcgacgggaattggcagaaaattttaatttttgttcgttactttcccagtcgcgacgggaaatgccccagttgcgactactgaagcttgccccttttttttcgtagaaggcccaatcgcgacgagacagtacccccgtcgcgactactgtagcagtggtcttcttttgcatgttttttttttcacgattttcacggttttactttaaaactaacaaatgcaatgaaacaaattaaaatgctacaaaacacttgtaaatgtcttctaaaaa

SEQ ID NO: 144397 - DNA, 692 bp, Cannabis sativa
ttgccatgtgagagacaattttgatcggatggacatccaaactgcaggggcttcaggtaagttcaaacctcatcttttatacaacagtaaactacctcaaatacctttcatttacagcaggggtgtttggagttcaattaatgtcccgaagcatagatttatcttgtggcaagttgtgaatgatcagctgcttacaaggaataaaatgctgcaatttcgggtcatgttagacaatgttgagtgcccggtttgtgctgaagttgctgaatctattcaacatctttattttgagtgtaatctctcctacaaggttgctaagcaggtgcaaaattggctgggagttgggggctggccaaaggagtttcaggcatggaaaaacaggttggtgatcagcaacaagaacaagaatagcagaatttgtactgctgtcatggcagccacggttttcaggttgtggttgaacagaaacaactgtgtttttaatggtttttcgagcacaattacatctattgtacaggatattaaaaaaagtatgttctatagattatcaatagcaaaaaaagggagcttgaatagatatgagaggaactttatagagcaactatactgtaaaaattaattgtcttgcagctggtttttttccttcagctgtgttgagtttgtaattgtttgttgattaatgaagttgttcc

SEQ ID NO: 144398 - DNA, 523 bp, Cannabis sativa
aatctatccattggaagtagagggctctcccccctctcccatattaacttctccttgctcattctcactgtccaactgctgaaatctgttgcaaacttcagttctccctggttcctgcgcacttgtgctcttcatactcactttttttcctttcataaccttttgaaatccctctgcatctttctcaacctgttgagtagcttgttgtttctttggaacccaaacttgtttcccttggtcaatcttactctcctccttcctacaagcatcggtgctatgcccaatcctagagcaattataacaaactagaggaatccattcatatttaacttctaattccacctcatgatcatgttcaaaaatgaaagatatggtactaggaaaagtttgtgccaaactaacctgaattagtattcttagatattgcaattgatctctattctttgttattccatccacctgcaaaggctccctaatttgtgccactattttgaaaagagatgtctctccccaatatttgata

SEQ ID NO: 144399 - DNA, 859 bp, Cannabis sativa
  modified_base (40)..(46): a, c, t, g, unknown or other
ttctatatgcattactcctctagggatactgaattctttnnnnnnnataaagtgcatctgaatatacagaagacatgtctctaattctatccaaaatggaatagagataacaccattaagcactttcttcagtttgaataactttctagtgctttagaaaacaacaaagttatttagcttcactgatggagcttaaaatattatagatggatttttacatccttctagaataattcctccactccaagagtaaccaccatctctaatattttgagttggtgtagatataaggattttaatatacacttctatgtattttgcgtaagtcattcgaatagacttagccaaaactacctatcttatcctcataattctgataagttatttctatccataagaatggttagatttactttctcagctatgttctaaggttcctatcatgatcatatcatagtaatttatcactagtgtcatccaaataaagatgggctagaattttaaaattctcccactcagataaggtagtgtgatactatgtccaagaacttcattggtatcaatttctattactacagtaacatgttaattggaacaattataggatcaagaataagttctaataatttgctaatttatttattaccttacatccatgtctaatcaaaatatgtgtgccatagagatactttggtgtattgagtatagtgtatatatgacaacactattctgactgaagatttagaaagtgtatatatgacaacccagtcgttggctccgtacaagaagcccggacccatgaagaaagataccaacaaaagagacatgacaaagttttgtcggttccacggagactacg

SEQ ID NO: 144400 - DNA, 608 bp, Cannabis sativa
caatagtgggtaagtttttggttccaaatttttagaggtactactactagactactaatgctactataggggcattcaactcaaacagtaccgtgaactcaatgtaattgacaaataatctcctcctgttgttgttattcttacgaaatataggaggtttgggagccttagggataattaaaattgagcattttattaaaagaaaataaaaaataaaaaatcaatacctcataaatttaatatatgagaagctgttaatgatcatattttgacccgtaattttctggccaaatttattaatgtgtacttaattattatatttggtttgtgagttaattattttctgaatctcatcttcatctcctctttttagaaaggtgattacttacttcttggtttggccagttagtctcggtgagtggcttagcaacccggttgggcaggcgaatggattggctgcttcgttatcatcggcagttactgtttttgttgtctatttcatatggtgcacctgcaataattgtatttttgaaggagcatgttgctaagtaagtagattaaattttgtattaaggttagagttcaattttgtaacttgtcgaagttta

SEQ ID NO: 144401 - DNA, 651 bp, Cannabis sativa
aagttgctgttatgattgataaattaccccctttgtggaaagattttaaaaatactcttaggcacaaaacaaaagagttttcattggaaagtctgataactcgtcttcgaattgaggaagaagctcgaaaataagaccaaaaggaagaggcgcttgttgttggaaacaacaacaacactaacaaaagatccactactgttctgaaacctaattggaaaaacatgaagaatcagaatcacagagcgaattcaaaccgcaacagtcaacctcagactaataataacaatcagaattggaaccatcaaaggaacaaaaataataagcagtaagtaccccctaatagaaatgactctggtttgttcatgtgttaccactgtaacaatccaagtcatatggcacgaaaatgtaagagcaagcctagttctgctccgcaggctaacctgacagaagagctaccatttacatctatgatttcaaaaatcaacctcattggtgaatctgatgggtggtgggtagatactggcgcttctcgccatgtctcctatgataaaaatatgtttaaaacatatgttgctgctactgaggatcagaaagtgttgttgggtgactcccacaccactatagttgctggtactggaaatgtggaattga

SEQ ID NO: 144402 - DNA, 1937 bp, Cannabis sativa
  modified_base (1548)..(1549): a, c, t, g, unknown or other
ctttcaagaagagttctattcatcctttcagccaatccattttgttgtggatttttgacaactgtgttgtgtcttctaattccttctcttgtacaatagcccttgaactcatctgagcaaaattcaaggccattatcagtccttaaaaccttaatgcaacaccctgtttgtttctctatcattgttctccaatttacaaaggtttcaaaggctagattcttatttttcagcaagaacacccagactttcctagagtaatcatcaatgatactaaggaaataatttactcctcctgatgtttgaatcttagaaggaccccagagatcagaatgtatgtagcttaacttctctgttgttgtatgcattcccttaggaaattttactttgcaacttttccctaatacacaagattcacaaaactctaacttttttttagaccacctttgaatacctcttgtttgtcaagttccatcaatcctctttcactcacatgtcccagcctaagatgccacattttgatactgttttcaagggatttgtttattactggtgctgcaaaaccagtaactaaatgcccatcaagatagtaaatgccatttttgagttttccttttgcaataacaagtgatactctagtaactttcaatgtaccatcatctatcttaacagtatagccatttttatcaaaagcaccaattgaaagcaagtttcttttcagatcaggtacataccttacctgttgcaaaattttgatctttccatcatgcattttcatctgaaccgagcctattccttcaaccttgcatgatttgtttttgcctaataggacacttccaccttgttccttagacagtgtgttgaagagcttactgtttggagtcatgtggaatgagcagcccgagtctagtatccattcttcaccagacttcatgcttgctgcaacaagaacatcagcagattcatatccatctgcagctagatcagcttctccttttgacttgttcttcttgttttgctctctctttagtttggctttgagagcaaggcaatcatccctaaagtgcccttccttcttgcaataatagcattgtttccctgctgcatttcttgaaccagatcttgctttgtgtcctccatttccatgatgattcttgttccctttatgttctctttttgtgcttctgcctctagtaaataaaccttcaccactcgattcaatcttgttgtcatcctttctttgaatttctttagaacttagagcagccttgacttctatcatggtgagagagtctttcccacacagaatagtttcaacaaaatgttcataggttttaggcaaggaacttagcaaaataattgcttgatcttcatcatcgatcttgaccccaatgttgcataaatccaagatgatcttgttatagtcatcaagatgctttcttaattctttggattcatccattctcaaggtgtagagtttcttcttgaggtacaatttgttggctagagatttcttcatgtaaaattcagaaagtttgtcccataatcccnnggctttctcctcacttgagacttctcttaaaacttcatcacccaaactgagcaaaatagcactgtgtcctttggtttctatttcgaacttcttcttcttatcatcaatagctgctagagcttctagattcaaggcttctgaaataccttgatgaaccaacaatgctttcatcttgattctccatagaccaaaatcattggtaccattgaacttgtcaatttcaaactttgagctggacattcttgatcgtcttggtgagttctttaaagaacaaacttgattcttgaacagccgagattaaccacggctctgataccaatttgtggaggcttgaactcccaacaagaaccaacacaacaccaaaataaacacacaatgatcaagaaca

SEQ ID NO: 144403 - DNA, 981 bp, Cannabis sativa
agaggtaaaaatgatagactttaaaaaaaaaggaccaaaataaaagagaacaatataaaaagggtataaagtgtaatttgctcccaatagtattctaaaaagtgtgccaaatttgacacatgctgaaaattgtaaaaaatttgacacaaaatatagcattgtaccaaatttagcctacaataaattctataaattctacccttttatttattttatttattattattataatgtcactaattattatgatttattgacttttacataactttatcttttttatttactatattactattatttaagcagtaaaaaaataaaaaataatgatgtttgtatattttcaatacaatattaaatgataatcaataataattatattttttttacatctttatattagagcacaattataaatagtaagctaaatataacgcaaatttaatttttgtgtgaaacttagcataaattttacatcttgtattagagatggtcttagaaaaaaatgtgctctaatagtgtgcaaaaagtgatgtaaatttgacatgatatttgctatgatgcaaaatttgcataaccataaatgaacaactttattattgtcttttatatcacttgtattattttattagtatatttagctataacattgatgatgaactatttatatcttttttttattattattttacatgaaataaaataaaaaataaaaacaaacaaaacaaaataggggaatttttatttttatagtttttaaagtataaggttgcaaaaatatagaaatttttttaaaaagttaaaaatatataataaaaaaaaaaactgcataacgtacccggttactcttttatagtaactggttatctcttgattaatataaagaaacctggttacctttctcatattttccaactctttttttttttttttttttttccaaaaaaaaacttttttttttttgagaaaaagtcatatatt

SEQ ID NO: 144404 - DNA, 1005 bp, Cannabis sativa
ataccattatgtactattgattatttatgaaaactatggaagttttttaaatttgaaatgtttcatgtttctggaatattctactttaatacttattgcaccaagttgtaattaaagtcgcaaatcaaaatattattaatgacgaaaaacgcgagtacccgtgtactacgaaaacactgtaaatagatatccctgagaggatataaagttgttcaaaagaaacataaatataaatttgtctaagtacaaggcgcgagtacccttgtatctcatagatataaaaaaaagagatagattttaacacaagtaaatattaaaggaaaagtcaggcatttggagcagtaggggcagatccatccccgactttgctgatggcttcgttctcaacttcctcgacatccgcagcctcagcctccttgggaaacagattccctccaccaccttgagtctatgtgggcgacatggtgcgaaaagcctcagccatttcagcggcttctgctccgaggattgaaaaatcaaagtccggaatcttggagagagtagtgtatatgtagtccgagaccgcctagtcatactgcttcttcccattctccttctcggcctccaaatcgcaaaacatctcctccaattttgtttgggcactcttagcctcgagctcgacttgctccttggccctgcgaagctccttgagctctttatccttcgaagtcgcatcttgtttcagcttcttaatgtcctcctgaagctgaacgttctgtctcttcacgagttcgacctccttggatccagtaataaaggcctttgagaacatggcaatgaactgcgaagctaactccgtagagcgaggcaatagctcctcagaaggagtcttgttgatctttgactggaattcatcgcccacgaacttctcttggagagtcagtatgttgcgggctcggatagctgggtcaatcacgaccttcttccttttttcttgtgcgcccttagttggcctcttggaagaat

SEQ ID NO: 144405 - DNA, 906 bp, Cannabis sativa
tttccaaaatatgcatttcataaatattaatttaatctcatacataaaccctaattatttaataatccaaaatattaattttaggctgtctttacaaagttcaagcacaaattttgcacgattagatgataacttgtgaggaagagcatgtgactttccatattaacaggcgtcacagaaagtttgtatttcatttttggatcttcttacattacttgactctaaaacaagatttaaaagcctaggtgatggatggcctaaatgtctgtgccatacatctactttagacacaaaattctcatcaacttcaagttggtttacattggaattagtagaaaaacaagcagaaaaataagtagactttggctagtttttatttgtggattgtggttgatttgaacctgtggtaaaatgatgatgtagggtgtttccagtctgtataatccatctctaagcactcctcgaagcactaccttctgagttgcctttgttgagctttgtgtcctaaataaaactctattttaatataatctcttatatttatttatcaataaagaaacaaatttattttcattacttatttaatgtgttattagattcatgtgatcatttatttgtttatttaatttataaatttatccaaatctttatcacattgatattcttatttattgtgttatcaacacagtggaaagtaatcaagattctaatttatcaatacacaaggtttaactgataggataatctacaatgtagtttacttgcacattggataagtgttatgccctttctaagacatttgttaaagtaaacttcggttggatgtatggagtatgcatcggaaggggtcgatattgaatttggataagatataataagcttacgcaatatctattcaattcaata

SEQ ID NO: 144406 - DNA, 851 bp, Cannabis sativa
atagtggcactttttgtgtgtcactatatctctaaaaatattaataaaaaagaaaaaaaaaaggatatagtgacacttcatgtgtgtggctgttattgttttagtttgacaaaacctgactctatacgcctttagtgacacgtagaaaatgaatgcagaaggtttcaatgacacgtgtgaagtgtcactaaaaattgtctttccagtcaccctcattagtgacacgcgttgaagtgtcactatacacttttagagttactcaatgtgtgtcactaaaacccgactttctagtagtgccaagtgaacacacaaacttgcggtctcttggtcacttgcaattcaccaagtttcacagaccttgcctaggaattttcttggggtgttgcccgttgtacgcatgtggaactgagaaaagaataacttcgagaagttaatcttgttggccagtggtttagacgcaataaattgaacataaatattgtttttcattcattaattggtctttgttactttgcaaattaattaaactgaatcacaagcttacagtacacaattttgcttctagatatcaagtggctatcccggcttgccttgcatagtagaggccttcgttgaagaacggtgggataccatgctttaaaggccatgggtactagcccttttgtactctaatgttgagtaggtagaatggctacattggagtagtatctgtaagctagctactaatagtatttgcgaaggttctctccattccagtatcttggtaggaaaacgagctccatgttcttgttgtattttcccaacttgtaggctcccttactagttatctctgtaacttgataagggccttc

SEQ ID NO: 144407 - DNA, 888 bp, Cannabis sativa
  modified_base (451)..(475): a, c, t, g, unknown or other
gtcactatatagtgtcactaaaaaggcaaattgtagtagtgaaagagaaaagtctaaataaggataaaatagattctcaactaatctctttctacatggtagaagggaatagagaagaagtaataaggaaaattcctctaatacttcttattgaggatgatcctaagacttttctagaagccatgcaatctagacatagggcattttggagagaagccgttgatgatgagatggactcaattctctccaatgacacctatgatattgtggatcttccacaacgatgcaaagtaattgggtgtaagtgaatatttaggcagaaatatcacactcatggctctatataaacctttaaagcaaggctagtagctaaaggttttaggcaaaatgagggtattttgatacttatggtcatgttgctagaacaactaccataagggtgttgtttgcnnnnnnnnnnnnnnnnnnnnnnnnngttcatcaaatggatgtaaaaacatcatttataaatggtgacctcgatgagaaggtctatatggaacaactcaaaggatttgtcctactaaccaatgaacataaagtgtataagttgaagaaatccttatatggattaaagcaagctccgaaacaatggcacgtcaattttaaaatgctattatttcaaatggatttaggcataacaatggagataagtgtttgtattcaaaaacctataaaagttatgtgataattatttgcctatatgtggatgacatgttaatccttagtgataacatgaaaggtttagaagaaactaagaggtttctttcttcaacctttaaaatgaaagaccttggagaagtggatactattttcggtatcaatgttacaaggcatagtgggggtttt

SEQ ID NO: 144408 - DNA, 649 bp, Cannabis sativa
atcacttcaaattccttatattgataactaatcagattataaagagttttatttagggcataaaacccaacaaaaactaccacaataacacgagaacaactgaaaaataaccattaattccgatgagataaagcagaaacattaaaatcattaatactagggttgtcatggtttttttaatgttatttttggattgttccactgttgttttgtatgttttaacaaatgttagtttcacatcacacaagttaaaccaaccactgaatatttatttgaggtaaccagaatgaaagaatcatggactatagacctcaaagagagaacatgcacgtgcaacaagttactacacaggctctagcaacttatgaagaaatagtgtaccgaataggataccaaagtgagtgggatatagcacaaaatgtgaaagatgtaatagtcttatctcctattgatagggtaaaatctggaagactaaaaaaaagaggatggaagctgggaaaaaagaaacaacataacaaatgccacaaatatggggagttggagaacaacaagagaacatacaagagaatgcatcaaaaataaaaagaagcataacaactaaaaaataacaatggaacaacggagaaaaactgaacatatattgaagcat

SEQ ID NO: 144409 - DNA, 553 bp, Cannabis sativa
  modified_base (526)..(527): a, c, t, g, unknown or other
catgatccccacactaactgagataatatcattttgtagtctcaattaattaatttatttaatcaattatgattctaaataatgactatgtcttatttatgaaggagtgacatatttgagaagaaaagagaattaattaagagatcttggagggtctaattaataaatatatataaatgacaattttatttaatatttaattataattattaaatagataaaattaacatttaagtaataattataatagataaatggtatttttgaagataaaaaagattatctcacttttaaaagtaaaagtgttaaaattcaaaccatgagccttacatgagaattccactaaggtttttttttttttaaatacaatttttatcttttgttcaaccaatttaattttaaccctaaacctaatgtctctctataaatataatgttgtagcttttgatacaagagaccaacactttagactctctcttgtttgacaaactgaatcagaaggaaggtgttgcccctgattttgccnnatatacgtggaccaaccagacaagga

SEQ ID NO: 144410 - DNA, 928 bp, Cannabis sativa
  modified_base (264)..(266): a, c, t, g, unknown or other
tctaatcttctattgataacaaattagattgtattgtaatgggttttgtttagggcgtaaaatcccaacaaatggtaccctgtggcgtcagttattttatagtaaccaatgtcatagggtacatatggcatcggtctatagtatataaccgacgccatagacccatataaccgacaccatagacccctaacaaccgacgccaaatttataataattattttttttcagttaatttaattttatttatttaaattatatatttannnatttatatattatattatttaatttaaatataaattaaatatttatttttttaaaagataaattaaatattatttaaattaattttatgattagccaatatacctaatttcatttcatagaagcaattaaataaattacaattatatattacacaaatattgtaaaattagtccaaatattaacaagttaataaatctatctacaagttaacctaaaaaaataggctaggaaagaaaaattcttaagcctttaagcatcaatcattacgccttcgtgaatcaccgccatcaaccgttctatccactgtcgctgtaatagtaataaaccagtttttagattgtattctttcttttctccaaactgttaaaaaaattaaaaatttatatatattattatttgttattataataaatactataattaataattaaaacttacaactttttgatcttgtatataacgattggagtttgcatgagcgacgatgtcagtcatctatttcaaaacataaaaaccacattcttagtttttaggttgtcttggacaatttgctagtgaaatttctgaccgcaggccaagatacgcatttgatgcccctatatatttgtatgctctgtttgaaaaattatattaacatttcaatttattagttaattaaata

SEQ ID NO: 144411 - DNA, 837 bp, Cannabis sativa
tcaaatcatgtgacaataattctattcaaagaaacaaataaatgaaaaaaaaaaacactaaatagagctaaaaggtatttgtattattgtattattatattttataaattaatttgggtactttacagccaaaaaaaaaaagtaaaaaaaattatatatttttttaaaaaagaaaaaaaaaaattggcccaacccaacccaaaacctacccgaacccatcccaacccgcacccaagaacccacactcccaattggcaatttacacttttcaaaactcgaaatttgaaaaaccttaacctggtcaaacactagatgtgcactattactcatcaaacttttggttcttctatgtagcgaagaaaaaaaaaaatacttgtgaggctagctcaagtggttataggagggtgcgtgtgtgttggaggtcctgggttcgagtccaggatatgtatggttgtaatatataaacgcttaaataaataaaaaatgtaacgaaaaaaaaaactacttttgtttctttaataatcgagtacgttctataactatttttaaaattgtattttgtttttctaattagagaagtaaaaatgtttttaaaaataggtttcataaaattgttcttattttactcgatgtcgaagtcccatacatcggctccctagcccaaccctaaactggacacagatacatactcgatgccaaacaaagaccctaaacctcaaccctcgactcggacctggtgcaggaccccaactcctagcccaaaccccataccccaactatagtccttgctttactcctagcccacttttttagtcctaaaagaaataaaagataaaa

SEQ ID NO: 144412 - DNA, 739 bp, Cannabis sativa
aattttgaagtaaacttcggatctgtatctaaaactatggactttggcacaccattcagccttactatctctttaacataaaaatttgcatactaatccactgaaaaggttgtcttaacaggtagaaaatgagcagattttatgaatcaatctaccagaacccaaattgaatcaaacaaacatgtggttctacgtaatcaaaccacagagtccatcgtaatatcttccaacttccactcaagtaatgttaaaggctgcaataaccctgctagtctctgatgttcagccttgatttgctgacaggtttgacatctcgatacgaactctatcacattcttcttcattccgctccaccagaagtagggtttcaaatcttgatacatcttggtggtgtcgggatgcagggaatatggagtggtatgagcctcttcaagaatgtcatttctaagttccacactacttggaacacaaacactggtctagaacaatagcatcccactatcggacattgtaaaatctttagcttcaccaacaaaaacctcttctctgatcttcactaactctagattagttaactgagaagatttaattcgttccaacagatcagattgcagcgtcaagttatgaagtttgcctacaaaaaactcgatgcttgatctgaccatgtattctgctacctgaggtgaaatcggaaccatactagttacctgcccgaacccttcctgcttagggcatcagc

SEQ ID NO: 144413 - DNA, 506 bp, Cannabis sativa
caaatgtggaacttgacggggaggtcagagatgtcacgacaataaaagatgaattgaattagattttataccagactagattagaatattaagttgtccatttggcgggattggttaaaaattactaaaatatccctaggatttgatcttaagcttaagggttataaaaagggtaaaatggtcatttggtgagataagtaaatattgtgttttatttgatttggatggctgaaatgaaattaagtggattaagttatttaattaagtgtttaactacttatgttattaaaggaaagagataagttaaataagacaaattttaaaggaaaagtcaacagcatcactttttctcttcttctctctttcagctccaaggaaaaaccagtagagatttgagggaaactcaactctcttcaataaattcttggaaaaaccttatgcccggggagttggataagttgaggtaagttttggtaccattttcctttgatttctttaagttttag

SEQ ID NO: 144414 - DNA, 617 bp, Cannabis sativa
  modified_base (383)..(385): a, c, t, g, unknown or other
taagttaaagattttgtcattcatataagcaagaaaacgagtattaattcttaatgtttaaaaaataaagccaactcgttttaacatataattaaagttattaaaatcaatcataatcattgaaaggacctattcaaaaccaatatgggcctagttggcatgcctagtgcttcggactatgttggtgcgtgtagtaatggactttgccgagtgtaatcggatatgcatacctcggatttcactacacattttttaattaagaaaataagtggaattttttaccacttaatttgtttttatcaaaatttttatttgatatagtttcgaccttttcatatcttacttaatatataaaatatctatctaacagtttttgttgtgcnnntaacagaatataccaaaaatttaacagaatataccacaaaaaaattatctttaacagacacctattcaatttaaaccagaatagttgaaaaaaaaatttttaaaaaaaaataaacaaaaaatattacacattcacgatccatttcaaaaaaaaattacaaaacaacataactattgggtagacctattcacataagcacccttcaattacacaatttatatatcaaaaatga

SEQ ID NO: 144415 - DNA, 548 bp, Cannabis sativa
  modified_base (271)..(271): a, c, t, g, unknown or other
  modified_base (379)..(381): a, c, t, g, unknown or other
aactcttatgcggatcggattggatccaaaatatgaaatccgcacttagtgcggattggatgttgtttgacaaaaaaagtgcggattggatcggatgaacacccctaggggccatggcccctatatagtgtaatatacgtctgcccctgaatatatatagccttttaagcataccacacatatatcattatgttggattttgtgccctaataaaactcatttcaatataatcagatttactaattaatatgttgcatggttcacatgattnatttcatgattatgtttgatgtataaattctattaagtccagaacatatacatacatatatatttgttcatgattatagtgtcgtcagcacaatagaatataatcatnnntatatgtttaaaagtttaattcccatgatttgtcatttcactggatttagacttacatgataatcggcaaggtacacttacaccttagataagtgttatgtccttttcagggaattggcaaagtataccagtatcggatggatggagtatacattggattggactga

SEQ ID NO: 144416 - DNA, 514 bp, Cannabis sativa
  modified_base (479)..(482): a, c, t, g, unknown or other
gggagagggcctgctgcaaagcatgacaagaattacgatcagcagcacagaacaaaatactgtcatcagcaaacagtagatgggatataggaggggcatttctagaaattgaaataccatgaagcaaacccctatgatgataattcctaagaatggctgaaagaccttcagcacacaaaataaacaagtaaggagataaaggatctccatgcctgatacctctagtgggcttaacattaccatgcacagaaccattaatagagaaagaaatagaagcagaggacaagcatttaagaataagagaaacaaaacgaacagggaaattaaagtgaaacattatgttacataaaaaattccattcaaccctatcaaaggccttagccatgtcaagtttcaaagcagcccaaccttttttaccaaattttctattattaatagcatgcaccagttcattagcaataataatattatcaaaaatnnnncgacctgaaataaaagcactttggaaaggaga

SEQ ID NO: 144417 - DNA, 647 bp, Cannabis sativa
  modified_base (593)..(622): a, c, t, g, unknown or other
caaagtaagtatgccaagaaccttgtcaaaaagtttggccttgagtcggctaaataggtaagtactccaatgagcaccactttaaaattaacaaaagatgaggataaagtaaaggtagacactactctttattgtagtatgattggtagtttattgtatttgattactagtcgtcttggtatttgttatagtgtgggagtttgtgctcgatatcaaagtaatcccatggaatctcatgtatttgctgtaaaaaggattattcgatatgttaatagtactcttaactttggaatctggtattctaaacacactaattctaacttgacttgttttactgatgcatattgggcagacaatgttgatgatcgaaagagtacaagtggaggttgtttctttcttggaaacaatttggtttcttggcacactaagaaacaaaattctatttccttgtcgactgctaaggctgagtacattgttgctggtagttgttgtactcaattgttatggttgaaaccaatgttgagtgactatggaattgaattgggtgttttaaatattttttgtgataacactactgttggaaattattttannnnnnnnnnnnnnnnnnnnnnnnnnnnnnttattaacatcctaaataagaactt

SEQ ID NO: 144418 - DNA, 554 bp, Cannabis sativa
  modified_base (35)..(35): a, c, t, g, unknown or other
ttcatttgtttactaaattttggaatgggagaaantagtagggcccacacaaattaaggagaaaacaaagggaaaggttctccccccttttcataaggaatgtattttcctttatttaacttgctttatattaattatatttttattaatttaaataaaaaagacaaatatgcccttcaaaaatatataaataaaaaataattacatgttctaacaatggtaatttagtcaaattaagtaattccggttacgttttctgatcatgtaaacaaaataaaataattctgattttctttccggtcagtttagtaaacaataaaataaaatatcgtttccaattattttatatttcaactcgatttattcttccattgattattctgattccaattatagtttagtttacgtgatattattattattattattttattcatttacttttagattattattgtaacgctaagtataatccttataattaacctatgtctttatttatttatgtaaagtccttttttggcaagttaggtgacaaaataatttttcctttt

SEQ ID NO: 144419 - DNA, 672 bp, Cannabis sativa
  modified_base (558)..(562): a, c, t, g, unknown or other
  modified_base (638)..(645): a, c, t, g, unknown or other
attgagtacttgacttgctatgagtgggcatgtactctttcactataggctcaaaaaatatgaagagggagagagagaggatttcaaaattaggaaaggaaggaggctctcaagtttgctagttgtctgacagaatgaaaactaggctaaatacttgaaagcttggatgagaatgagagcatcttattccgtttatactatttcacctagggctagaatttcaataatatggaataaaaaaagataaaataatagcaaaataaaccacatagtggtctgccatagatgatgggggccctattagttataattttaccattttattcgagcatttatctttttttctttcacttatgtcatattttttaattttaatcctgtgaatgccaaaactatttatttaataattataatcaattatcaaataaaattgccatttaacttagttattaattaaactttacaaagtctcttaattaacaaatgaaccctaaaatctcttttcttcacaattaagtcattgcttagtgaatattcataaataagacatagtctaannnnngaattataattgattaattaaagtaaattaactaaatctacaagcaatatcatctcaactagtatggggaccatgnnnnnnnntaatcaagcttccaataagtagctcta

SEQ ID NO: 144420 - DNA, 634 bp, Cannabis sativa
tcctcgttgagcaaaagtagtgccgtcttcaataatatttaataaaacttcacatgttgcgctgaacatctttatcaaactagaaatagatttcaagtgagaactccaacgagcgtcaccagccctttgtaaagaaccaatttgattaagccatttcccactttctagttcatccatctcaagtaaatgagcaacatttgcagcttgagcaattcttagttggtcattacgcttacacgatgcactaacaatataaacaatagagttcaactttataacaaattgatggagaggaataacttctctagatgcagcaactaatgctaattgcaaacgatgtgcaaaacaatgaacataataagcataaggacattcatttgaaattaaagcttgtaaaccgttccattgaccacgcatgttacttgcaccatcataaccttgtccacgaatggaatgaacatcaagactacgatttgagaggatagagaaaataccttgttttaatgttaaagcagcagtgtctttgacatgaataagcccaaaaaaacgctcttgcacacaaccatctttgtcaacaaatctcaaaacaattgacatttgctccttcttagattcatctcgtgcttcatcaact

SEQ ID NO: 144421 - DNA, 514 bp, Cannabis sativa
ctaatttaatttcattttgtcacttaaatggattgaattagatgaatatttttttaaaatattagatttgaagtacaaaaaaagttgaatttaatcggattagtataaagatttagcaactaaaaatattacaattattgtaaaagaccgcacaagcgcggtttaattttctagttaataataactaatgagttaattaacagaaaaggaaaataacgataaagtaacaacaccctgacataatgtacaaaacagaataacaagccaaaatctgactaaaccttgttaccattcagtcttcttgggatccaaatagcctcccaaaggttttaagttttcatgtgatttcaaaatatattatttattataatctctgcagctgtggattaaataaataaataaataaggatacttggctgttttctatttaatactttcttccaaacaaaatctcaaaaattattgtgaaaaaaaaaacattttctttgacaaaaaaaaaaaataccatatttat

SEQ ID NO: 144422 - DNA, 647 bp, Cannabis sativa
  modified_base (112)..(116): a, c, t, g, unknown or other
  modified_base (613)..(621): a, c, t, g, unknown or other
aacatacttgttagtaaatcttagatcctggtaaaataaattccaacaggttctccatgccattgctcagatgtgttactcaagaagaagctgcacgactcctatctgaggnnnnngatggattctgtggaaatcatgctcctgggtagagtttatccaagaaaattctaaggcaaggttatttctggctgacaatgattgaagattcaaggcctatgttaagaaatgtgacaaatgccagagattttcgaagatacctcgagctccgcccaacaagtaaactcagatgcaaagtccgtggccctttgccatttggggaattgatctgataggacaattacccaaaggcaatggacgagtgcagtaacggttgattacttcactaaatggacggaggccgaaccactcgcaaccattacatccaagaaagttcaagactttattgtgaagaacataatctgtcggctcggattgtcgtacaaaatagtttcaaataatggcaagcagtttgacagccaatccttccctaatttttgtgcgaatcatcatatcatcaaaagtttctccgcagtggcacatccacaagcgaatggtcaagttgaagcagtcaacnnnnnnnnnaaggatacactaaagaaaagactcaa

SEQ ID NO: 144423 - DNA, 887 bp, Cannabis sativa
tatattactcttaacttcttccacacctatcagatcaaaagatctttttattaaataaaatcttaaaaattgtttaagaattaacaattattcacaaatatttaatttaaactctaagtgtttatgtggtatatctctttgcagaaattaatataccatagattttgtatcaataataaaatacaaacacacacgaaaatatgttaaacatataaatataattggtattggcatacaagttaaagaaaacacgaagctcaattcataaatgtaatttataatgaaattttcttaaagagaaaactttattactaatctcaaaaatgtcaaaatgaattgtctgcataaatataaaatagggaataaaatcacaaaccaataattgaaactaaattgttcataaaataaaacaattaattccaaaattaaagaagattcgagcttcatcttcacttggacaatctccaccctcctgtccaaccatccgacttaactcgctaggatagcaatccaaatttaagcagttggagctggaataagaagaaaataaacttggttattagatctagaattaataacccaaggggataataattctctaaaacatatgactttacagcataaatataactaccttgtttctttgccaaaaacttaggacactatggtttctagtagcccttttcgttgcaatagaagtacttttctttttgctttgcattgggattagcagcctttttctaattagccgttttagcagctttaagaggcttcttcccattcttacaattcttctttttgatgggtttcaaagtagaggcaatgttttcctcagccttggccgtaccattagcagtaccagaactaggagctttagttcctccttt

SEQ ID NO: 144424 - DNA, 621 bp, Cannabis sativa
  modified_base (241)..(243): a, c, t, g, unknown or other
ttgattaaaaggccgaaagtggacttcattgcttggttgcttcgaatagattgtacagaaacaagactgtccgtctcaatttgaacatgctgctaattatcgatctttacccaactgagagcttcgtaaatccccatggcttcaatgactttagctgcatatctttcgccatggcaaccgacccgtgctgcaataaggtgaccaaggtggtttcgggcaacaattctgaaaccatacttannntcgctatcaaagagtgctgcatctacattaatcttgattgtgttttctgcaggtttagtccatgactcagcgccatcagtgatgttttctagacagattgatgacaacaaaattttatcctatgctttattccagtgatgaagagctacttgtgcagaagtaagcacgtaattaacagaggagtgattctttttccaaacaactttgttcctagccttccaaattgcctagctatacaaggcaataagacaaatcatatcagcttcagcttgcttaaagatgatctccaaccaattaccaaaagaaccgtcaggatcaaaaactactggagttgcacattggctccagcaatcaaatgcaaatgggcaagagatgagg

SEQ ID NO: 144425 - DNA, 2059 bp, Cannabis sativa
  modified_base (311)..(313): a, c, t, g, unknown or other
  modified_base (352)..(354): a, c, t, g, unknown or other
actgagtcgcaaatcaccaatgcagcatatcaacaccgagttacaagatacttcaacaaaaaagtcaagaaaagaatattcaacattggagacttggtgctattacgagtctttgcaaatacgagagatgcatctgcacgagtgttcaacacgaattgggagggtccatatgtcatcgaagcagtagttggagttagagtttataaattggctcgactcgatggctcgcaaataaagaaccactggtgaatttgacctactaccaataaataaattatgtaactcgcattactgatgtagactttaaactnnncattactgatgtagactttaaacttcagttatgaataannngaatcatttatattaagtaattacaaagaattattctttaaaaaattacttaaggtgcatttatgtatgtttaaccagaattcatctcgaaatacatggttcaatgtaaacctgccatttcaaaaatctttttgaaattcaaaggttctcgactaaacctctttgacgaaagtagagttgaactcttataactccctgaccaaacctttttgacgaaagaggggtcgaattgttataacatcttgatcaaacttttttgacgaagaagggatcaaacaactataatttttgatttaaaacctttctgacgggaaaggaaaatcaaaagttataactcgcttataaaactgaatactaacggttctcgcgagctaggaaagtactaaacgaggcatcccgatgccttgataaaagtacttgaacctagaaaatgaatagataatataactattcatacgagcaaattaaaaatatacaaagtgataaaatcgttaaagtatatataagttttcttaaggcagattgtaactgctatagcgagacaagtgcttaaaaatcaaaaaagttcggtggattactaactacttaaacaggaagattacgagcaatggaaaaactcaaaagtactgtacatttgatcaaaatatgattgtttacattatgaataaagacgcaagcaaacgcaattgtattaagttcgaatgaaaatagtacaaagcatttaagataagaaaaaacctaagtcaggttacaaacttgtctttacaaaagtaccactatgggcaaaccattaaatcatcttcctaaacaaaggatgagaggagaagtcgataaactcgagaaagatcgtctgcacatagtttggacaaagaccgactacacatagctcgagaaagactggctacatgtagagagccttgatctctccacacacctcattctcctcatcatcataagatcccatttcctgcagctaagactctattcccggcctcaggaaattcctcgataccaaaaagaggttggcacaaaggtctactggcacaggctcagatcttggattggttggattctctgatagaaaccacaccaacttccctccctggttcatctgaaaccatgccaaccttcttgtgggattccttgacaaccagaggaggacctctaagattgctcacaagatctatgtctattcctgtggagatgaaaaaaaaaagggtcaatgagcaataaaaaacatacaaaattaatggtatttataaacagactcaaaccaccattcacaacagttgatactcaccttcaaaaacacttatgaggatctcccatagcaggctacggggttcccctagtttggattggtcggaaactccttagccttggaatcaatcaattctggttccaattgaggcttaaagttcttgggaacgaatggaaaatggttggtgcattctggtattatgagtgttatcccaaatttggcactctgacgtggcatcacaagaatggtgacacgtacacgtggactccacttggagtatttgctcggaacgatatgccgagcaggatgcctcgatggcacatccagaatggaatccgtgtagaatgatcaacacttaccaaattcagcttgacgcatcatgagtcaccagctcaatccctacaactcagggatcaacttacgtggatgtggcatacacacgat

SEQ ID NO: 144426 - DNA, 755 bp, Cannabis sativa
cttgtttatttgaaaaataaaacagggcttgttcaagtgcctccggtcgactcctcggtttccaggcacgtgcttcgggcgcgtgacggtgcatttaatgattgccattaatgcactgattcactttttgcaggcgtcgattcgtttcatgcccattgattgatacagcgcattaatggtgtcagacggatactcaaacgtttccactgccttaattacgaaccaatccaactgttgatccttgggaatttgaatcgtgtgcctccccacctgttcgattggtaggtgatagcgcctgttcctcattcactttggcctatgaaagccaccatttccttcatttggttactttccattttttgccaactttgttcgagttatccagagagaaaaaatcctcagaccaagaaaaaccttcgaacactttgcaaatttatttgctaaccttcactcactattgtcagtctacattcccttgtttgatcaacaacaaaatccccagttctaacacttcattgtaagtttctcgcatccctcactttattgtttgtgtttatggcatgctttactatctgtttatttttctgggttcggtatttgaagtttttggaatgtattcctttgagtttttcacgaaataggcctagatttaccttctctggtgttagggtaaatcttgtcatgcactgttgttatattttgtaaaggaccatacactcttcgtgtggtggccttcaagggcatagagaagactt

SEQ ID NO: 144427 - DNA, 683 bp, Cannabis sativa
ctccgacccagtcccagacccgttcccggacacaaactaggattgagactcaaacctgaacccgaactcgaactcgggactcgatcttggagccagaccaagcccctgacctaaaacggtgttcggatcttgacatgtactaaacccacacacgaactcgaataccgacccaaacctagatcgggatcgaaacacgggacctagacccggacccagatgcaggcccagacccgaacctaggacctgaaccaggacccgaactaggacccggactcagacctggacccaaactaggatccaaaaaacaagtacccgaactcggactaagagtcagaccccgaccccaagctggagcagactccaacctggacccaaaacaaaacttgggcccaaaatcagaactggaactatgactaggacccagacctgagactagaaccaaacccaaaccataacccaaactcagaccagaacctggaccaaggccttgaataggactgggacttaagacatgggacccggacctggaccgggacttggacctaacctggtcctaaaccctcgcgaggacctgagacttgtgaacaagaccaggataccgaccttgacaaggacccaaacctgaacttggaccaagattgggaccgagacctagccccgaaccccgaccgagacctagacta

SEQ ID NO: 144428 - DNA, 712 bp, Cannabis sativa
catcggccacaacattggctttcccggggtgatataaagtcttgtagtcgtaatccttaaccagttctagccaccttctctgcctcatatttagatctttctgggtgaaaaagtacttgagactcttatgattagtgtaaatcttgcctttttcaccataaagatagtgtcgccgtatttttagagcaactactacagcaacaagctctaaatcatgcgttgggtagcattgctcataatctttcagttgacggaaggcataagccataactttgtcaacttgcattagaacacatcccagaccctgtttggatgcatcacagtaaacaacaaacttttcttgatctgatggcaaagctaacaccgaagctgttatcaaatgctgcttcaactcttggaagcttatttcacatttatctgaccatataaatcactgattcttcttagttaactcggttagtggcataaagatcttagagaatcctttcgataataccctgctaaattgagaaaacttcaaacttctatcacagatttcggcctcagccaattcttcactgattcaatctttcccgggtcaaccataattctatctagtccgacaatatgccctagaaaagatacctccaacaactagaattcacacttcttgaactttgcatacaatttatgatccctgagtcgctgtaatgccattcgaagatgatgctca

SEQ ID NO: 144429 - DNA, 504 bp, Cannabis sativa
gaagaaccatcaagaagtccttcacaacccaagtccctgtaccgagacgttagccctccaactcaacggaagatccctcaagttatataacttgattaaacatctgttgagtttcatttagtggtattatatatatatatattgtattattttagaactcatatcatatggctgttggaaaactttttgttatgccatttattgatatttaacaactttgctctattttgaatttactattacgtcaatgtaaatgttagtatagtagtataatataacaagtctactttcattttgaactcagtagttatgtcgaaattatttacttaaattttgattccaaaattaattaaaaaggaaagtgactttagtacttcaaaataaaccaaattcaagattttaccacaaacacgtacaatacataaaagcatgaacaaatacataaaatagaaacaaacagagtatatcagtactgtttttgggagaaggatccattcctccttt

SEQ ID NO: 144430 - DNA, 717 bp, Cannabis sativa
  modified_base (237)..(241): a, c, t, g, unknown or other
catgtatatttttaaaatttagtcgcaacaaattttgtgactaaaattaaaaaatttatgactaattaaaaattattatttttatatagtgattaaaaattctgtggctaaaagtattagtcataaaaatgactaaatgtatttttacacaatacttgttgcgactaaaactaaatcagttacaacttgtatctaaatgctatattttagtcacaaataattttttgttgtgactannnnncacatttagtcacaaaaaattaattatcttgtgactaaaaaaatatcactaaaagtagcaattttttgtagtgaatatttattattattgttttgttaaaatagattgaattaaaattaaaaggagtttttttttatgtatatacaaaaaaaaaataaaataaattacaacagtatttatggccggccctatgaacattaatacaacccataaattaaatattaccaaagtaccactttttctactacttcagtcgcacgaaacgaaacaaacaacctcacgcacacaaccttcgatcgacctacccagcaactcaactcaacacaaccgaaacgaaatccaaccaaaaagagaaccattattaatttcagcgacttcacctaagaagacaaccggaatcaatcaaaataggggttgtttctaatttatgaaagaaaaattacaaaagaactactactacaaaaaaaaaaaaaaaa

SEQ ID NO: 144431 - DNA, 1181 bp, Cannabis sativa
  modified_base (285)..(290): a, c, t, g, unknown or other
cccaggaccaagacccagacccagatccagacccaaactcaagacctaaactcgaaccaaaacccagaccaaaacttggttcgtgacctagaccttgcctgggcccggtttgggaccccgacctggacccaaatagggacttggactcattctggacccagacccaaaccaatacctgaacccgtactgggacctagactcggacccaaacttgagattcaaacccgaacctgaacttggaccaagaccaggacctaagatctagacctagatgggggacttggnnnnnnaacccgaacatggacacaaattttgacaaagcatccggatcttgattgaggacttcgactagaaactaggcaccggaactgggatgaagacccaaaactcgaccccaaactcgagtgacgggacccaaccctgggcccgaaaacaaggacttgactattgggacacaaccccgaactcagacccaatcttaaacttaggacccggtctaagacccaggacccaaactataacaagaccagtacccaaactaagacccggaccaagaccagtcccaaacccaaacttggacccgaatccctgtgaccaaaaatttgaaccgaaacgggaagtagaccggaacccaggaacgggactagaaccgtaaccagaacttggacttagacctagaaccgtaaccggacttaaacctagacccagaattgtaagcaaaccaagtgccagactccaaccaagacctagacccgaatcgggacccaaacctagatcccaactcatacctagactcagtgccgaacctagacccaaactccgacccaaacatggaaccagactcgggacacaaaattggggccgggacctagaaccgcaccctagtctcggtcccgaacccaaactcagacttgggaccaaggacctgaaccggaactagaccgggacacgtgaccgagaccagatcaggtactcaaaccaggacccgaacccgaacccggaccaggacccaaacgcagaccctgacccagacccgtgagacggaactggaacctgaacaagaactgcaaaaccacgaccattgaacaagactaggattgtgaccaggacccagacctaaacctagaaccgaactcggacctagccccaaacccaaagcgagaccaaaactcgagcccaaa

SEQ ID NO: 144432 - DNA, 570 bp, Cannabis sativa
agcaatcatcatcaacatgactgaggggaattggctcgtgaaggctagaaaaaccacagcttcatgttccttggaagcagaatttaaagccatagagatggctctgcagtgggctgttgcagaaaagaagatgaaaatcctcattctctcggattctaagattgctgtgaattctctttcggcaaatgagggatgtcctgattggaaatgtgcaagtctgtttttttcagttattaatctatctaggaagctgttagttagcaagtttatttttataagtcgtagtttaaatgttgttgctgatggtgttgcaaagaacgctagattgtctagttttcttgatgttttgtatcaaggggagggaatgccccctgttgttcccatcactttttctacttaatgaacaaaaagttctttcaaaaaaaaaaaaaatgtacaagatagtgaaaacatatattattctatatggtctattcatacagctgaatcactcattccatcgagtggccctttagagggaaacaggtgcaatattggacaagagcagcatcaaaatcaaaattataacca

SEQ ID NO: 144433 - DNA, 641 bp, Cannabis sativa
tctctctctctctctctcttctgtgcaaatggatggcgattggtgtttgatattgatgttctgggtttgacgagttgggtattgttcgactagttttgggttcgactggctttgggttcgacaggattggtgcttaaattgttctgggcttgacaaagggtggggcgtgaagttcgtggttcgacgggcttgaagttcgtaatacaagaatctaattttttttgtttaggttttatttttcaaaatgtgttctatttatttttaggctttatatatattttctatgtgtttcaaattgtcctgagtattatgtttgtgtaatatacttttcagtttaatttttttttattgtgtttgttgattcatttgaacatgtaattcagattattgtattagtaattttaattccaaaaaaaaaatttatatattattgtttttttttttgtttttatcaaataaatattattttttatttttataaaaaataaaataaaataaaaaaaattgataatatgtttatttcttgaaaataaaaaggaaaaatatagatatagtgacactctataaatgtagctattatttttacagtctgacaatgtgtgactctaaacgtttatagtgacatgcaatgaatgactgta

SEQ ID NO: 144434 - DNA, 563 bp, Cannabis sativa
  modified_base (55)..(70): a, c, t, g, unknown or other
atcccacttgaccttccccaggcggtgtgagattgcacagcttacccggtatttnnnnnnnnnnnnnnnnggactactgactgtcacaatatcgctaacaacaaacatgacgataaaaacaagaatcataggtacgactgccatatatcactaaccgaatcgctcatcatcgcaaacatgtcgccaaacacatacaagtcgataaaatcatgaaacctacgcactcaacactatatattgagaagtgggtcgctaatgtatcgctaacatgtcaataaacagacggttctaatatattctcgacttttccaagacgatgtcgcgctatgtcgtgaacatagtcgcgacacgtcgcaaattgtgcaaaaaaccagaacatagatcggcgtcaatgaaattcaaacgaaatcaaaaaaaatttaaaataaagtaaatacatttctttataatgaagaacaaacaataaaaaactaatcaaaacaataaaaaagtttagacaaataccttttttactgtttcggatctgggttttgtttagggggtgtcgcgagtttggggtttca

SEQ ID NO: 144435 - DNA, 811 bp, Cannabis sativa
  modified_base (444)..(448): a, c, t, g, unknown or other
ttatttatttattatattatatatatttattattattatttattattatatatacataaaacattttgactcggtcaaagtcgagtcttcacattctcccctccttaaagaaatttcgtcccgaaatttaaagtacaacctcaagttaagaattaaacaagtgaggatacctcatatacacctcagactctaactcccaagtagcctcgtcttctctgtggttattccataataccttgactactcgaatctctgtgttccttaacacttttagctctctcgacaagattttgacaggttgttcttcataagttacaccttcctgaagagggatagcctcttactcaataacatgtgacggatctggagtatacttcctcatcatagacacatggaatacattatgaacatgtcccaactgtcctggtaagtttaatcggtaannnnnctccccaatcctctcgataacctcgaaaggtccaatatacctcgagactagcttacccttcactccaaatctcgttatgcctgcatatgagtaaatttcaagaagacataatcaccaacatcaaactcaacttctcgtcgatggagatcggcatagcttttatgatgactctgaacaacctcaagtctttcttggattcccttaatcttttcaatggtactagtgataatctggggtttaatagtgacatgctcatgtagttttgcccaacacaatggcgatctgcatggtctcccatataaggcctcataaggagttattgttgtatgtgaattccaccagtgacaaatgttctccccaact

SEQ ID NO: 144436 - DNA, 565 bp, Cannabis sativa
ggaaaaattattttgtcacctaacttgccaaaaaaaggactttacaatatttatagttaaatttgtttagtaactattcatggataatgctcattaaaatgtattcgtatctattctatataaaatgtggctatataaccgaattcttggtttatgagaaattagtgggtgaattttttttttaatattttattcaaaaataacaatttttttggctgaggttaaattcaaaaaatatatacgatttttttggctgaggttaaattcaaaatatatatacgattgacattgccctacatccgattgccaccaatatttagagtcttggtttggtttgctgtgttttgaaccccaatatttggattaggtttgtgaccttcaaaatagattctgatttgtttgtagttgattcccacaatgtatttacggtagattagtggtgtccatataaattgtatatgactctcgttcttctagctttctttttctaatggaagcaaaaagtagcctttttgtgggtttaaatgtttatttgcttctctttcatgtagtctatttattttat

SEQ ID NO: 144437 - DNA, 505 bp, Cannabis sativa
gcaaaatacatgacctgctcgcacaattcaaaagctacggtcttagataaattccaagagaagaaaacacaactgctgacgcgttggctcgatcagcaagcagccatgtaagtgataaggcaaacttggtccctatctagttccttcaagagcctagcatctctggcacggaagaaatcgaaatgatcgacacttccccaaactggatgacaccagtagcggcctacctctactctggggaactcccagataactgaaatgaagctcagaaaatgagaagaaaggcagcacggtacatcatagtagaaggggtcatgtaaagaagaggattctcgatgccattactcagatgtgtcacataagatgaagctgcacgacttctatttaaagttcacgacgggttctgtggaaatcacgcagccggatagagcttatcaaagaaaattctaaggcaaggctacttctggccaacaatgattgaagattcgagagcctatgttaagaa

SEQ ID NO: 144438 - DNA, 1224 bp, Cannabis sativa
gtcagagtgccaaatttgggataacaaagggactgtaatttgtcgagcagctattccactcaggttagccggcacacttcaattcagtaacgaggtaagatttatatattgatatcatatgcatttacatgttaagggtgcatgttagttaagcctattagattacatcataaatgtatgttggcttatatactactcgacagtatcacatcggtacgcctagagtattactagcgtactgggtataggccgatattatgtacaatagtactgccgtacgaacgttgtagactcagcatcttgtaggacacgaggatagggttatgattcggggtatgggcgtctgatcataattcaggttatagctatgtcattatgtatgcttttcatactgagtctgttgactcacagtttctatttccatttgtagataaaggcaaggctaaggctgagcagccgtgagagggagcagatggagattgtacatgtcagggcagttaggcctggagcgtacgatctttgagacatcagggcttattttctatagttgtaaggtgatagacttttttatttgaatagtgaaacttatgtaaatgcttttgtaaacgggatcccttaattttatatgtatgttatttcatgtttataattacttaagcaaaattttaattaatcacgatttttaataatctcattgactagcaacgagctacacagtaagttaaaaatcactttcacatgcctaaaatagttagagtgttacaatttggtatcagagccgttaggttgtctttggaatatcatcacgacatgtaaaatcatcatcagcaatcaactcatctcacgcgtcagtaagttaaaaatcactttcacatgcctaataggaagcatgttagtagcctgatagttgaataggcgcatgttataaatttcaaaaataagcggcaattagtaagttttacatgatcatgatctgatgagactagctcttggttacgcaacatgttctaatagtatggacgtcaggcgaaacactaggaatcaggggtaactcggtcaaatctagtggtttgtagggagttcagatttcccaaaatgttcgtggccgaggtagaggccctagaggcagggcacgcgttcgaggtgatgttaacccgccgcaagctgcataagctacccaaaaatgggaaaataggtttgcagaaatgcaagccagaattaatg

SEQ ID NO: 144439 - DNA, 614 bp, Cannabis sativa
tgtactcagctctatgagatgattgtatttacatatgaaaagagtacaatacaatcaataacagaaaagcagttagaaacagaaaaaactaactgtctagctgtgaagagtaacaaactcttatcctatacgcacaaacaactaactataactatgtacaccaatacattcgttgtaatccaaatcgaaattagcagcattctttctcatatgtttatttactttgaactcaaaagtagtaccttttaattaatgagctataaaactaacttaactattttttaagggtaattgttataggttagagaaaatatcgaaatgcaaaaatgaagagtggttgttataactaacttaactaattttaattaagctaaacatgaatttttttgatacaagagtggttgttgttatttacctgatatcctcccaccaagtgtagaacaatgcaaacattagcaaagtctatgagccaataaggttggaagaaatcgaatgccgataagaggtttcccggtgtgttgtttccgaaagctgcatacccgaaacatccacaacatagatagaaaatggttgttgagaagattgcaataagtgaagccttcttcatggtgtag

SEQ ID NO: 144440 - DNA, 736 bp, Cannabis sativa
ttaaccaaaattaccctcaaaagtattttagttaatttgtacctgtttttttaattaactttcctaaactacccttgcaacacaactcttttccttctttctcaaagtcatcaaggtctacaatctctacaaaatacagataatgcaacaatcggcggaaacgactctgctacaaccatttgaactacatcatatcatcaccgcctctgctataaacaccggcactaggtctccaccatataaattcttgagagtaaggaagagtcggcaaagaagagagacaaccacaggtccacagcagcactacttgccgctgtagctgcgcaagggagtttatggctacggtgtggtttgaacctcaagacggctccgattgttgttgatggctgcgaagctggttgtgaagctttgagagagaattagaaagtacagatccatggagggagatgactacgaagtctagatttatttttttgttaaaagcatcagattgggaaaagttaatgctaatttagagaactgtggaaatggagggatataattggaagaaagaatgaaaaaagaaggtataaattaaagaaatttggaccgaaggtaaaaatgagagacaccaaattaaaaagggtataccatctaatttctacaattttaatgttcattttcatatatacatatagatttgacgtataataatataaaatctaatactcatctaaattaaatgaaaatactaatt

SEQ ID NO: 144441 - DNA, 500 bp, Cannabis sativa
gagataaggagatagaaacattaagggctcagcaagcagtcattgacgaccgtagtcggtaggccactgtgttgatacgaaaagcctatcagactaccataaaacagcctgtaatcatcatccccatggaggaaacagacgaagatccaacgatgaatacctcttagactataaatggtcagccgccaaaatccctggccacatgttccacctgtgggccaagttgtaggcaggtagataattcatcaggagaaatcatacccaataattccaacaaacttaatggttctggtcagcaaattggccaaaccaatcagtcgctaaggcagccatgcatttctgtatttaatagattagggacgactcatgatctcaacaatgatctaaacaggaggagggagtggaagatcagcttgatgcaccaatcgtgcaacccaaaacccgtgctcaaaatctctctcaaagatatgttgatttgactcaggtcggccaagaggccg

SEQ ID NO: 144442 - DNA, 1265 bp, Cannabis sativa
  modified_base (468)..(478): a, c, t, g, unknown or other
cttcaaggatgtggcggacttctttggtctctgcccgacccaaatcactcctaagggcattaagtatttgtccgccctcttcgtcctctatgcttcccaaaaatggggtactccttcgccccacgaggttgcctggttctttgatttgaagtccaccccaaacaaggtaggtcaaggtacttctatttctctccgccaggcttcaagtggttgaccggcacggatgacaaggccatcagcaaaatagggcgttttgctgatgagtacttcatggtgaaggattcgagcattacccaaactcagtttcagcagatttcgacctatcaccatcctcccctcactcttgctcttagagatagagctcagaaacttgcccggttgccgggggaagaccggaatattatacagttgacttccgatgataatcttgtgaggtacgggctttatcccgaggactttactcctaannnnnnnnnnnggaagaagaggaaatctggtgctgaccggtctgaacgagctcataaggaggatgagcttattcaacttaagcatgaggctaagttgaaaggaggtgccagggccaaacagtaagctcaggagccttcaaattctgaagatgaggccgaggacgagcaggtgactccactgaagaagaagaagaaactcccggcctcgcccaggcctgttgaacatgcaattcgcatgagggagcccatttcacctgttcggccatctcctcccgtgttcggaaaagggaaagccgtcatggctgagataagatcgatgtcaggtgatgatggacttttgagtcttgtgcgggcggtcacctttattctattcttgagcttcttgactttcattccttgtgtttctgatggctgttttctaaccatactatttttgttctgtgcagacatgtctcggcatatgcttaatgctctaaggaagagaatgggcggaagctctagcgcctctcctccgaccaagaagtccaagggcggtgaggggtcctctttaaaggaaaagagaccttctggagaggtcattgatctttccgaggagctgactcctgcaaactcctctacccccaaaacttccaagtccaaggagtctggaccaccaacggctgggtctgaactactcaggagcgatcttgaacgtgtgcaggcaccaactccacctttgtcagtgcttctagaggccaaaaagggcaaggagatgctggcccactacatgaaccagctggttcctgaggtcactgagca

SEQ ID NO: 144443 - DNA, 567 bp, Cannabis sativa
  modified_base (60)..(61): a, c, t, g, unknown or other
ttgactgacaacaagctctctaaagctaattttgtcaaatggaaagagaacattaatatnnctctcataggtgaaaatgccctgtttgtgttgactgaataggctcctgagcaaccaggtgaaaatgtgaccaagacagtcaaggaaaagtttgagcgttggcagaatgctaacaacaaagcttgatactttatgctgtctagcatggtcgaaacctttgaaacaaggtttgtcaatactctcacgactgcagatatcatgaaccagttgactaaactatttgggatggtgtcagatcaaggtcggtttgaggcgaccaaaaattttatcaatggacggatgaaacctcatcagaacgtgcgtgatcacctgctccaaatggcaagttacttctagaaagctaagaataatggagatattatagatcaagaaactcaagtgagtttgatcttgaatagattgacttcaccttttctgtccttcacctcaaattatgtcatgaacaagttgacttttgacttccacaagttaatcaacaaccttcagacatttgagaatttgattgga

SEQ ID NO: 144444 - DNA, 1364 bp, Cannabis sativa
actttggagtctcctctgacagtgaagaatctaaactcgaacatgagcctcctttgaccaaatctgttctagcaccttctcgtgcatcttcagcagccaaggcttttgctgctgccaaaggcaagcagcctatgcagagttcttctcctggtaatatctctccatctcaagctgtaaattctagattttattatcgagataatgagcgtgattggaatctttatgctactcgaaaatttgaaagtgagaggaattataatttgcatgctcatagggtatatggtattgttaagtttgttcaataccatcaatgggaaaatactctcatttgttttggagtatattgaaaatattgtcaaagaatttcatgccaatttgactaatgacttgcatgatgagaattctaatttttttttgtaaagtctatgttcgggggcattggttttcttttactgtcaaggacattgcaatggcttttcaattacctgaaggtgtgtccaatgctatcatgtctatggatcaccatttgatgctcactgaacttactggtgcacgggttgaatgaaaatctggggagactcttcgaattacacatcttaactatgctcatgcgtctctcatgaggtttgcacttagcaattggcttcccaattccaacaaaactgtggtgtctcaagatgtggcctcatttgtttttcgtatcacctcaggggcatccattgatctggcttcttcaatcttagaccagattgtttcttttcggagaggtaaaaaacgtactcataatcttgtgtttcctaacttaatctattaaattttgtcctctcagagagatgtggcccaatctcatgaaacacttgagcctccccttactggcactatattccaaccctcagagtattttgatggagctttttcaaagcgtcctaaagctgctgctcctgctgctggtgcaagttcaagttctgctcctgcagatgtccaagaggtcaagcatgaggttcaactggtgaacaattgacttgctgccatggaggaagttcagcaagagatgtcaaagcagttgtcctcattgatcaagctctatcgggcataagttttctttcttttttatggacatgtttctatactatcatgtctttttctctttggcccttagagaaacaaaaagggggagtaataatttgtttttgacttaataacttgttttttactgtttgttgtctcaactatggaccctttttccagggggagttgtgttttgtacttgtgatctttttgaattaaaaattgttagcttgtttttttgttattttggttatcgattgtgttccttagggggagttgttatttgctcttgctaa

SEQ ID NO: 144445 - DNA, 545 bp, Cannabis sativa
  modified_base (260)..(263): a, c, t, g, unknown or other
ttagtagcttgtccacctcttttttcagggccttcgtctttataggatcaaggggacgccgcttctgctggactggtggcatgtccgggttgacgtttaagacataagtaattacatgcagacttatgccagtcatatctccttggcaccacgcaaaaacatccgtggctgcccttagcgctttaacaattctatctttctcctccggttctaggttctttcccagtcggaggatcttggtagggtcgaggtcgcatacnnnnacttcctcgacgtcttccataggttctacaatctttttcggatcccacacggggatccaactcatcttcttctaccaatcctagctcaatattctcatggaccattaacaccggtaaatgggctgcgaccttataacactgcctggcctctccctaattgtccctcacggtccccacccgggcttcctgggtagggaatttctgacataagtgctggatggacgtaattgcaccaaaatccaccaaggccggtcggccaaggattgcgttgtatgcagttgg

SEQ ID NO: 144446 - DNA, 811 bp, Cannabis sativa
tataaggcagtgacatatcgttctacaataatttcattctattttattattttttttcattttttttcatattttttcaataatattaaatcttaaataaaaaaataatcacaattttaaacaatgataacttttttaggttcatttttttaagtaatattataaatcttaaataaaaaatcttctatttaaattaatttaatacatcatcattatcatttataataatgatattatcttacaatttaaattaattttgtttacattatcatttattaatactcttcattctctttatttggtatcattattttttatatatataaatttatcaattgttatatttttattttcaagatagagacgattacaagtgagatatggtgatgacaatgactttaaatatagtgacgagtgagatacgatgatgacaataattttaaaattgatgagtttcctatagatttatcaatcattatttttttcccaattctatttttatatatgtaaatttaatcacactaaaataatatttatctaattactaaaactctatcatgtcccgatttcaatttaatttatgccaaagatatattttgaagacggactttatagaaatatatgtttacaataaattaattaataattataatttattgagtttaaaataattagaaaaatcaactctaaaatattaatttaattttcttgtattattaagagttaaaaaataaaatttgaaataggtactcactatttaaaaaattatacaaaaatgttaaaatttaaaatttgatatagttttataact

SEQ ID NO: 144447 - DNA, 605 bp, Cannabis sativa
  modified_base (557)..(572): a, c, t, g, unknown or other
cattaagtatttaagttaatatttgcctattatttaatattgaacaattcactacaataaaaagagtttaatgattcatttgagagtcatttaaaatcacttatactaatctcgataggtttaggacatgtctctgttaagagctgacagttgtacaagttctgttttgttagttacctaactaatactacttttatgttagttagttagttagctttcagttacagctaatcttgctttagttctgtaatccttgtatatatattttattgtggggcggaacttttttcaaaaatactatgagcccgtttggtacgcatgactggattggattagacagtttaatttgtccaattcagtatttgggcatgttagaagtctggataactaatccagctaacctcatctgtctgggataaataattccatgcaggtgagatttttttttttatcgtttttttaattttaataagaatttaaatgaaaaaaattaggggaattaccttaaatactatttttttaactttttttttcttcaaatttacagtttgagtttnnnnnnnnnnnnnnnngctagttgcaataggggttctatacgatttttt

SEQ ID NO: 144448 - DNA, 689 bp, Cannabis sativa
  modified_base (228)..(230): a, c, t, g, unknown or other
tgacaattagactatgattaaaactagatcattggatttgtcaacaagttaatcatagaaatttagatcaaatataaataataggtttataaaaaaaaattagaataaataaaaaaaaaaaataaacaaacataacaaacatgtaatagataactcgaaagtaggttaagatatttctactttaaaataaaatatttaaaaactatcttaactagaatttaaaatttnnnttgttagaaaatatttaaaaaaaaattaaaaatcaaacaaatctcctaaatattaaaattctaactaaaattcaaatatcttactaattttcaaattttcagtttatttaaataatttacattaattaaatatctaataagataatataatataatatctgaattttaaatttagatatttctaatcttataatttaatgaattgaatataacaaaaataaacaaaatttaaaataagatatttaatggttaggatatattatcaattttatttaataattaaataaaataaaatatcataagtttgaaaattttatgcttaccaaaacctaaaatttctattcaaacaaaattaacaaattttcaaaatttcttatattttacaaaaataaaattttaattaaaataaacatctaataagataaaatgttaaaactaatatttttctaatcttataat

SEQ ID NO: 144449 - DNA, 533 bp, Cannabis sativa
actcatctgattcggatccagcttcctccttgttgtcatcgatcaaggtattattcaagcaaatgatttttcttttatcctgcaaatttcttgacaaaacacttgttaaagcaacatttttattttcactatcttcagaatcatcatcactccaagtaacattaaaaccttttttatttttctttaaggtattggcacattcagattgaatatgaccgtacccttcgcattccctgtattgaatacccttttggttattgggaacaaaagatttagatgcatcgttaccttttggagtatttgagaaattctttttatttctaatatttttcatgtacttttgaaaatttcttgttaacaaagccatttcatcatcactctcattatcggaaaaacattttcaaaaacattaaatgcaatacctttgcttttctcactcaagaaattttgcttaccctttttcttgatttgttgatttaactcaaaagttcttaaagaacccatgagtccctcaaccttcattttgccaaaat

SEQ ID NO: 144450 - DNA, 554 bp, Cannabis sativa
gaaagatgccaaatgcattggttttaaacttaggataggaagtagttcagctcagcaaaatgacagcttttctttcctgttttagtggttctctcttcacagttcacacaatcttactcaatatggtttatctgggctaccatactaccttaattactatcttttttggggggacagaagaaaaaggacagatgggtatcaaaagactcagggtaattaaggggccatattgatattctagtgtggagacagaaatgattagagccagaatatataatatatattatatatctaatacaaagttataaattaatactagatagaaagaaaagaagaagaaaaaaaaaaaggtgggctccccatccccaacaatacatttatcttagactaggatatattgatgggtttctggctttcaatctactggattcattgtttggttcacaagttttcccataaataaaaggtcctgtaaatgtaatattgtttttcttttagaaataagaataattaaatcttaaaataattggaaccctggaactttcttcttgttt

SEQ ID NO: 144451 - DNA, 882 bp, Cannabis sativa
  modified_base (262)..(262): a, c, t, g, unknown or other
cttcattgttgaatggtattacttggaccacttatttattaaggggcccaaaattttatatcgtcttaggcctccattttttcaggaccgacccttattattaagtcacaataatgatgaacaaataaaaaggtggttaataatgtagctaattaattaattataggccatcatttattcaaatattgaaaagaaaatcaatggagtaatactcaactgtgccatacttggctacatttataaattgtcttgtttggacacnttatgggctcccttttattcatcccgaaagtattttggttgtgactataaatgggtctggtcttgtaattgagcttacatacttactcatcttcttaatcttttgagatagggaaaaaatgattaaagttgttcttgttgttcttgctgagcttgttttcatttcaattctcaccctttagactttgaatttgactcattttctcaagaaaagatcaaccattgttggtaccatttgtatactctttaatatcttgatttatgctgctccattagctgttatggtaaattactagttacttgttattaattagttactttttaatatcaatatttcttgtttgattttaattgcttattttttttggtgcagaaattggtaattactactaagagtgtggagtttatgccatttttcttatcatttgctttaatggttaatcgtattacttggaccacttatttattaagaaaccaaaattttatatcgtcttaggccccgattttttcagggccgaccctcattattatgtcacaataatgatgaacaaataaaaaggtggttaataatgtagctaattaattaattattattattaattataggacaacatttattca

SEQ ID NO: 144452 - DNA, 518 bp, Cannabis sativa
cttgattttgagcaagtttgaagtgtgaggcaagaggtgtagtgactgtcttggcctcactcatacaaaacttgtcaataattttctgaatgtatccttcccgagacaagaaaatagagccaggtctttgtctcttgatgtctatccctagtatccttttagcttcacctaggttcttcatttcggattcagagcttagttgttctttcagcatgtctatagactttctattctttccaattatcaagatgtcatccacataaagtaatagccatataggggtcttgttgtagtaaacacatgggtcatactcacttcttgtgtatccaatttgcaacatgaattcatggaatcttaagttccattgccttggtgcctgcttcaagccatatagtgattttatagtaaacaaacttgatcaatttccatgttcttgaatccctcaggctcttccatgtagattttctcttctaaacttccatgtaagaatgttgtctttacatccatttgatccattt

SEQ ID NO: 144453 - DNA, 569 bp, Cannabis sativa
tctaaatatgtgtggattagattgtgtcggttacttttacatatcaatcaacattcaatccgcacaagtgcggattttagattttctaatccaattcaatccacacaagtacggatatccacattttgtagattgaattagattgagtatttcatgaacactgatagtcaaaactaagtaaaaaaaatcgtaatacaaaaatatgttgggaagttgatatcattttgtatattgcaatgaggtcaatgtcttgttatttttttgttgctctttgtatctgtctttttgttgttttatagttggtttcatgttgttgttaatgtattttatagtttttttttttattattgaaatacagtaatttgtaattttaaaaatttaagacaattttttaaaaacttagtatagtaaaattataaaatcaaaagtataacagtaaaaatgtaataaaaaaaaataaatattttttaagaattccttgaaaaaaaatatgtcgtaggcaaaactttcaaattttgaggggataagttgagaaatatctcttgtttgtatccattaatcaaaaatac

SEQ ID NO: 144454 - DNA, 563 bp, Cannabis sativa
gtaactatttattataatactaaataaattaaattagtcgcgcgaagagcggctatattgcctagtttattattaattgcaacactttaagtggattaattatatttaggtttaactaactacatacatggatgctaaccctctacgtggcaacatctaataatttgttttttaaaaaagtcacctaataatttctcataaatcaaaaatactattaaatagctacattttatatagaatatatatatatcaagagagataaaattaaaatttgaaaatattcaaaacttatttttttttccaaacatgagtacttatctatccaatctcacccacttatctcatgcaccaaatatggttaatagttttcatattgggggtctaattttcactcaacaaaaagaactttcaaatctgcacgatgcctgagaaataattcgtattatcattagggtaaattgcaccataaatactttatattttcgattttatacacttaaatacctaatgtttattttttgtggtaaaaatacttaatgttacaattttcttacaccattact

SEQ ID NO: 144455 - DNA, 723 bp, Cannabis sativa
atgtataccttttggtaagggcaactctagtagtaaatgttaaatttagtgttaaatcaatacaaaaatgataaaattttggctctaaatttttttctattccatcaaaatactaaaattacagtaaaattatattattttattaaattataaataaacacaaataataaatatacaaaaaaattaagcataaatatatcatttaaatattaaaactaatagaaaaagatttggtgtaatttatagtgtcacactaataatagtagaagatgaatgttaaggacactctatattgcactctcttttacactctctttataaatgagtgacacgtgtaactttttaaaatatgtttaagtatagttacaattatatcacttttacttttcattaataattaaaatgtatcatctcattttcttgtttatttattttttggactattttattaatttattatttttgtttactaaacaatatgcaacatctttcttttaaattcttcattttataataaatatgtattatttcatgttataaaaatgtaaaacactaactctttctttttttttttaacaaattttgcatcaatctttttttcctattgtattatttgttaaattattttttatgtcatgtttgttatatatatatatatataaagaaactgttatctctcaaaaaatccaaaataattgtgcatgaatttttactctagatatg

SEQ ID NO: 144456 - DNA, 648 bp, Cannabis sativa
aagattgactcgtggactatgccgaattttaactacaaaaccacgtaaaaacctctgtgttcttatttcttttttttactgcttctattttcggtgcaaatccatcacgatgtagtcttaaatataattaatgaaaatctgcattaacagtttgatactttcattgagagccttcgtgaaaaaaaaaagctcagaaaaaaacctcctgatatatatatatattatataaaaacaactttctccatggcttgcaacggagaaaacgttggactcctcataaatataccactcaccgtcttggaaaagagctaatgggctccaagaggcctcccaactcacaatctaaacggaccactccttccaagaggacccaacctgagggtggcccaagtacacagaccactcgttctaagaggacccaacctgagggtggcccaagtacacggaccacacattcaaggagaacccagaatccaggaacaaggtatgaagaacctgaaatgaacattggtagagcccatcccgggccaattggtgaggatggtgcctacgatccaacaagatacgtgccaatcgtcgagttggaaaactgccaactcaggcgtcgcttggaggaggcaaaccggcggaacgctcaggagaataatg

SEQ ID NO: 144457 - DNA, 800 bp, Cannabis sativa
actcagaaattctcattcactttctctcttcatcttcttcttcttctttcttctcatctattctatattatgttatattattttataacagttataatattatagctttattatatttgtgccattttaaattactctactagttaaataatttgttcatttatttatagaagaatgaattatttttaagtgaaataatattactccccaaaatataaatatatttttgcataaaatacatatatatatatatttaattcatttttttttctcacgttgtgaaaacatgcacacatgtaaaatagaatatattttgaataatataaagaaattaaaaactaatatagaaaaatattagattaaaaataaaataaaattattatattaaaaaatatatgaaaacaagattaaaaaaattactaagaaataacagagaacacatatatatattaaaaaaaaagtattaagtgtaaattttaaaataattttagttgatttattctattgaggtgtataaataaatttgtggagtatagaaataaaagtttattttagttctcccatcttaaattgaacaaaattaattatcactatatatctttgtccaacatacaattgaagtaaaattaactttaacttaatatataaatatattaaagcttattttcctttgtaaataatgagtaaaaatttaattagttcaataaatattaatttattagtagaacattaaaaataatttaattattttctttaattagctcaataaacacaatatataattgtgaataaaaaataaa

SEQ ID NO: 144458 - DNA, 723 bp, Cannabis sativa
  modified_base (40)..(60): a, c, t, g, unknown or other
gtttgatataggaatatgtgaatctagatggtagaacttnnnnnnnnnnnnnnnnnnnnntctcataaacacataaaaaattctgttatcactgtgcaggaatggtgaggtaatgctatagcaactggaaaaaacctaactaggggggattagttattcaagccatttttaccatattacatttcttgcaagcaattttctagcaacagtagcattaattttagcaagtttagttatagtcattttaattttgaatcattgctcaaccattctcatatttttctttttgctttatgttgtaactagaaaacaactcgcgcttcacagcggatgtttaaaaatttttaaattatatatataaaataaattataaatattatttaatgataactaattaataaattgtatcaagttttaatctaatttttcatataattttgtataaaaaattaggtgtacaaacggattggtccaactcgtatttaccaaatttcgttattataagggaagctagacacgacctgtataacatgatgttaggcttgacccctcgaatttttataaaatggttaaatcttgttatcccaattttttcattctaacgtggcatcaaatgatggtgacccgtggaatcgactctgagtatctggtcggagaatatagtctgaacaggatgcctcgtatgcatgctcaaagcaaagcaatcagcaatccgtgcagagc

SEQ ID NO: 144459 - DNA, 698 bp, Cannabis sativa
tttgttgaccctggatgaactgagtaaggagtcgtatgagatttattcataatctctcttttaatatcatcatccataggcacacaaacacgattcataaaccatatcatctcgtgtcatccattataaaattactagtctttccagccgaaaccttatctcgggatttcacttactctggatcttacaattgtgcttccgtaattttctccaaaatagaagattatagggtaatattagccaactaccccacaacaaactcaatcttggttcaggtcatctcatctactaactgcctagaaatttacttcacggtattcatccaactttgtcctttcctactcagggcatcaactactacgttggccttcccaggatgataaagaatctcacaaacataatccttcacaaacactagccagcgtctctatctcatatacaagtctctttgggtgaggaagtcattcagacttttgcgatcaatgtatatctcacatttctcactatatatgtaatgccgccaaatcattagcgcaaatactactactgcgagttctaaatcatgaggagggtacctttgttcgtacttctttaactgtcgtgaagcataactattacctttccagcttgcataagaacacagccaagaccctgtctcgaggcatcacaatatgtaacaaacttttccttatctgaag

SEQ ID NO: 144460 - DNA, 962 bp, Cannabis sativa
  modified_base (49)..(58): a, c, t, g, unknown or other
aatgatcgagatatgaaaataatatattatgggaaacaccgtaattttnnnnnnnnnnaccctatttatttatttttataaaaataatttcttttaacagagcaatttaaaatactgcatataataaattttaaacttcttaataaataattttaaataagaatttataaaatttcgcatttagtttttaataaataaaattattaataataatataaaataagataatatatttataattttactatatactagaattatatttttaagtaactattcattataatacttaaaataattaaattagccgagtgaggagcgactatattgcctaatatatatatatataaaaaatgaataagacggtaacatgacactctaaaatctctctaaagctatttttttttctctttaattctctcatttttaatattttatttttattagaatataaatttacaaattgatattttactattatgttaataaattttctataaaaatatcaatcataaatcaattattttttttaagaaaatacaaaataataaatataaactaaattaaataattattaaattatttatatatacgtatgtgtgaagttttttttttttttttttactttgcaaaatataggaagactgattttttttatagaaggaatatgtaatgaataaaatattataaattaaatcaaatatgtgtgagattatgtagaagaaacatgtgtgatattatgaatcaaattttttcataatacattatttttatatcctgctcatataaagttgatgtcatcattgtagttgttattgatatcctcaaatttataaacttaacacttaatttaatgttctgttctgttagttgatcaaattaataaagtaccacatgtaaattaatattcaatatatataaaggaaaagaataagacagtgacatggcactctataatctct

SEQ ID NO: 144461 - DNA, 679 bp, Cannabis sativa
agagaatttatttgggtgagatcattgacatagcatattcagaaaatatatgaattgcactctgtaacgaagtatcaacacaaacagtactctatgaagataacactcctcgcatcactcaactaaaagaagggtacattgaaggagatagaattaaaatatatttcaccaaattctcctttatacatttcaagaaaatgcatataggtgttcaacaaattcaatcaagtgttaatcttgcaggcttattcacaaagtcattaccaacatcaacatttgagaagatagttcataagattggactttgtcgattagaagatctccactaatgtctaaatcgatgaattccaatcttgtgaattatcttccttttcttttgaccaaattttttcagtaaagtttttaatgaggcagtttttatggacatcaaatgggtagtgttatgaaatattatatatgaatgcccaaatcaccaaattaattatcaccattaatgcttgattgtattttcttttattacattaatttagttttcttttcttttagttaatacttttgtataactagggatcactacatactaaaaaactcgaaattccttacagttttacaccgtcaggtaaagaattctcgacggtctataaaaccgtcgcttatagcatagctgacagttttaaac

SEQ ID NO: 144462 - DNA, 546 bp, Cannabis sativa
gcttggctcacgggtgctctactgtgcaagaaagggtaaagttgtgtttgatcagccatgagtgtaggagttagacgaggaatgtacatgttcaggccacactagaccaagcgggttgggttctaccagtgatgtattttgtactttgttttgccgcttaggtcagctagaagaaacgcacttgtaataatattttgtaaagtactttcgggatcccgacacatgtatcttttattttgtaaagtgaaaaagtattacaagtttattttcattctggttgtcattaaagtttaatttctgcgctaatttaattagtaatcacgattagaggattagggtttcataagtatattgggtagcgtgcctaactatttagggcgttacagatgtgtagcatggaaattacatgcaatgtgaacaaaacatgcctctttccaaatggtcctccttaaaccaaagtgaggtcagatttaaacatgacaaaacagagtgaatgaactgcaaactttatttctgataagaaaaataactaaatacataaatatc

SEQ ID NO: 144463 - DNA, 1002 bp, Cannabis sativa
ttttaacagaaaactaacgagtgctggagtaaggaaaaaacttgttaatatttcccctaaaaataagaatattttttatttttgaattagggcgccatttcaaccattttttacccaaaatcaatcttcatattcacgtcttagtattacgaattcattgtacctgtactctctatattgttatattttttataattgtggagaaatcagtgcaaatattttcgtgaataattttaatgtatttttctttcttttcatatatatatatatatgatttttattttttttcattaatatttgtgttctttatagtggtataaatattactgaaaatatatatttttatatcgcatcatatttatatttctttttgtattttttttatacaaccgaacattaaaattttgatatagttttatgattgaatgatcattaaataatatgtaactgcacgcaaagcgcggtttgtttcctatttgtatatataattctataaaaaaataataatttaagattttaatacatatgatataaatatatttcaaaacttattaaattaaatttatattctattattatatatagaaaaaaaaaatataacttaaacaaaattaatcatttctttctacatataatttttttctttctttgaatttattattttaatttattgttagagataaaaagaacaataatttgttttgtttttgttgttagttatatgaaaaatatttttaataaatattaaaaataatcaatctaaaatagaagagtgttaatgtcaatctcctgttacaacctcttagtcaatctttggtcctctatactcgaaaacatatatcgaaataatatttttttcaattttctttcacattgtttgttatgcttacaacatcattcctgtaaatttttaaaaatttcgaattgtttagtgctaaaaatacgtgaaattttttgaacacacgtggtaagctagaatatcaagaactctatttttcaata

SEQ ID NO: 144464 - DNA, 649 bp, Cannabis sativa
ggggcacaatgttagttgttgttacgtacgatacaaacaactaattattttcggtagcctttacaattgttgacagtgagaatcacgactcttagaagtatttcttgcagaagttaagggaagccattggggaggttgaaaaccttatgttcatatcggataggcatcaaagcattgagcatactgttgaggttgttttcccagaagcatgccattgtgcatgcttcaatcatattactatgaatatcgttcacaagttcaagactgatgtatgcaacaagcaaatatggcttgtagcttacgcgtggaacaagatggaatgtgatagacattttaaggtactcaaacagatggatcctgccattgctacatacgtcaagcaaatagggtttgaaaagtagcctcgtccttatggtctaggcgatcgatacagcatattgacaagcaacgctacctaaagctttaacaaggtgatagaagaattcaaaaaatatccaataactagtttggttgaattcatcaggttcacacttcaaaattagtttgttgatcgtctcaaaaaggcaagtaagtgcactacccctttggctactacttttgaagatgatttaatagcacaacacacagatggtaggttcaagagtgtcct

SEQ ID NO: 144465 - DNA, 1189 bp, Cannabis sativa
agtgttgatgctagcaacattggcttgtgctgagctagaggaattgaactgatttggagcttgatttggtgctgtaccagtgaagttcttatcgaatctatagaagcaatctatagcagtatgaccaagcttaaagcatagctgacattgaagcttatttgctgtgttgacagatcttccagcacctctgccatacattccagatccaaaaccagaataggagctattgctgccacttccacgattgtatcctcctctattgctgcctcgattagaagaagaaaactgagatggataattgtaccttgagaatggagattgctgtctaaaattcccaaagttgtttctgaagttggcaagattagcttcaggatgatcaatgtcaagtgaagcaacctgagcactgatttcaacctctcgatcagtcttctcgattctggattctgaagcaagaagtagagactcaatctctgcaacagaatacgtctctaatctggtgttggtggatatgacaaaagtgtcatattcactcggaagtcctttgaagattgcagctacatgatcttttgccgtgtacacttcaccaactgaggcaagtagatcaacatgatgtttaactttgaggagataatcagatagagatagtgagcctttcttcaagttttgaagcttggttcgaaactcaagaatcttagcagaaacttgaagagtaaagaacttctccaatgtcgaccagatctgattcgatgtttcgcatccaaccatgcgtgtgagaagattctcagacattgaagatagtagccaggacatgagaagctgatcttggacttcccagtcaagataagcagggttaaacgtctcagattcacgatctgcatcagacagaaattttgcagggggattggaattgatgtatcgttgtaacctgttgccacgaatcgcagctaaaacctgttgtttccacaacagaaagttgtgatcatttaaacggattgaaagattgtgagtaaaaaagacaggagagaactcatcgtgatctcgtgttcttcctcggttgagagatggttgacgattggcaggttgagcagagccacctccattgtcaccgtcaccagagttggttcttgaaccattcagaccagctcctccagaaactacattcgccattaatggcggaaattgctctgat

SEQ ID NO: 144466 - DNA, 656 bp, Cannabis sativa
atctaaaaattccttattcatatgcaaaatatataatcttgtaaggacgtacaaaagaattaagattatacaatataaataaaataagtcggtggtatattaaagtaataaaaatctctattaatatggaactgctaagtacaatttactatacactatacttctagtgtgtgtgattttgattcggatcacatatgtaaatagacatgtagtaaatgtgttatgtataattcgattatgcatgattggactgatatgtaataaacatctttcattaacatgttgtttaccatgaaagagctattcatatcacaacaatgataattagtagatcaacatgaatcttgagtatacatgaactcttttgtattcattgagttctttgattcacttattcaagtttctcagagaagatgattcttacaacttttattttgagagctcaatgatatgagtggctgggaacatgttatacaatagtagaatctaaactttcctaatggattgaatattaggttccttatagtgttaattttggaaatgctaatagttgatccaaatttgtaataagttatagattaaatgttcatattaaattaacagtacataagaagtcaagagataattagaaaggtaaaatggtaattttgaccaac

SEQ ID NO: 144467 - DNA, 513 bp, Cannabis sativa
ggctattaggatccaacttatagcccatgagttgctctccacatgtagaagtgtatgggaaaccctgctgaggacctcttgaccggcgaggcccttgtagagggcaggctagccggccatggtgcagtcccaatgctggccgaccatagggccaggcaggggtggttggctagctcttgtgagggagttagtttgacacttaatgcctgttttagtgctggggtctctgtttgcttaggtgttgagtttgccttcttcttaatgagtgttattgccacgtggtactaattttgtccacgtaagtatgccacgtcaggaggacaaaaatcgcaataacttttgtcccccaagtccctctgcagatgtttgtacggatagagactttaccacctgtgttggtgttgtcaagcctgttgtagcctttgctgaataaaagttgatgcattttttagccttttgtagcactttgtcttgactatctaatctcattgctatagagaaatagctgcttta

SEQ ID NO: 144468 - DNA, 539 bp, Cannabis sativa
ttcaagagttgatttgaaccattggattaaatcaagggctataaattaatatccctattgataggtaaaaattacaatacctattatattagctcacatatatatatataagggattttaataattatattaaatatataacaatgattacgattacttttagacgttagattattattagatggttgtaattaatttaaaattactaaaaattattaataaattatttataatacgattttatttatttcattaaaattaaaaaagtaaaaaaattataaatattaatttctcaaaaaaggttttatgaaattttaattaaaaaagtactttattttaggtatataattaatttaagtcaaaaaaatagaaatttcactcgttagtaacttgttagagcatgtcataaaaaatgtaaccatcattgttatattttattgtaattattgaatactcacccatatatcttctttatataaattgtagcgatttaacagaattcttagtttaacaattattttttaacgtttctttttctt

SEQ ID NO: 144469 - DNA, 666 bp, Cannabis sativa
  modified_base (225)..(227): a, c, t, g, unknown or other
ccaattgcccatgtagcccacacaaccccgtaccatcacaaataacaccacccagactgacatagcctctatcagggaataccactgtatgttgattataatcttttaatctaacaccataaatatgaatatcctaatacgatgaaataaacacatataaagtttagaaaaccttacattgctgacaataaaataatatatctccttccgctcagatctctaacnnntgttcctttctgtcgcagagtaataacaagatctagcctggatctccttctccttcagtttggttaactaccgtcttctgcactatgattgagtacttatgtgggcatggtactctataactaaaggcttgaattgatgaagaacagtaagaggggttcgaatcactatgaaagaggctctcattcactaattgtatgatagagttagaaaactaggtttagattgattgaatgttagatgcgaatgagagcatcatgttcattttatagcacttcaactagggttttaggatttaattatatagattaaaaaagataaaataataggtcatttaatgggcctacaattttaccactttatttcaaccatctttctttcaataatgttatactttttcaattttaatcctataaatatcaaaattatttatttaataat

SEQ ID NO: 144470 - DNA, 1431 bp, Cannabis sativa
  modified_base (46)..(48): a, c, t, g, unknown or other
ttcactcctctctcatttttttttcaaaagtctaaccttcttcaannntgagagtgtgtttgctttctagggtttcaaagaaaaatggcaaaaactaaaaatgctcaaccttccaaaaagccctcctgtggctctacttttgcatctccgatcaccccacttgcgccatctgctccaatgaccggagtccctagatcgtcgtctccttcgacggtgactgccaaaaagtcgaagacccaagctcgaaagttgacttacaatctcatttctcctccgatcattgcctctatgattgctactccaactcctgggcttggtgatcatgatgaatcttattcatccgatcattcattgtcaaagtcttattcttcaaattgtgctccaaatgtcaagaaagcaatagtgaccttgcccacggtgagttctcgaacaaggtccaaggtatccacacctagaaaacccaaagtggataccttggattgaattgtgaaggaattttatgctaacatcactgatgagtgcctcgatgaggactcttttatgtttggcaaagtatttgtcaagggacactagtattcctttactgttaaggatgtggctgaggtctcagtctgtctatgggaattgagacaactgatgtggagttttatcgtcaaaaggtgttcgggtatctcaatggtgataatgatatggaactctccgacacaatgcatatgtctcaactcacctatcaacatgctgttctcataaggtttgccctatccaattggtttccttcctccaatccggtaaatgtttcaaatgaacttgccttctttctttataaagcttctattggtgctaaaattaatttggctgacatgatttgtgagcgaattgtttctcttagaaagggcaagaaacctagactcaatcttatctttcctcatttaatctataatattttgtctgaccaagaggagttgattcttgagaatgaatccattgaagaacctactgttggaaccactttcaaagttccagagaatcctcctcaaggaaaatttgctaagaacaaggcttggtctgcttcccctggtgctaccgatgaacctgctgctgcatctgcttccacttctggttctacagaaatggctgaattcaacttgtgtttgggaacagtggagacaaatcaagccttacttctcaggaggattgacagtatcatgaaattcctccgatccaatgatgtggtccactttttatctcttgctttttatttatatgtgtttgaactactatgactttgttcatttttttttttttgttatctttgggtccttgatagacaaaaagggggagtagtatttatttttggatttttggattgtgtgttacaactctggacccttgttttagggggagttttcttgtttgtggtttgtgcacttt

SEQ ID NO: 144471 - DNA, 601 bp, Cannabis sativa
atataattactgaaatgagatctcaatcatttatctctagtaagctgagcttgaaggaaattatcatttcacttctaaatacacatagcagctatagatttcatatctatgattagcgctcctactcaattgactaccatgtccttaatcagtatgtcacgagaagatccaattggtcgactttaatgaacaaattgaagaacataggtaatacaactaagattgaacctaaccatatcaggattaagatctatagacccaagatcaacaagtgatattgagttagaaagatataacggtaagtttacgatatcttatccaagatcaatattgatccaatccaatgcatactccatacatccagtactgacatactttggtaattccctgaaaggacataacacttatccaaggttaagtataccttatcgctgattatcatgtgagtctaaatccagtgtactgacaaatcatgggacttaaacatttaaatatataatcatgattatattgcactatgttgacatcattataatcatgaataaatatatgttctagacttaataaaatttatacattaaacatataatcatgaaataaa

SEQ ID NO: 144472 - DNA, 605 bp, Cannabis sativa
aaaaaaaaatcaatggcttaaaactattattattaatattttgaaatttttacatcaaaaatacaaaatgcaatctttattacataaatacctacacacgaataaagcgatttttatacacttttgcttaaatttattacatatttaccacatgcacacacaattcttactttttgacacgtcagtgattgatgtatatacatcatttccatcttttttctcttctttttccttttattttctatttctttttcagttttttttttaaaatattgacctccatagctgaacacttccccctccacgatcccaactccattttccctcttcttttttttcttcaattttttttttcaactctcattaaccgaatcccataaccgttttctctctttttttctttctcttaatccatatataaatatgactgtaactcgttcttcatcaactccttcccatgttcaaaagaaaagttataaaattgggttgaaatctttagctaatagaaacaagggtagacgacctgttgttgaggaggactctgattttgctcctccattgtcgaaacgtgggcgagctcatccaaagaagaaatcgaaggtggt

SEQ ID NO: 144473 - DNA, 543 bp, Cannabis sativa
  modified_base (489)..(507): a, c, t, g, unknown or other
agacaattaaaaataattaaaaaagtataaatcaagttaagtattatattaaaaaatcaattgtaattaagttaccttgattctgtctgtcgtacaatcttcccgtcaatgacttctgaattgaaatttctaacgtggcactctaagattgtcgattgaggcatgacgatcatttcatgattcttgaataagctagactgcagcaacaaagttgggaataacttttcccacaatgtcaagtcactcttcaattcatgtgggagaattgatccaaggctcgagtcaaatatggtcaacattcaacgatcaaggtctgcctctgaagtcacccaatgctttgcactgtcgaagaagagggccatatatatatattctttccttattcttccaactctaaaagtattggacatcatcccctcgaatcaaatccaataggtcatcatcccactgaaagttagagtggtcattactgttggaaatattttaccnnnnnnnnnnnnnnnnnnnaagtatgtttcattaacatccaaatatgaattctaa

SEQ ID NO: 144474 - DNA, 759 bp, Cannabis sativa
gagatgcttgtggctttcaagttttcagctagctttgtcgaactcattatggtgtgtgtcaggactccaaagttctccttgatgtttaatggttctttacatggatactttgaatcaaaaagggggctacgacaaggtgatccaatgtctcctcttttgtttgttttgggaatggaatatctatctagaattatgaggaaagttgggctcaaacaggactttaagtttcatgagagatgtggagaattgaagctcaatcacctcagctttgcagatgatgtcttgttgttctgtaatggagattacaagagtatatacctcatgctacaaggtcttgagctattctcgcaaacatcaggtttgaaaccgaatccttccaaaacagctgtttattgtaataacatgtgtgatgtggatgttcaaaggattttagatgcttctggcttctctaaacaagaagtccctttcaaatacttgggtgttcccatttgtccaaaaaagctatctgctaagcaatgtgatcttttagttgaaaaaatggttggccgaattagaacttggagttccagaaacctttcctttgcaggtagaactgtgcttattaactccgtgttaatggctatccactcttactggagtcaaataatggttcttcccaagatcattattaaggatattgaggctatttgtcgaggcttcctttggagtgggactcatcaattaaagggagtggctgcggttgcttggagtaaggtttgt

SEQ ID NO: 144475 - DNA, 544 bp, Cannabis sativa
  modified_base (486)..(488): a, c, t, g, unknown or other
acaattattgtccagtcacttgtcaacattcccaattcaatcctagcaaccctggccctaataacagcagtgaagactcgattaagagttggaccactacaagtggattttcgacctataaactagttatgggcattcccttgtacggacaaaaatggatattgggtgatcaaaaagatatcagcattggggcaccaactattgcctatgttggtcctgttgcgtataaagatatccctgatccagaaggtgggatctttgataaggaggttaccaagtgcatgtacaaggctgataaaactacttggtatgggtacgaagctacatcttctataactgaaaaggtcgattatgctaataaacatcttggtgggtatttcctatatgccatcggagatgatgatgatgatcgaaccatgtgtactgcagctgcaggtataaaatactatcgtagtcatattattgtcactacaaaaaatcttactnnnagtcacaataaaatttgtgactaacgataaaaaagttgtggctaattgtaaattat

SEQ ID NO: 144476 - DNA, 810 bp, Cannabis sativa
  modified_base (768)..(776): a, c, t, g, unknown or other
aaaaattaaaagtcacccataaaattctcaaaaaccaagaatttcagttatataggtatactttatatagaatagatatatatacaatatttcctcaatgctctttccttgaggcagaattgggtaccaatctgagtttcatatggcgaagtatccttgagtcctaacagctaattaaagatggtgccaggagaagaatcggatctagttctaatactgaagtgctcaataatccatgagtggtctctactacatccggccttgatcaattgcaaaatctctcaactaatgaaaccagacaatgggacatggagattattaatgatttgtttgactctcgtgatgtcgagcttattaaacaggtgccttcactttgcttggaaagctctatcgggttgtttgccaacacgtactcaactccacattagacatgtacctgtggatcttcattgtgtgctttgcaatttttgggaagaatcaattttctatgttttggttacattctcctttgctcagtcatgttagaccagatctgcttcgggggttgctaattctgcagcaacaaatattttcgactagtttatggaagttacggcagtaggtaacacggggttgcttgaagaagctgtgtggttgattgggcaatttggaaggcttgtaatgacatgttatggaatggcaaaagctagggatgttcatcaaaccgcccaaaccgctcaaaccacccgcgccgcaccacaccgcaaaaaaaaatgcggtttgaaattnnnnnnnnngcggtcgcggtttgaatttttcctaaaccgcgcg

SEQ ID NO: 144477 - DNA, 588 bp, Cannabis sativa
acacatctaaaaaatgttaagtactagtggtgtctaataacactgctcattattataacatggaagtagtttaatatttgtaccaacaaaactatgttataaaatcacatttatatctttgctatttttctaaattattttatttactattactattactttttttttttaatttttcttagcgatatcatttacttacattaccacccggagaagttgaagaatatttttttttatacattaactaaatttatcatcaataaaatttaattcaaatatacctcattttatgagtattgtaacacaatttcaactataatagattgtgttctttagagatggatgtataggtttgtgggaaagttagagcaaaattttgattagaaaataataaagactattgtaaagtgatagggataaaattgatagaataattaaaaaaaatataataaattttgaaagatgaggtaaaagttaaagatattaatttaaaagaagtatgaataattacataaggcactattttttgtaaaatatttacatttttacgattttccaaaaaataacacgaaaacaaaataaaatcaa

SEQ ID NO: 144478 - DNA, 803 bp, Cannabis sativa
gagtcaaaccatcacacattgttcataagatgaaatccaaatcactactgacatctgctacaaataaacatcagtatacagatatttggtaatacaaaactattaatctaataaaggaatccatattcatttaatcatactaataataaatatatgttacctgataaagcaaccatcttcataacatcacgttgcctaatcaggcaagtcgatgctttaatctaataatcttgtattgcatcacctaatcaggcaagcccgtgattaattctggacctactaaccatgtttgtttttcttcttattttagctccaactgcttaaacttggattgttatactagcaagttgagtcagatggttggacagatgggtggagatagtccaagattgaagatgaagctcggaatcttctatttataattttgaattaattgttttaatccctaaacaatttgaatttcaattattggtttgggatttttattccctatttttcatattattgcagaaaattcatttttttggtgaatattataataaatttttctcttttggtaatgaattgcatttataagttgagcttcatatttctttatcttctgtatgcctatacaaattatatttatatgtttcaaatgtttgtatgtattattattttattactgacaaaaaaaaccaaggtatatttatctctgtgacatagaatttcaattctatgtttatgaataattgttaattctgaaacaattagtaagattttgtttaataaaaaagatcttttgatctgatatgggtggaaaa

SEQ ID NO: 144479 - DNA, 508 bp, Cannabis sativa
cactgtgattgagtacttgacttgttatgtgtgggcatggtactctatctctataggctcaaatttgatgaagaacaacaagaagggtcgaaatcactatgaaaggactctcatctactagttgtctgacagagttcgaaaactaggtttagatatgttgaagggttggttggatgagaatgagagtatcatgttccttttatagcatttcaactagggtttaggatttaatttatggattaaaaaataaataaaataatggataaaaatcccttctagtggctgaccacttaatgagcctcactagttgtaatttttccactttatttcaaccatttatcttttctttaaataatgtcatattttctaattttaatcctataaatgtcagaactatttattaaataattataattaattattaactataattatcatttatttgatttattaattagacttaacaaagtcttttaattaacaaataaatcccaaaatctcttttctt

SEQ ID NO: 144480 - DNA, 607 bp, Cannabis sativa
cttgtaatatctacaaaaggaaaataaaatatgatattgatattaatatatacactaatgaaaaaataccaatttgaatatatacactattagagaattgtaatagatacactgttagagaattgcactaataaaagataattaattatgtgtttgtgttgttttttaaaaaaaatcataaatcacaatgatactatgcagtttgaaaatagagaaaaggaagcatatatccaccgtccaaaccaaacttatttaaatataatcataattctaagtttttaacaaacataaaaaaacaataagaacgttcctaaaattgtaaataaccgaagtcataactatagggataaattttaaaacttagaaatagtagttgaaactgataagtcaatcttagttaatgtatgtttacagaaaaattattcatgcaagcagaaacttattcagagttgagacaattaaagatagaacatcacagtacattattatgtaaggtttaattaaaagatgataataatctttcgatgctataaattctaatataattttgaaaagatgagttacagactgaacaaaataaaatttttctattattgttatgggtttt

SEQ ID NO: 144481 - DNA, 583 bp, Cannabis sativa
actataaataataaatacgtcatacatattcaaatattggcatcgcagtatagtggaagtcgggattcagtagctggttgttgggaatttttatcgggggcacgaagttgaaatagaagaagcggcaatggtgagttgggcaatttggcgtgtgtggaatgacttcgtttgacaaaagaatagttagcttgcttcaaatattgtaacatcagctagaaacatgcttgatcaatacaaatttgctcaagaaatgaagggtctttcgttgtctcctttgaatgatggggccggaattgtgagcgttggattgcacctgtgttaaacaagattaaatttaatgttgatagggctttatttgaacaggggtggtttggagtgggttgtgtagctcaagatcatcatggaaccatggtagaagctttcaagaaggaaaatgttgggtatgtccaacctgaaattgctgagatcataggcatcaaagaagtcttgagttggattgcaactcatccctgggacaatgcagtgctagaaacggatagtttggtgtgtgtccaagcaatccaaagtaatgtttttatgtcct

SEQ ID NO: 144482 - DNA, 1119 bp, Cannabis sativa
  modified_base (1060)..(1070): a, c, t, g, unknown or other
atcattttctaatcttataatttattaaaattaaaataacaaaataaactaattttaaaatagatatgtttatgaaaatattattttaagattaaaataataaacaaataataattatccaaattatatgtcaaaatatctgaaattaagtctttttcaaatttctacaaaaaaatatttaggttatttaaatatttaaaatactatttataaatttctaataagtaaaatgatataaaatatcatatttctaacttataatttataaacaattaaatatttcacaaaataactttttattttttaatttaaaaatattgttgttagaatatctataaaaatatttaaattaatttcagaaattattaattatttaatttatcttataaattaattttaatataatatttcaaattaaaaagatattgctatcttttaatttaaaatatacttaatattaaaatatctaacgttataattaaataatatataaatattaatgaaattaacaaaattttaaaatttaaccattaataaaaataaaataatcaatttttaatttaaacctcaaaatataagtattaattataatatattaaacataaatattattaatttgaaaaattaatatttaagtttaaatgtattaaaataatattttatttttgatttatagtgtttgaaattgaaaaaattcaaaatttgtacaaataatccatgaaaatcggattttgggtgttgctgcacgtgcagcccaagaaggctgccaatagtaattactcgcgcacgcatggggcatatgcaacctcatctgccgagaaatcttggcatgttgcagcctcgaggtgcgtaagtgggcgtgtagtcgtgtttgagtgcgagcgagacacgatttcaaacaaaatttgtctaggtcacgcgcgcatgctcggcttgtccgagttgctgtgcgtgctacgtgcaccatctcgacactatttcaaccctaaatttaaagccttcataagttttccaatttttattgaaattgagttccgtaaaaaccaaaattgcttaattnnnnnnnnnnnatccaaataaaatattttcagaattaaaagaaaaatattttcatggaaa

SEQ ID NO: 144483 - DNA, 821 bp, Cannabis sativa
atgacattcatgaattatgccccatgccatactttggagcccagctgataggatttttgtgcaagtatgatttctaactcttaataataaacttgataatattctttcggcaacaacgattattaattatgacttgttatcaggtacatgaaagaaagactgttagacattgaggggctgaatcgagtatataaatttctaaatctgggtgtgattgccaccaatgtaggggctgatagtaattgttgtcaagcactagtctctcaaatgactaagatgactaattcagacaaatggcttattgtcccataaaataatcggtatatgtagatttagaataaataattttagtatttataactcttcgtaaaatttattattatgtatatattaacagttttacacatatttgttcgtgtaggaagatggttcactggatgcttgcactcatccagccaagtatgcagacggtggcatacttggattcaggcaacgacgacatactggataatttgaacttcatcatattcacgtaagttctatatcaaacattctaatatgtaagagtgttctatatttataaatttatatatgctaattaactttactttttgtgtagattgttcaccatacataatcaaataataggacggcctaatcgacctatccagtggatgacacctatttgtcctgaacaaccagacgacaaatagtgtggatactatgtcatcaaattaattgaaaattttatgaccgtagaagatccaatataattattgacccaacatgataggttctccactgcgtacacaaatgatgag

SEQ ID NO: 144484 - DNA, 605 bp, Cannabis sativa
agtttctttgccatacaagatcatatcaacaaagtgctcatacatcttgggaagtgaactcaacaagattatagcctagtcttcatcatcaattttcaccccaagattatttgaatcaaaaatgattctgttaaaatcatctagatgccttcttaattcctttgattcatccattcaaagtgtgtacaacttcttcttaagatacaacttgtttgcaagagatttcttcatgtagattgatgccaacttgttcttgagacccaaggcctagtcttcatttaaaactttcctcaaaacctcatcaccaagactgaggaggatcgcactatgcgctttggcttcaatctcaagtttcttcttgttgtcttcaattaatttcatggattcatcatcaagttcctcatagatcccttggtgaactagaaaagccttcattttgattctccataggctgaaatcattcaaatgattaaacttgtccacctcaaaccttgttgaagccatttaaatcagttcttgattgcttgaatctggttcttgaaagttcgagtttaattcttgaaatgttgaagatgaatcttgattggttgaatgtgattcttgaa

SEQ ID NO: 144485 - DNA, 766 bp, Cannabis sativa
aaaacacacacatttagttagtttaatgaattaattttttcaagataaactatatgtatttctctgtattttattaaattaaaaagttataactaattagattcttcaagacacttaattatttaatttttcataaaaatatatttaagctgaaaatcagttattataactaattttggatcaacttaaatttgaatatttcttaaatcaataattaagtggaattttctagaaaattagtaattcagatattctttaaatatttttttttaggttgaaaatttgttaattttggatcaacttaaaatggaatatttttcaatttaaggtgattagttcaagatacttaatttgttatttaattaaaatttgaaaaataatttaagttgaaaattttgttattttagaataacctaaataaaatatttttcaagtaattattttgttatattttaataattttcgaaattttatatatattatataatagatttttgaaaattaattacaaaattaaattaaagttgaaaattaatttttaaataattttggatcaacttaaactaagtaattttcactattaaaatatatagagtaaagtaagtgattaaataaaaatacattttaaataatgagatttaatcaaaggacattcgatctccatttattgttctacatagttcttgttttagtgagtaatcatccttaatggatgaacgttcattagcaatttaacgccgtggaatctcgaaagataagtattatt

SEQ ID NO: 144486 - DNA, 925 bp, Cannabis sativa
gttaacataaatcacttcaaaattctaaattgataactaatcagattagaatgggttttatttagggcacaaaacccaacaatgtttgccagagtgacatcgtaggccgcaggaggcgcttttgttgaaaaagaagcttgttggcaggggtgtggaagtagtgcaggggccgtcaaattcttgttagtcacgatagtggtcaagagttgatgaccaagatggtttaaagtgggatagacatggaatgcttcagtagctacatgggtgtgtcaagaggggcacacatggagaccaaggggggtagatgccacaatcgtcagaggatgattgtactgtgaggtgtttgcatgtgacttttatttgatccatatggaagcaccgaggcagttgagtgggatgtgttggcttgtaaaagtgcccgtgggcgtaagtaacacaaagacatcaatggagatgtagagttgtggaatgaatgcatcgaagaagccagcagggctaagaagaccgagcgcaagtgttaagatggcactagagtttgtgtggaggccagagggtcgtgccagtgagattagtagtcatgtgagcctgtgaaggtcaagaagggtgctagagtttgcatgaaggccagagggctgcatcattggaaattagtacatcatgggagctggtagagcgtgatgcaattgtgaatcaattggatggttgagcagacattgcatgcatatggaaatcgacaaggttgctatatgagatagttgactcaagagtcacatcctgcgggatgcacttttagatggcatggtgtgcatgaagagttgggtagtcaggcattcgcatgtggacatgttgtcgaggacaccaacaaataaagtgggggagagaccttcacggttcactcaatagactagttattcattacaagcat

SEQ ID NO: 144487 - DNA, 877 bp, Cannabis sativa
  modified_base (151)..(153): a, c, t, g, unknown or other
cttttattgtaaattaattataatggcttagtagagtttgaatatcttaaatattcatccgtagtgaagtatgttctgcaatatattgtactgcgccggaacgatgagtggagtaatatgcatgttagatgagtttgaatatcttaaatannnatccgtagtgaagtaggttatgtggatacatgtactgtagtcggatgaataataaatttttacattgctaaatgttattgtgattattttatattattttgaattgtgttttgttgttattattatatttgaacttcttggaaacattcaattatagccgttatgccgaaatttcgatagaattaggataatattttattctagtttctcttaaacttggttgttagaattttatcggaagtgactttatcgtaagtcaagtacataattcttggtataaggtatgctttctttaacctacttttataagaatattttttttatatatatatttagataatctttaaatacttagagtaattttagaataatattgatgcaatacatagaatagatattgttgagtgctaaagatagatatagtaagctataaaaaaaatacaaaattggtcaattgagatttgaacttgtgaccaaaaggatagatcgataagtctttaccaatataccaaaatacaatatttgataaatttgatactatgattttatttaaatattagaagagacattaaaggtatttagtattggaattttcattgtggtagagttaacaaatgcattataaacattgattctaatacttaacataagaattctattagtttattttaagccaaatagcaaaataaaatacaaaaaatttggtgaaaggggtgcataacat

SEQ ID NO: 144488 - DNA, 669 bp, Cannabis sativa
  modified_base (221)..(221): a, c, t, g, unknown or other
tgtttaagcttgttcttgggtcaagggaggttatatatgagtgcatgggaccctaaggattgtttttgacataagaaaacaaagttttaacatccgaaacgaaagaacatgattttgattccattaaagaaggtacaccgccaatgaaggagacaaccccgatctgccaacttgggcctctttacttgggttgatcttgatcgttttgaggtcctaagcantgtggatagcttccccaatcgaaaggacgtgtcaagagaaattggggacaaagttacactttgtcggcgaccacgttctgggctatactgaggatcttgttctcaataaggaaacacattgaggtgctcgaggtagcaagtgtggtcttagcaactgaggtaagaagagtgggcatctgtgtacagggtgtatgtttatgcatacaactgggttttgtttgctatttaatttgattatgtgttgtgatgatgtccttacataattagcatcgttagtatgagaatagtgttagggtcttactccttgtgtgagtataacacttgcaggttataactttatcatgggtgagtacaacttatggtatatgatttccatgttggatgccaagtgtgagaataacacaaggcagggcaggttacctcatgtctgatcaacatgagtgtatag

SEQ ID NO: 144489 - DNA, 1178 bp, Cannabis sativa
  modified_base (65)..(65): a, c, t, g, unknown or other
  modified_base (169)..(170): a, c, t, g, unknown or other
  modified_base (764)..(773): a, c, t, g, unknown or other
  modified_base (971)..(974): a, c, t, g, unknown or other
  modified_base (1119)..(1124): a, c, t, g, unknown or other
ttatattgaatcatgttgttttcttttattaatgttgtagtataaatttcaaatcttcattgttngtctaacttagcttgttgttttaatgggacaaatcctagagaattgtcagccattagacaaacaaaatagtgttagatctcgacagataagtatttgtaaatgnnacatctagttgtacatccaaagatgacaacttacactagtgtttacaatatgaaacaatgaatagatttataaaataagaataactttgactctcgcctaaacgggagatcgttagattcttattttatttgaaattatcttttattagtttcttcttagctttttcatttagaatttgcttaaatagtatattattggatgaatagtttataaatcatcttcttatgatgtcattataatttctcttatgaaattgaatggtacagatgactatattttcgacatactatcccgaaatgatgtaaatcgtcgatcttataaaatctcctatttgtatatgtttactttaggcaaattagacttagagttagattagtagtggtagtccaagagagaataatcactcattgtatatttggtataaatttaaatgtttgactttaaattttagattccaaatagaaattttaaatttcaatttttagaatacattgaacaatacagtacaattttcacaagttcaatatccattttatattaatggattctaacagtatgtttatgtattgaatatgagttttgtattctgtgannnnnnnnnncttggactattctaagaactctctattgtaactagacctaagtcataaaaagaccacaaccacattctaatatatctatggcattttatcttgttcatagtggttttgacaagatcattctttgtaaagagccaatataccaatatccacttgaaagtaggatcatctatatttgcatatatggatgtacattcaggnnnngatatgagtttttgttatattctttagacgatcactctagactttaccttatggaaagaaatttgaaatgtttgagcaattttatgaatttctagcaataccgaaaaacattaaggtaagtggttaagatcttgcgaactgatannnnnngagaaatatttggtggatatgcagttcaaagatcattaagttgaatttttgaat

SEQ ID NO: 144490 - DNA, 885 bp, Cannabis sativa
tttttatttgatcttgtaatgtctgaatataaaaatattgatgtccatttgatcacctgaaaaatttacgggttaacagtaagtatatttaattttgtttagacttaatgtttgacttttttttaaattgtaacttatatgatatttaagatattatttggtttatttacaagttattttataaatatcaaaatagttttataaaaaaaaaaatttatttataatttaatgttgtgacatttaaaaataaaataagaaaatactttttagtaacttattaagttgtttggtacattaattttgtttaaattaaaagattaattacttaataaaatttaaaagaaacaaaaatattaaatttgatttcgattatcttaaaatattttttaaaaaaaacttgtaaaagaagagagagagagagagagagagagagagagatgaatacatgaagttagaaatttatctataaagtttttaaaaaatacaaataaaataaaatgagagagatatttagatgtcatgtcattaagagaaaaaataacaaaataaataaatgaagttgttgatgtttgaaagaaaaaagctcaaaaataaaataaaaaagaaaaggaagagagtctctaaactttttgtttatgttgttatttaatgtaaatttaaggtgtcagttatatattactattaaataataactggattattactgtattgatttggaggctttattgttatatatacacaggtgtatatagttagtcatctaataattaatatttaacattaatatttaactcatgtgtcaaatttgcaaagaaaaataattttaaaggagttttgccacaaaaaaaaaataataataaagaagttaagtgtataaaaattaaa

SEQ ID NO: 144491 - DNA, 511 bp, Cannabis sativa
atgtgctctatggatatctgtccattttgcactttttctttcacaactaggatatttatgttaatatgctttgacttggatgagctcctattgttattggaatatatcacttctgatttattgtcacaaaatatcttgagtgctatatattgttattaggatatagctctgctgatttattggaatatagcactactctccaaaatacgcagcctagtgacaaagtttctcagccatattccctaatttgatgcctcataacatgctacgaattctgctgccatagtggaagaagctataagtgtttgtttgacacttttccaggatatagctcctgttgtagaccttctgctatcttggcatccagcgaaatcagaatcagaataccctatgacctccaaatgattagatttcctgtatgtgagcatgtaatcttttgttctctgaagatacctcataaccctcttggctgctatccaatggtccataccagggttgcttaaatatctgc

SEQ ID NO: 144492 - DNA, 849 bp, Cannabis sativa
  modified_base (137)..(141): a, c, t, g, unknown or other
aaatttttagtggtccacgtaatttaattattttaaatattggaagattaattaaattttaaaaataatttattttttaaaaagaaaactaatttaaaaaataaaaaaattctattttttcttttctttttcttttnnnnnttttctttttcttttttttttctgtaaccctcgacaactcctcctcttcttcttcctttcttcttttcttctgtaacccttattgtaattttccctctctctgcgtctcaccctccacgattccctctctcttctcgactcctattgccggcgtcgatctccaccaactttctcgctccgtttccctcatctctctccccttctcggcagtcggcatctcctagcttcggcctctccattttctcggcgttatgaatctccatttttcttaatggctctctaattgaagttgtgccaagtaataatattgctgggtaatttacaataatatttcaaaatttaaaaattttgtgtcaggaaactgtgaaggtttatgggaattttggtataggattatttagagtgttgactggaagatggaaggggctacaatggacaaatattgggtacagtaaagattctaaggatgatgatgaactttgctatgcttctgtaccagtgtccaaattacagcctaggtaaacattaatcattatagtttatataattaatcaaaaaatcttttggatatgaagaaccaacaaatgacgatttttttctcccttgttagtttccagtggtggtgagacgagagagagagagagaaagagggcctgggagggatctataggaaaagaagaagaaagaagaaagaaaaaaaaaagaaaa

SEQ ID NO: 144493 - DNA, 655 bp, Cannabis sativa
tctcaaactgcctatgagctatggtaagggagaccaccaaatgttagtcacatgcacattttcggatgtacgtgctatgttctaaatgaccgtgatcacttaggcaagtttgaccctcgcagtgatgaggggatatttctgggttactccacctataatcgtgcttatagggtattcaataaaaggactcactctgtagtcgaatcattgaacgtaaagtttgatgacttataaggtagtgaagaagtgagtgtcgaggatgatgcccttgtcctctctggacctagaccagttaccactaaactgacccaagtgtatactgacactcctacagagtctctaaacaccgaaccagcattatcagatgaggtggatgcaaatgtcagtgatcaaaacagggaacctgaagttagtagtgctatgcccaaagaaccctaacaagccaaacagtacaaaaatggaccaccctcctgggttcagaaagctcatcctcaggcagttgtcataggagatccgaatgacaccatggtcaccagacgaaaactgtagaacatgttagcatttgcctgctatctctctcaaattgagcccaaaagtgtcagagatgcactattggatgaattctggttggctgcaatgcaagatgaaatgggaa

SEQ ID NO: 144494 - DNA, 671 bp, Cannabis sativa
atttgtaaataaggtaaatatataaattagtacaatttaataatatgaaaataaattaaatgcaaaatccaagaatatatacttaatggcagattatcaataaattgaatcaataaattacttaattggtaaataaatatcataattgcacacttattgtagaatattcaaatattcacattcttaaaatatcacaattattataattacatgtaaaaataaagcacgtaattaatttaccaatttaaaaaattttccataattttttcttactaaataagatatatgaaaatatgtgttaattaaaaatagaaaatttaaacaaatgtaatttaatagactaaattaacaaaaataagaaaacaaaataaaattccaaaataaatctaaaaaataaatttttggaatttttcttaaatttttcaattttctttgaaaaattgctactgaaaaacgacatgtcgtgttttttacataaacagaaaaatgacacgtcgtacagagtcggactcaaaactcactactgaaaaatgacatgtcgttttccacataagataaaaatgacacgtcgtttgtgttgagttttatgccctaaataaaacaatctgattagttatcaatataagaaatttgaagttatttatgtttgcatgaattttacatggtaatgg

SEQ ID NO: 144495 - DNA, 654 bp, Cannabis sativa
attaacaaattatacaaaaatcataggtaaagtacctaattacaatttgaagcaaaaataaagtctaaaattaaaaattaacaaattattaatcatattatatcttgattgataatttttttttcccacaagaaagaaagaaaataataaaaaaaaatagatgagttaattcttggtagcaaaaaaggagatgaacttatgaaatgttagacttttctttaaataatatttatgcgtctatttttctttggctttagttattgagtgtatagtgggggcttgtagttatttcttaaacaatttcattcaaaaaaaaaaataatactaggaaaagaggttttgataggggttgaactcacgtcctcaactaataaaatcttatctttctctaggcttccactgtgctaggccaattttagttatattaattgttaattttaattaaatatagcatttaaataatgagatcttaaaaacttttaatgggcccctaggaagtgtgggccttaagtatgggcctagctcgcctatacctagggtcggccttggtgccaatttttgttgaagatataatcggcactgttcacgttcttatatttccaccgcttgaaaactaagtcatttttttctttaaggttgggttgaatgaaccaa

SEQ ID NO: 144496 - DNA, 546 bp, Cannabis sativa
aatgtaattgattgattgattgatcatcaactaatgtaattgattgatttacaaggtcaacataattagacctagagtagagctttctactctgtccagaaccagtggtggagttatggagttttttttcatcatgatttaattaaggttctactacacaccaaacatagatttgggcgatccccacaaattccattataaaacggagttgctggcttttttttttagtttttaccctcttgctctgttcttcctttcctttctcctttagttaagcttctatttcagattatcttctttctcaatcaaactctcacatacactacacacacgctcatgacacaaaatggtaaaagggttcattgtcgtattattccagctaacataaaagggttattaacttctaattacaagacacggtatgtaacaaactaatgaacatcaacttaattaagaaagaacatcaataaagaacataataaatcccaaattaaatacaaggataataaagagaacaatattgctcaatcaccaaaggagtcttgc

SEQ ID NO: 144497 - DNA, 833 bp, Cannabis sativa
aataatacttaagttatacttttagaatttcataagtacctggtcgctaaatgtcaagtcattatccatatgttattttcttattagtatatttaaactattttttataaaaaaaaaataaaaatttaatgacctaaaccaatcaaagattaccacgtggcaatttacttaacacttaacagccaggtatatatagaagttctaaaattatagcttaagtattattaccaccaaaaattaaacttaagtatttatttgcaaccgaaaattaaatttaattatttatgcaacaaattactctattatttattggtttgtttacttattattcctaaactaattaatcaaataaaatgtgataatagtataaaaaaaggttatattctaaattcatgataattataaattggtaattttttacttatatacaagtaaatttattatattacaaaaatataattatataattctatacaattttataatatttaaaaataaatttatatatttacgattttattatgttaattatttttaattaattttctaacaaaaataaacacataaagttaaatatataaatacataaatcaatatttatattttaatatattactaaaataatatgttttactaaactttaatacggaatttcaaaaatatatatatatacaaacatatttataattttttttatgttttataaatagtgtatatatttttaataaacttattagtattattaatatttataatactattattaatctatatttattataataatatttcaatagaattaatataattttttttattaaaagttcataaaa

SEQ ID NO: 144498 - DNA, 800 bp, Cannabis sativa
  modified_base (31)..(59): a, c, t, g, unknown or other
taattggtattaattaatcaattataattcnnnnnnnnnnnnnnnnnnnnnnnnnnnnntttcactaaacaagggcttaattgggaagaaaagaaattttggagtttgtttgttaaggggagttctatttgcacccataaaatgataaatacacctcatcattaaaaaaaaaaataaacttaaataattttataaattactcttaatgttttctttcaaattttttcctcacattatttcaagttaatctcaatatttaatttgattttatttcatatttcttttttcaaaatcatgtatatatatttttaatttttttctaaaaaaaattcatgtaattttttatttaatatttttgtcataatatttaaaatataatttatttttattttataggtatattttttaagaatatgaattagaagaaaaaagttataaaaacttagtaaaattaaagatataaattttatataatataaaaattattaaaatggggtgtctttaaaaattattggggtgtaaataaaatttcccatttgttcattaagcaactttgttaagtctaattaataaataagataaatgacaattttatttgataattagttatagttattaaataaataattttaacatttataggattcaaattggaaaatatggcattattgaaagaaaagataaatgtttgaaataaagttgcaaaattataattagtgaggcccacatgtgtggccagccacttagtgtatttttgcccattattttatcttttttaatctatataattaaatcctaaa

SEQ ID NO: 144499 - DNA, 761 bp, Cannabis sativa
tctgaggttcctttgaaatgattacctcttttcgtgacttgcctataaatatcaaccagcattggcacataaactcattttcaccatccttcttcgctaaatgagttcagagcgaaaagagaggttcttggctttatgtttgctgaagtgccttcatcaaagctgcttgttggattgacgttgctcgaacccaaacatctgacttttgagtaagtcctgatttcctttatgcttatttttgcatgtttacatttcgaatgcccattcgactttgctgtagaaaatatctaggaaaccctaggtccagaaacttttgcgattcttttatgtcatggcttcatgcaattttacaagtataatgcttgttttttgaactgcgtaacgtctgtctttcatcttgcttattctaagcttcatgcacttttttgccctaactcgagaaaatttcaaacttcttgagctctgacttctcattgaacattcttgttcttgaatctgttgagtactcctagtcggcatatttgcttatctatcgttcgatattctgaccaaacactcatcttgtgtgatgtcttcttgtagatgaactcaggtgagttttgggggaacggacatcgggttgatcaggacttgcttcaactcttgcacgaggagcatcctcgtcttcattctagccctccttcctctagtgaaggacattctccaaaccttgtacccagccatagaatgatggttcatacaaagaaaacaacgcgtctggc

SEQ ID NO: 144500 - DNA, 582 bp, Cannabis sativa
gttttagacattcatatttaggatgttaaataatatacatggtagtaaatctagatcctggtaaaacataatcccacaatgtccctgttaatgttgcttgtcctttgtgcaatgttgctgcagaaattgtgcatcacgccttggtggagtgtgagtttgctactgctgcctggagtcgcagcttagtggatgttgggaccggctttggaacatttagtagctggctactgctgttatttggcaggggacgtgttagtgagatggaggaagcagctgtggtgagctgggctatttggcgtgcacggaatgattttgtttgacaacaaaagagttaggctgcatcaaatattgttgcatcagcgaaaaacatgcttgatcagtataaatggctcaaggtagaaagggtctttctttgtctcctttgaatgaaggggggcgacattctgagcattgaaatgcacctatgttacacaagatcaaagttaatgttgatggggctttgtttgatcaagggggtcgatttggtgtgggttgcgtagctcgggatcatcatggtaatatgttagaagctttcactaaggg

SEQ ID NO: 144501 - DNA, 1212 bp, Cannabis sativa
  modified_base (440)..(455): a, c, t, g, unknown or other
gagataacaatgacacaatgagaatagataatagggacaaagttcatttcatctaaggtacaaaatgaaaggggaatttttagtgtaacttaatatgttagctatatcagaccacctagaatacaacgttatcaggtgtgatagcgacttcacatcttgtggattgatgatctggtgatattgtaaagtgttaagggctcactataaatagggcccttgaattcattgtaaagagatgttttttgaatgaatgaaacagtaacttctttagattggaaagcttatgagatttctattttaaagattcttctattaagattttttagagatagtttaaatcataattatatcgttgatgagttctaaccattaacaatttggcgccgtctgtgggaattgacacataaaagcaacgtcatttgtaaagaccgcttagtttnnnnnnnnnnnnnnnnagataattagggtttaattataaaaattacttattgatatttaaataattatttatgttgatttatttgaattcagaatgcattttatatgtcatatagtgaaatttcataattttgcactttcggtgtccggcaacatggaacgcggtgtatggctcagtagaatcaaaatctaatagtttagtatagcggggcggtatggttagacattgggaatgtcgggattattcgggaatttagaattttcccaaaataccctttagtgctctttaatccttttagtatgggaggggcaaaatggtcattttgccccataagtttttgtcctttagtggacttagtatttggtgatttttggatttatgttatgttatatttggctgaagtaagtattgaaaatcattttatcactcattttacaaaattggaaaaattaagaaaagaaaagcgaaatttcattctctctctagcactctctctttcggccccctttgagcagcaagggtttgatattttccttgtggattcaagcagattttgagggaaatccaagttctaggtatagctcttgcaccctccctttagtttcttgtaatttaaggaagaaaatagttggatgcttggtgattttgatgattgtaactgttgtgtgtttgttgctgttttttgaagtttagatatgtttaattgagtggattcaagttggttttgttgttagttagttggttttaactatgtgtaaagctttaaactcaaa

SEQ ID NO: 144502 - DNA, 559 bp, Cannabis sativa
  modified_base (236)..(243): a, c, t, g, unknown or other
  modified_base (353)..(364): a, c, t, g, unknown or other
gaaactaaaaaaccgcaaaaaccgcaccacaaaaaatagtgcagtgcagtgcgacttatgcggtttggactatcgctaaataattaaactatcacaaatactacaaaattttagcaacacttgtcaaaaaataccataatgctgggaaataaaaatgaaaaaaaaaaaggtttcaagtttcaacaatacaataatttgtggacttaggttgggtcttcacatattggacctaaatnnnnnnnnaaattagtatttttataatatgcggtgcggtatgaaccgcatattaacgattcaaaaccgcaaaccgcactgcactgcgcggtttaggaaaaattcaaaccgcgaccgcnnnnnnnnnnnnttcaaaccgcattttttttttttgcagtgtagtgcggtacgggcggtttgagcggtttgatgaacacccctactttatataatattttttaacttaaaaataaaaaaaatattatattcttatttatttaaagaatattgtttgaaactttttttgaaactagatgattgttacgtgccaagccacgtagtgtta

SEQ ID NO: 144503 - DNA, 735 bp, Cannabis sativa
  modified_base (32)..(37): a, c, t, g, unknown or other
ggacaccggggtggtgccagccgaaggcactnnnnnngtcaagtcagtaaatttatagtgcgaagtagaaaagaaaataagaaatgtagataaatacttcctctatctatggttatgcgatgatggacggtcaaaccttactcgccgaaatgagaagagtacgttagatagtagagaaatgataagtttagtcataaatctatagaaagagaatgaatatttgtatatctttttcatcctccacctctgtccctgtgaaggtctatttattatcttaagaaaacgactacctcttgaaacttggtccatccctagagaaacggtcttcctccacttcttcagggatgagcgttatcttttcggttcattgttggatgagcatcctcacattagcgtatcacttagagggttggatattcttgtttccgcttatgctaggaaagatcgctatttttgtgggttagttggaaaacttaacattcttctttctccacgtgtcaatcctaacattatactttaagatcaagttttattgtgggttggacattcgaatagggtatgacccaaaaggcatggattgggcatggcccatgtgagccattgggcttacgggttccttgtttctgacttataagtgggaagtacttcgatcgttgggcttaaactaatttttggccactacagtttgttcctcgctcttttagttgagttatactcaagttaaagagcattact

SEQ ID NO: 144504 - DNA, 683 bp, Cannabis sativa
tggtagtaaatctagatcctggtaaaatatttccaacaatggaggcctcaagtaattggttgaaccaatcatgggcattctcctccagagtcgcatcgagcatccaacatttttccaactgaggtacctcgtctacttccattatagtattaaagttatctaaataatcgattgggttagtaaacctttgtatttgagcgattcagacagcctgaagcccatcggaagtcgagcttgttgcacttcttctgtaaaaggcaatgtcccatggagtttgtaaatgggttttctctgctgcttgataattttgtacgctcggaggaggctctcttggtcaatacccccagtaaaataggattggcctgtgttaccgttcgtatggcagtagtcgcagctatgttagctgggattactacctctatggtcaaagctggtgcattgggtgggttgtttacgttctgtgtgccttgatcgcccacttagggatcctgaggttcgtcatcatcgcgattccttggtgtttgggatcacgccctgaaaatttaattgcgatgatcacggagatcacctttatgaacatgatatctccctcctcatcgcgtttcaacagaacttgacctggtataaacactaggggagcgactgttagtagaggaagaatgagattcgactttgtttacctc

SEQ ID NO: 144505 - DNA, 638 bp, Cannabis sativa
  modified_base (483)..(509): a, c, t, g, unknown or other
atgtaaaagaaatgacacatatgcagccacctagggagatgcccgacactagaggtgccgaacaacaatacatctatgacgtgagcacaactttgactacaactgttcttaaattttgaaactaattaattacatatacacgtgtatatatcatgtactcaatatgcacctgactagtaatttaataaaatacactatccataaatgtccttaacaaggttattggttcaaactctaaccaacaatgcatatctgttgctccatttactccttagaagttattattattatgtttttttttatctaagagccaaatgctccaagtcatccacgtggatgttattgttctaggattcatttcaaattaatttgaatatagtagttgatgttctcatgcactcatgaccataaacatatatataaatatacattgtattcatttcacttatatgtatttgccacaataataataataataataannnnnnnnnnnnnnnnnnnnnnnnnnntaataataataataatagcaataataacactattttgtaatttcgtaggcaaaatttgaaaaggaaattacactctataccctttttatattgtcttcttttatttttaccttcttttttaaagtctat

SEQ ID NO: 144506 - DNA, 724 bp, Cannabis sativa
aaaagaatatgagtggaaaaaggcagaggtgttagattattttagggtaaaagccatcacagttgagtgaaacacgagtggacttgagagacattttttggagtgaaaaaatgtgagggagtggtggtgaggactttcttctataactactttcatcttcttttgttatagatttcaatcatatcacatcatacagaaaaaaatacaagcaatgaaactccaccacctacgggtcaaaatttacagattcaagccttaatgtgggagacgaggaggttgttgaggaggagtgtgaacaaatacatgtgagattggatagggtagaatagggcacccaataaaggcctaggaggaatagggggtaccaaagggacgaagagaatggaatggattttgaagcagtaatttctgatgaagagtttgataggaagtcggcaggtaaccctaggaggtatggtcggaatagagaagctaggaaccaggtagataattctttaggaaatatcaagatgaaaattccagcatttcagggaaagggtgatcctaagtatattgagtgggagaagaagatggaattggttttggattatcacaactattggaaaatgaagaaggtgaaacttgctaccattaaatttactacctatgctactgtttggtgggataggttgtgcataaaaaggaggcagaatggggatcgtgctattgacacttgggaggctat

SEQ ID NO: 144507 - DNA, 638 bp, Cannabis sativa
tagtaaaatacttttaaattgtattttgatactcgggatcccaattcatatagttataaagatataatatattaaagttatattttgagtttagtaaatttaaaatgtgagcgttacagtagtgttctaaattattacatataaggttatgctttataaataattaacgtaagatttttcataataattgttaaataaaatgtgtgagatttttgttaaataaaatgtgtgagattttatatttaattatactaataataatactatgacatctcgtgttggtgctagtagtatctattagaatatttttaatattggtacaaaattattttaattaattttactttttcttattgacggtatatattatcacaaatcaaaatgtgataagagtgaatatattaaacatgatcagattacgatttactaattaatttatttcttaatttaatttttcaattgattgtcaaaatatcttgacaatcaattgtgacaaagactttgatggaaggtctcactaatataaatatagagtctcagtccttgagctcactacttgtaatacctggaattaagaaatggattagcaaaactctaattggataattatgaataattgagaaattatattattatat

SEQ ID NO: 144508 - DNA, 806 bp, Cannabis sativa
  modified_base (740)..(741): a, c, t, g, unknown or other
gagctaactttgtcaaatggaaagcgaacattaatattgctctcataggtgaaaatgccctgtttgtgttaactgaagaggctccttagcagccaggtgagaacgcaactaaggcagtcaaggaaaagtttgagtgttggtaaaatgataacaataaagctcgatactttatgctgtctagcatggtcgacaccttgaagacaaggtttgctaatacatggttgcggatatcatgaaccagttatctgaactgtttgggatggtgtcaaatcaagctcgatttgaggcgaccgagaatttcatcaatgcacggatgaagcctcatcagaacatgcgtgatcacctgctccaaatggcaagttacttccaaatgcacggatgaagcctcattagaaacctgctccaaatggcaagttacttccaggaagccgagaatcatggagctattttagatcaggaaactcaagtgagtttgatcttgaatagtttgaccctagcttttctgcccttcacctcaaattatgtcatgaacaaattgacttttgactttcacgagttaatcaacaaccttcacacatttgaaaatttgattggaggaccacagattgaaggaaataaagctcctagttctgaaaatgctaatggtacggccaaggctgaggcaaacattacctctacttcaaaacccaaaaagaagaagtggaagaatagcagtaagcctcttaaagctgctaacacanntaataagaataaaaaggctgctaatgttgggatttatgccctaaataaatcccatttcaatataa

SEQ ID NO: 144509 - DNA, 612 bp, Cannabis sativa
aatacataatttagaaaaaaaaaattatgaaaacaaaatcaaaatgagtattagaatataaaataatgagaaaaattttaaaagtaatttttaaaaattatttaagtttatttttttaataatgaggtgtacttgttattttagaggtgcaaatagagccctccaactaaaatgatcaccttagagtatctctaatggtgtactattttcacaaaattagtgttaaattttcacattatttcactacaatgacataccaaattatacaccaaatttcacgctataatgatgttggattttgagaattttttttattctaatccttattttaatttattttaaaaattaattttacattttagtcttcaaattaaaatttataacaaaagtaataattgatttaaacactaatatattagaaaatacaaaataacaataataaaaatactaatattaaataaaatacaaacaacataacactaagttatgaaactaaaatgtatagtattaatgaaaataaatattaattaaaataataatttaataaatatttaatgtaattttatttaagttttttttttaaaaatgtataatatttaattaatttaataa

SEQ ID NO: 144510 - DNA, 553 bp, Cannabis sativa
caaaattactcaagattgatgtctgaagattctgaactaaataaaatagcacttaataaagaagaaaaaaaattaatatcaaaatttagtaaaaaacttacattttctacattagtgacaataaattcgtactactaagacattgattagtggctaaaaatgtacttttatttattttaaatgataaaataaattgaattttaattgatatattgtctgtctccatagacttcactaaacaagttttcgacattgacctaaaacaggaactccacatccctaaaaatatgtggaattcatacacaaacttaattaataggggtttcaatgggttcataagagtacgcaatgcgatagtcccagtcgtattttctattcgggggaagaaaaggagatctacgggcacacattccaagaagaatttgacagtctgtacgtggtcgtatggaagtgggagatacactttagtttcacattgaagataacattatccaagaaattcaaggtggtgaaggtgaaaataacattgtccaagaaattcaaggtggtgaag

SEQ ID NO: 144511 - DNA, 606 bp, Cannabis sativa
gctattaaattttaaaatgattattggtgtaatgaaattctaactgattcatcaaaataataataattattataataataaaacttcctctcaatttgttttcatctagggttgacccctcatttttattttactttcgacctcaaaaattatttatctataactttgtaatatatgtatatgcatatatctttacagtgctatattttattataatatatatgtcgatgaaataacattaaaatggtactttgccactattactatgggaaagtaattcccacacaatacggcgtttaaattttaaatgttaaatttttatttttttacatttacaaaggctcttagaatttaaaaatttattacttcatatacaatgttttgaaaaatagcatattttgtattaaaattgttggaaaagttgctacagaaaattaaaaggatctgttttttttatataggaaagagatgttgcataatgttttatgaataataaggaagtaatggtggataaagaaattgcttaccacaaccttacagttcctgtaatttgatttttagtcaaatacactgcacttgatatggatataaagacaatggattgat

SEQ ID NO: 144512 - DNA, 516 bp, Cannabis sativa
cgaaatctaacctgaatagctccggatgttgagtcctcatatcaaactccaattcccaagtagcttcttttacattactatttctccagagtacttaactagtgctatggttttgcttcgaaggaccttctcctttgtatacagaatttgaactggttgttcatcataagacaggtctggttgtaactccaatgcctcataactcaggatatgcattggatcagacacgtacttcctcaacatggaaacatggaatacattatgcacagctgacaatgatggaggtaaggctaaccggtaagcaacctgtccaaccttctcaaatatttcaaaaggtcctataaatctaggacttagcttgcctttctttccaaaacgcctgattcctttcattgtggacacacgcaggaaggcatgatctcccagctgaaatgtaatatcccgacgcttgggatccggataactcttctgcctgctctgagaagcaagctttcgagctttaattttgtctattgc

SEQ ID NO: 144513 - DNA, 663 bp, Cannabis sativa
ttgaaatttaaaaattacatcaagggaagatttacaacattttttgtgagtttactagcaagagggtcgcaaatgctcaacattctaatggttctttataagcaagccgttaagctgagctaatttattgaccccggttctaactattgcctcgattacataaggaccttcctagtttggattaaatactcctagagatgcatctctcgtgtttgcaaatactagtcttagcaccaagtcaccaacgttaaagagccttttcttcactttcttattgaaatatctcgtaactcagtgttggtatgttgcattggtaatttgtgactcagtacgtttctcttcaagtagatccaagacaactttaagagttcttggttttcttcttgattataaaaatctcgcctatgggtcgcaatattaacatctactggcagcattgcctctgagccaaatgccagcgagaatagagtattttctattgtcattttctcagtccttctgcgagccgaaagtacttgtggtagttcatatacccatctaccttttgtagtgtccaacttcactttgatagtattcttgaaggttttattaacaacttctacttgcctatttgtttgaggccttgagactgattaaaagctcttaatgatcttgttcctttcg

SEQ ID NO: 144514 - DNA, 704 bp, Cannabis sativa
gtagcgccatattgcagaagaaacactctcccaaactcagagatcctaggagtttcaccattccttgtactattgggagaatagaagggataaatgccttgtgtgactttggagccaacattaacttaatgcctctttcggttttcagaagattgaagttgggtgaggcaaagccaactacagtctccttgcaattggctgatcgatcactagctcatccaaggggagtcattgaggatgtgttagtaaaagttgataagttcatcttcccagctgattttattgttcttgacatggaagaagataacaacatcccaattattcatgggagaccattcttggcaattggccaagcattgattgatgttcaaaatggtgaattgaagttgcgagtgcaagatgaagaagtggtcttcaatatattaaaggcgatgacttttccaaaggcaagtgataactgtttctttgttgatctgattgatactattgtggaaaagaaaaagttgatagaagatcctttagaattgagcttaaccaaagatgagttgattgagctagaaggaatggaggagatggagtatgccaaatggctcgactcttatggccattgaataggaagtattacgaagagttgggggttatgccaaaggagcttgtgccatctatagagaaaccgccagagttagaactgaaggtgcttccta

SEQ ID NO: 144515 - DNA, 1282 bp, Cannabis sativa
  modified_base (1221)..(1236): a, c, t, g, unknown or other
atgttaatatcaggttacaggtcaattttatttaattttcaaattaatcacaaccatttaatagtgatccaatggctaaaaaaatgtaaccataatggttacaataaaaatgtaaccattgataccttctccatgtacataactatgtataaatatatatttatacaatcagtttttatatacacattatatatgtaaagactacttagcttaaatttagaaattagcagataattagagtttaattatgaaaaattagttattaattctaaattattaatttatgatgatttatttgaattctgaatgcattttatatgtcatatatataaatttcataattttgcatgtttagtgcccggcaacattggaacgcggtgtggcttattagaatcacatcttagtatttttagttaacggggcggtatagttagacattggaaatgtcgggaatagtcgggatttaagaatttcctaaagtaccccttagtgacttttagtgagttttagtgtttaaagggcaaaatggtctttttagcatgaagtgttttgtcttttgtgggttatattaatctgatttttaaagtttaattaaatggttttatttgattaaaacaagtaatgtttatctcatttcctaagaaaatcaaatttggacaaaaaacattgcatttctctcaaactctctctctcattttcaaaccccctagaccagctagggtttgcttccatttcctctcaattaaagcaagtttttgcaatattttggagtgcttaagctctaggtaagcttttgactttgtcctcttgagttttcttgaattttaagtaagcggatatgcatgttttgtggtttatgttgttgtagctgctgttaggatttgatgttgttttctggaagctagatatgttgtttaatgttaatttaagcttgtagtagtagctgaatgttgagttaaccaatctttgagttttgaaactcaagcttggctctttaatggcaagttttgattctgtgcttgtagctgtgttttattgcttgggaaatgaactttaggatgcttagaacaggtctggaaggtttcatgtggattggggttgatttggttgagatatgaaaattttggtctttcctgcactgaactggaattccggttcagaggggcctgtaagaactggaattctagttggctcccaggaattttcccagaaccggaattnnnnnnnnnnnnnnnntctaccggttggggcaattttgggaaccgtagtttttcccattttt

SEQ ID NO: 144516 - DNA, 879 bp, Cannabis sativa
  modified_base (156)..(160): a, c, t, g, unknown or other
  modified_base (340)..(348): a, c, t, g, unknown or other
tttttgtgtcattttataaccgacacaaataaattacaatttgcatctacagaaaccgacgtaaaatctttattagtcacttgaaaaccgacgaaaatacccttttttgtagtagtggagaacaaaaaatagtttttgaagtttttaaaacacaannnnngtttggttagtgttttttaaaacaatattgaccaaaagtgaattggtttttaaaacagaaaacaatattttcttattttccaaattcttattgtttgtaactttgttttctaaaaactattttcaaaaaataaggccaaaacaagctaaattgttttcaaaaaacaattttctgtttttnnnnnnnnnaaacagttttttagttatgatgtcaaacatgtacttaacctctttgatttgacagagagtaaatggctgaattaatttttggctcattgtaataggtacgttattcaattcaattatttttttttttgaaacgatccccacattgtaaaaattttggcagcataacaccatgaagatttatattattctcttagattatatatcacatattgacttattttctgaagtctagtgaattgaagagaaacataaaaatcaatgatgaaatttgacagcataagaatattagtctcttcctttccctttgattatatatcacatcaacttatttttcgaagtctagtgaatcaaaggagataggaatgactctttgcagtaaacaaaaataaaaagaactaagaagaaagaggtatctctcaaaaaaaaaagaagaagaagaaaaagagtgatgtcgagtgaatttcgcaacaccaaaaggtattatttaattaatataaaaagagaattttcagggaagtgacaagtgcgagt

SEQ ID NO: 144517 - DNA, 716 bp, Cannabis sativa
acccatgctactggacgccatatcgacacaaacaagacaaactcaagaacagcaaactctcaaaacagagagacaactacgtatcaaaagatacgacttacaatccatagacatagtatattaagcagcaaaacaaaaccaaatggtaccaatatatttaggctaggctaagcttttcggcgctctcttcctcttctcgctctaaagaaccaccaacccggcgatactgaattttctggagtaacaagacacaatttgttttcaaatcttagtaaatcatcattttctctggttcactttgaatcaagatccaagagtaacatgttagtatgcaagcatgtcagactaagctttccagtttttatattcatttggttaatctctcataaaaacattagttttcagaaactaaacaattttaaatgaagtgattctatttattggggattttgagaaataattcctagtcaaattacaccatacactgacatacacaactcactttttagcagcagtgtttttttttttttttttttgtagtcccacatggatggcgtaacaaaatgaaagaagacaaaggtgtcataaaaagagaagaagaacagtgaacaattcatacctttctcggccttttggctaagatcaagtgtagtatctgttcttatcagtttaatatctgatatgtgggccaatggcccacacgatattaaattaat

SEQ ID NO: 144518 - DNA, 685 bp, Cannabis sativa
  modified_base (225)..(226): a, c, t, g, unknown or other
aatcatatagctgtgattttcccgcttttactgggtgaaaacaatcatgtattaaacacgtctttagttgttgtatctggagatgtctcgacgaaaacatagttccagtgatctcaatagcgagctgtgaccattcttcctttaaggtcgacgatgtatgtttggtgtcgatcgcggttcttatcctcaaagaattctttgaggctcatttgaatgctatcttcnngctcgccaggattgtaagcctcgctgatgctaacgggatgaagttatatgaaatcttcttataacgagatggtcacctcgcttacttgttcttgagccaatccaacttttacacttagtgtgttcattgtatgctaacgactttcacgattgatacgtgtcactttctttggtgcctcgctattcgcatttagtgacatattgtttctcgctaatatactaagtgcccgtttgtacattgactccttgcctaagaccttacaatcagagggttacaaatatactctgatacttacgtaattaatgagttattccataagaagcaattgcatcgattcacattctctttatcataacacgtgtcccccagccgaattttatatataacaactgtgaagaatccaaacaagagaaggagtttcgggctcagatcttcgtgatactctgctacagaaaggat

SEQ ID NO: 144519 - DNA, 565 bp, Cannabis sativa
aacttagtttaacattttatagtcaaatttgttaatggatgaataccaatttagttcaaatgctaagaaataagaagcttctgtcatgaatttgaatgatatattattaatgcaatataaatagagtgactttttttgacagttataaaccgtcatttaaaataacttttttcgtctgttactattcgaaggaagtcttttcccacagttataaacactcacttaaaatgactttttccaacagttgtaaatcgttatttaaagtgacttttttcaatagttataaaccgccatttaaagttctgtatttttatggcactcacatagccaacgattataggaaccgataggaaataatataaaagacagttataaaccgaaaaaccaatttaatagtagtgctcatttacagatcgggtaattaatcactctatattaaaagattcatttagaccataataataaattaaaatatacatgataatgttttgtatcattttcaattaaattatatagtacctaatataaaattaagtatacgtgccttgcacgtagctttctctta

SEQ ID NO: 144520 - DNA, 596 bp, Cannabis sativa
aaccgtctagttcgagtttttggttcgggcttcgagttctagtctgggtctgggtccaggtctaggtcctattcctagatttaaacactgactatgggtcgggtccaagcctcgtgtgggtcccgggtccaaatctagatcctggtccaagtaaagttctaggtccttagtctgggtcctagttcgggtctcagttctaggtttgggtctaggtttgggtcttgggtcctgagtcatgggtcaatgtcccggattaaggtcagggtccttggtcccagtcttggttatcatcctagtttgagtgcaggtcccagtccttgtttggtacttgtccttgtctcgggtcttggcgttgtctgggtctaagtaacaattcagttctcaggtctcaggtccgactattgggtcccgtatcccagtctcggtcctgggtcccagtcctagtcccagtcccagtctgggtcctagcccctgtcgatgttcaggtctcagtcgttgtccttgtccgggtcccagtcctgatctcggtcctggtccaagtctcgggttccaatccgagttcatgtacgagtccgggtttgggtttgggtctgggt

SEQ ID NO: 144521 - DNA, 972 bp, Cannabis sativa
  modified_base (609)..(612): a, c, t, g, unknown or other
cttggatctggaaaggaggagagggtctgccttctcccaaatgatcaatgacctccctattccatcaaagttcaaaatgcccacttgtaagtactcgggtagtgaagacccactaaatcatgtggagaacttcaaaatccaaatggaccttcaaggaatcagggatgaccttaggtgtcgaattttccctgcaaccctcacgaacatggcacaacaattgttcactaaactaccctcagggagaatcacttcttgggatgagtttgaagggttattctatacccaattctcttcagctcgacagataccagcggagttgggtgacttggtcgccatcaagcagaagcccgatgagccactaaaagagtacattcaacgctttatgcaggaggcaaccaaagtaaaaaatcttagcgatgatggcaagcgggccgccatcatggggggcatccttgtgggaagtcggttgtggaaggatacaaggcggaaaccaacccatacaatgagaggctttcttcacagagctgatgagtttattaaattggaagaagtcgagcggaatgccaaaggcctcaatcaagctaagggaaacaagaacggagcaagcannnntggccaaggctcccagggtcaggggagtaataataaaaatggctttaacaattgaaagaggaccaacaacgataatgatggaaaccactttattaacaacaaaaagccaaacaaagcatcctcatgaatgactatgtccttctaattgatacagtcttcagccacgtgcgacattccatttgtccttgcctatgggtatgataacccatcattccaccaaaggatgacttaccaccaagtacggagtagtggaggtcatccgacctagaatatacaagttagcatgttacggtgccaacgcaacgctagtactagtgtcttgccattaaaatgcagagcacctacaaaagtactaccaat

SEQ ID NO: 144522 - DNA, 1344 bp, Cannabis sativa
  modified_base (643)..(644): a, c, t, g, unknown or other
  modified_base (707)..(708): a, c, t, g, unknown or other
  modified_base (1298)..(1308): a, c, t, g, unknown or other
ttggggcatgtaagtcagagaggacttgaggaaatgaacaggtaaggactgtataaggagaagctaacagaaaggcttgacttctgtgaagaatgtgttttggggaaggcttgtagattgaagttcaacaaggcagaacgcaccatcacagaaaggttagcttatgtccattttgacctttgggggccatctaggattccaaccaaaggtggagcacacaaattttttgagtattattgatgattacaacaggaaagtctcggtgtatttgttgaaaagtaaagatgaggttctaggaacctttgaaacatggaagaggctactagaaaaccagtttgggaacaaaattaaggtcttaagaactgacaatgaccttgagtactgcgcaaatgagtttaagggattgtgtgccacaatgggaataaagagacatagaactgtgatcaaaacccctcaacaaaatggtattgctgagaggataaatagaacattgattgagagggttaggtgcatgttactaggagctagtttggacagacctttcggggagaagcttttaaaacaacttgttatctaatcaatagatcgccatctgtgctaaacaacttcaagaccccacaagagttatggacaggtaaacccnnaaacttagatcacttgaaagtgtttggatgtattgtatttgtgcatgttagacaagataagtnncaacctagagcattgagatgcatgtttctaggataccgtgaaggggttaagggatatagagtgtggtgtttagaacttggattcaagaagtgtttcattagtagagatgttgttttcaaggaagatgaaatggccatgaaaactaagagcacttctaaagacagtgaagctggtttagatgagaatttccaaattgaggtggagcatgttgctcctacaacaccaactaatgctattccagatggaactgaggcaaaagaaagggaagacaatgtagatcagtaagaactaagcagttatcaaatagctagagatagagaaaagcccctgatcgttttggttatgctgaattcattgcatatgcacttatgattgcataagaggttggcagttcagaacccactagctttcaagaagctatgagaagtaaagatgctgctgcatggctgcaggctatccaagaagagatgcagtctcttaggaagaatagaacctggattgttgtgaagaaaccagagttctataggctagtaggttgtaaatggcttttcaagcataaagaaggttcatggtgttggaaattattttannnnnnnnnnngatctactcacaagtatgtttaagatcggaagagcg

SEQ ID NO: 144523 - DNA, 546 bp, Cannabis sativa
cctggaacgccgatcatctctggaggtattaccaatagtccaaaaatgtaaacttaggctttgttaaaagaatttgtaccgtaaagtgtatgcaacctctaaatttcaaataaagagagtgtaaatgaaaaataaaaatatggttgtaatgaggaaattggttggactccgcggcctattcaatacggggaggaagacgagggccccggcgctcttcgagtaaagcatcaagcattttcttcttttctcagaatttagcaagagcctcctcaggtttgggatagaagtcaagtttgacactctagccgttcgactgctaggccatatcgacgccatcatcaaagcgcttgacgcaatgcttgcatacgactggggtcaggagctcatccaatttagcctttttcaaggcctgatctctgaagtcccttagctccttcacctccaccgtcaagttggtcgtcggctgtaagttcgcctgatgcaactcctctaaggacttcaacttggcagccatctcgtccatagcctccctggcttcccgaagct

SEQ ID NO: 144524 - DNA, 522 bp, Cannabis sativa
ttttaaaatatggattgtgtcatattgtctcctaaaaaaatatgagttgtgtcatgttgtgctactatttttaaagagtaggcccagcacggcccgccacaacccgtaggcccgatatttttgtgtcgtaataacttagatttgttaaacatgccagcctattttcatatccattctcaaattcatgttttactttttcatatttttttttacaattaatgagtttattactaaattatatgtatattttatagtttcaattatttttatgtaatttctcaaaaatattttataaacagtcatagaaaaaaaataattaaattatttgaatttaaatatttacttataaaatcttaaacttttatatcacactatataaataaattaatatataggtttacctttatttttttaatagttttaattataaaattataatactaagtgttatatttgatttttttattattttaaattatttataattaacaaatacatatatatataattactataattatt

SEQ ID NO: 144525 - DNA, 756 bp, Cannabis sativa
gacccaagtaaatctagtcttgtcgtcaaccaaagtaagaaaatattggtggttagagtgagatggaatatgataaggaccccaaatatcacaatggatcaaatcaaatttattttcagcaaagttattatttttaacaaaagggttcttttgtttagctttaggacaaatatagcaagtagagttttcatgtattctatcaacattacactgcaatttattgcagagaagagccaatcttttgtttgaaagatggcccaatcttgagtgccaagtgtcagcagaaacggcaaagttgaaggcatgagtggtgtctttctccagaacatagagtccactacattctttacctttgccaatcactttcttgctgagagattcctggatataaaaatcattagtattgaatttaaccacaacactatcatcatgggttatacaactcacagataagatattgaacttaaaacttggaacaaacaacacattcttaaggatgatatctttagtaatttgcactgttccacactgttgcacaactaaagaatcattgttaggcagaattaatttagtgataggagctaaacatatagattgaaaaagtttaacattattacatatatgtcttgtagcacccgaatccataatccaagaatcttttgtcatgtttatagtgttatatgttagaacaataccagtgttgtttgtggaagtgctagcatcaggtgtgttttgaaccggttgctgattggctag

SEQ ID NO: 144526 - DNA, 771 bp, Cannabis sativa
cctccttaccacaaatagtctcatatagagaaataaatttgggtttcttttggataatcaaatccataagaaatcgagacgttcgtaggttctcaagctcacgacaattccaacttagagtactcatggtaattggcaggcttgcttcataagtcccgccacaaaaacattatttggaaggtcattattgtcaagatccataacctcactcatgaaacttttcgtcccaccactagtaaccacagcaagcttcctctattttaaatccacgaggtcaatactttcctcattagaaaacatcattaccccaccagagtaatcacaattaatatatctattagtattggcattaactaccataataactttaccaatcaatgtcgaagcaataacacccctctaccccccaccttcaccctcaactccactaccaaccgaacctgaaaacaccctcccttccctcatacttgcaccaccaatcgaaacactaccatcctcactccttcttcccctaccatcgacttctatcgcaaccacctcacgccaacaaagctcacattccattgtgtattagctcacataaaattcccatatggtttctccaacaagttagtcggagtaatatacatcttgtggcactttctctccgtgtgacccataatattgcatataaacaaaagactaattaggatttttgtcacttgaactttgatgtgtaccaaatcatgcccctaaacttttaaggtcgttaaaaatgccccatgaactatt

SEQ ID NO: 144527 - DNA, 1268 bp, Cannabis sativa
attgaattaatgttggactactttaaacattagaatttgtgatattttatgtttacataattattataatttgttgcatgaaagaaacgcctaaaatttttatgaactaataaaagaacataaacataccaataaaagaaactagttacattgttatcttaataaataccaattaaaaaaaacataattgttcatgctaaattctggtaaaacaaatctacacaccaccgctctttaaatttcttcatattgtcatcgttcacattatcaaacgtaagatccagcatactatgctcgatgtgctctatcacatacatcccgcaatcaccgttgtatgagacaataaaaagtaaataaataaaagtatgaaaattaaattcaagttaaataataaaaaatgaattgtaattaagttaccttgattccgtctattgtacaatgcttcggtcgatgacttttgaagtaaaagttttaacctggctctctgagacggccaattgaggcatgacgattatttcatgactctcgaataggccagactgcaacatcaaagttgggagtatcttttccaacattgccaagtgactcttcaattcattcggggaaatcgatctgaggcttgagtcaaatatgctcaacaactaacgatcaaggtctgcctctaatgtcacccaatgccttgcactatcaaagaagagggccatatatatattctctccttattcttccaactgtccaagtattggcctttatcccctcgaatcaaatccaatatgtcgtcatcccattgaaagttagtgtggtcatcacccgcagattgccaccgatcaattactcctgatgggaaaatacacgacatgatgacacatctatttgggtacaccttcggataaaattgttgtcgtctcctcatcaaatgaaatgccacatccaaatactaaaacatgaaaattaaatatgtcagagattaaataaaaaaaaagttagataaattctttaaaaccaaagacgtaaaaaagtcttaaaaacttacatcgtctccaagccatgtcttcggagtatgtagttcgaggaaccaagctaaatcgtggctaccggagaaacactctcttgtgtacttgttcccaatctggctgagaatccaactgtgaaaagtcacgagtagcttccgatcaatgactttaagtgggttcacattcacaagtgtcttcgatgccctggacttcttcttcattttagtgtactcatcgaaccacctaggccgcttt

SEQ ID NO: 144528 - DNA, 500 bp, Cannabis sativa
ttttgtgtcactaaatgtgtctaaaacctaattttgtagtagtgtcggttactatttgacgattttgtcataccttgtatggagaccatgtcttgctattggcaaggctgtgctccacctgtactctatctttgcttacatggacatgccacatcaagtagacaaaatttgagataacgcctcgtgttcaatctaattaaacaattttcacacacttaagctcaaatttttatttacatcttctaagtgtgcttgctaatcactctaggttcttcattgtatctttacatttctagagtgaattttcttgtagtcataaacacattttcatattttgttgaggtgaagttggcaccggtattgtaaacaactcagttagagtgagattggcactacaaaaattcgagtttgaggttaatagtccttggcggtgaaaactatcgtaagagatttgaaaccttggtgaaaaattcccagttgtaagggttagtcaagcccgt

SEQ ID NO: 144529 - DNA, 628 bp, Cannabis sativa
aataataataataattataatgagagatgttggtgtgtagtgatgtatatgcagaataataaatttagtttgaagccaattcagagaaactgaaaatggtgatggtctttggtcaatggttgaatgggacttgtatttgtttattttgtctaaattctactttttctttctaatttataattaatataccatttacttccaccaatacaaatttatatatatttaaagtaaacaacgtcatcatgatgtataaaatataagttacaagtactgtggtctgtgagtaataataacctaaattcaacactgtcttagcttggtctttagaagttaaaacaagtcctaacttataataattcttgtatggaaagaaggttaattttggaagggacccaattacgcgtttttttttttttttttaaatttacataatttgttaattaccttattcaacacttggactcactttaaactataccttacttggatcttgtcaccatttctctctcaatattatatctatatttataactagtaaacaccccgcgtttcgcggtggatatataaattattttaaattatatataaaaaataaattgtgtattttaattaataataattatttaat

SEQ ID NO: 144530 - DNA, 752 bp, Cannabis sativa
gaaatttaaactagattattttttaaaaaataatattttagtatcaaaatacgatcattcaaatttaatgataaaataagtaatatctgatattataattaaagtaatcagaatttcaaaattaaccataaggctatttttgtgaaaaattaaattttcaaaatttaaagcctactaacatctaaaattaattttaattaattaaaaaaattaataaaaaatttattttattctaattagatttttaattgaaaatttagattctacacaaaaacttaccaaaatttgaattttgtttcaatgaaaaatgatttttgaagaaaaaaaatgaagaatttttttttggtgcataggggtatgcaatgcatacccctgcgcgtgcggaatggcaggagtggccgagagaggaggctgcgtgcagcctctggtgaccgaggaagctcggcgtgtgcaccccttcacacagggccgtgtccgagaattctcggtcagctcatgtctgaacaggcgtgttgtttgagcgtctccctagggtccgcacgcgcacacgtgtgcacccaattgagatattttcatccaaattcaaaaaatcataacgagttcataaaaaatccaaattgaagtttgttcttcaatcatttgtattataatcaaaaactcttcaagagttatcacaacatacaatttacgaaattatattgcatagacaatcatacgtgttttttaactaataatttacttacatgtcttta

SEQ ID NO: 144531 - DNA, 643 bp, Cannabis sativa
aaaaaagtttagaaagatgaaaagaaaatagggaacaaccctaatacttacaacctctttgaagatgtgaatatgtcgtagtatttctctgtaaattttggcagagttttcttttctttccttttttcctcccttgtctcatttctttctctcttttttaaactcaattttaggatatatgttatctgatagtggagaggtgagtggtgggtaattatgagttagtggagagaaaagtggggatatattattaattaataatatatatatatatatttagctttttttagtttttttttcctgaccgattctttttttctttattattattattatatatttttatatattttttgagggcacaacattttgttgttgttgcagccaataatttatctaatatttgttcgacatcatcttcatcaatgaactccatagtctcttttatagtggactcttttggtagtattttagctttttctttgcctttgtcataatttacaaaggtagtcattgattcatatgacatatcgttttgacgatctatttgtacctcaacgttacttgctttggaaacgagctaattgaaagtttcaagttctctggagcataagtaaactgctatctcaggaatgagattttg

SEQ ID NO: 144532 - DNA, 601 bp, Cannabis sativa
atatatatatatataaataagtagcatttagtttctaatattaagaatattaaattttaaaataaaataaaaaataaatgtaatgcatctgaactctccacgtgtccatatttaagagttaacaaaagtgatagtaaccgtgtaagagaattgtaacattagatatttttgcttctaaaaataaatattaagtatttaagtgtataaaatctaaaacattaaatatttatgccgtaattttttattattattataattaagtgctctaaaatataaatgtaatagtaaaaagcaaaatatttaactttacttctctactatcatattcatattaccggtatcaattatgtacaatgtaagggttagaattatctactatctagtttgtaggatctcttttggtgtatgcctcaaattaattgagatatttacttaattaaatataaaaaattattacttaattaatattatattaaattaagaaataatgtgtattaaataactatgtatataattatatgtgtttggaagtaattgtgtaattactaggtagggtaattactaagatggtaattacactatattttaaaatgcaaggtgt

SEQ ID NO: 144533 - DNA, 556 bp, Cannabis sativa
taaaatataaaataattataaaaaaaatagtaacatactaaattataattgatatattaaattttgttgtatttgaaaatttatttttttttttcaataaattaagtggaaaagaaactaaaacgttacttttaattttagtcattttttctgataatagtaaaagaaaaaatatgtgcttctcatatgttaaaacgattgcattaaaaaagtagataatgatggtataattttttttagcttaaataattactagtgcgactaaaaaaaactttttattttttttttaaaaaagaaataaaaatagaagagagaaagtttttataatattaaaaaaaataattaatattttaatatttgtgtgtttcatatttaacaaataaaaaaagagcaataaacaaaagaaagacaagaacaaggaagcaattagtctatttgtgttgatgtgctgctcattttttagagtgtatacacgtgttttaaaaagaaataaaatgcaaaggtattatgattgaaataaaaaaaaaaaaaaagtggtaatcatggtattaatttt

SEQ ID NO: 144534 - DNA, 1045 bp, Cannabis sativa
  modified_base (748)..(751): a, c, t, g, unknown or other
cagcaaagtctgctaagctgcgaggagaaattaataatttctgtcaactggacaatgaatctctccatgaggcttgggagaggttcaaggatctcataaggatgtgtcctcatcatggtcttgagaagtgtatgctggtccacaacttctacaacgggctggttggtaaaactagaacacttatagatgtcgcagctggcaaggcatttatgaggaaaattgcaaatgaggcctatgaactgctacaagagatggccctgaaaaatgagcaatggccaactgaaaggacaaagaaggcggctggtatgcatgaggttgatgccataacaaaactgttagcccaggtaggggccctaacaaaattgatagatgtgcaggcaaaataggctcaagttgtttgtgagctctgtggaggcccccacccctatgaggaatgcccggttgatatgaatattttgccaatggatgaagcaaaagccattgggaattattctcaaaacaacaactttgggttcaatcaaggagggggtcgaaggaatagtgggttctatcagaaaagaaattagaaccaaacgcaaaaccagcaacaatcacaacaacaaggctctagtgggagttctagtcttcagagagatttattgctacagtttatgacggagactagatcatccattaaaggcttacagactcagatgggccagttggcaactcagataacaacctatcctcaggggaacttgcctagtannnnagaggtcaatccaaaagaaaactggaaggcaattaccctgagaagtgggaagaagtatgaagggccggatgcggcacaaccagtggaagaagagattcaggatcaaccggcaccgatatcaacagaaaagaagactactgaaagtcttgcaccaaaacaagtgtctccaccagttagtacagatcaccatgtgaagatcatgtacctgcaaagactccaaaagactaatctagacaagtagttttcaaaatttctagaggtctttaaaaggttgcacatcaacattccttttgc

SEQ ID NO: 144535 - DNA, 1300 bp, Cannabis sativa
tatatatatatgtagatatatagatcaagtaatatagtcaattttcacgcgactaatttaatttttctaatacgataataaaaatgtaattccaatatataattatattaaaattatattatctaattctatattattaatttttattttttattaataagtttaaaacttatacaattaatccatatatatatagaattttaaatttttttgtttgttttttttttaaatattattataaaaataaataaatatgatggtgtaagaaaaaaatgaagtgttctctataatatattatttttatattccgatccttttaagttattgtcactattaaatctcactcgttatcatattatcgtatctcacttgttgtctcagcgtatcttacctattatcattactgtagctcacttgtagtcgtcattactctccttcccaaatcttaatattaatcttaaattctattttaaatatcaccgctttatgtctcaattttatataaatatctaaatttatatagatatataaattaatactcattcaatctaattatatattatacatttttaatagagtaaacaaataatattcaaataatatagtttagaaattataaaattataaatagtctaatatatgtacaaattattaataataaaaataataaatgaagaaggaaaaaattatataaaattgaaaagaaaaaaataaaaataccttgtgataaaataatatttttaaaaaaaaaaaataactaacaattttttatgtaattaccatttgaaaaaaaacatctaccactaagagaataatataaatatcgtacaaaaatataataatgaataaaataattaaaataattatactataaaaaaatctatcatccctctacttttccatatagataataataaaaaaaaaaaatgaaaagtataaaatagtgaataattcaatttatatttatgaaggatataatttttacaaaaataaaataaaatatacatattaataaaaatattatctagatcaattaaaaaaaatacatatagatactactaaaaaaatacatatttggttgatgttctttcatactttcatgaatgttcttcaaattttttttttttaacaaaaaggataaaatttttagtaaaagcaattataaagtaagaatggttatcacatatatattgacagattttttaaagggtttttttcataaatatacaacaaaaacaatataattataaaaaatgtgcaaaaaaaaattattttaaaaacttatatattttgaaaactt

SEQ ID NO: 144536 - DNA, 1053 bp, Cannabis sativa
ttttttttttcaatttgcttacaccagatttctatgatgtctatagagcacaaaaccactctctatctacacttgaaagtttctttggcaagaaactttgaacccaagtctttagactccatttcacctcttcaatcaaccgattggtgtcagcttgcaccccctgccacaacacgacatttctcattttccaggcagcatataccattgctgcaaccgcagcactgtagacagctatcttgaatcttgatacttttgccctcccaatccacttaactagatgctgaatattgtaagtgacagcattccaattcagccatgacttgatctctatcaagcattggttggttatcctgcattcaaaaaatagatggtgtatactctcattacagtcagcacacaaattacatgtctcttgaatctttatacccattctgagtagtcggtctttggtctttagcttattcaacatcacaagccaaagtatcttagagtgcttgggtgtattcagtcttgaccatacttctttgctccaatgtattttcggttttggggtgctgaacatcttgtagcctgccttgatagcatatttatccctgtgaaaatcagcaataacattcaaagataagatctggtttttaagagctacaagtctcttcaaataccaactcgaatggatagaggcattgtatctccaccagctttgacctttgatgtatacactattcacccacctcagccataagctctcttgtttgtttgaaattgcccaaatatacttggacatagcagccttgttccaagtttcaagtttagtaatgcctaaaacccccagtagctttaggttgacatacattgtcccaggccacagcacctgctccatgaaacattgcttggcctttccataagaaagctctacagatagcttctatggaattcaggattcttttgggcatgattatgatttgactccagtatgcctgaatggtaatcaaaactgagttgataagtgttgttctcccagcaaaagataggttccttgagctccaggtt

SEQ ID NO: 144537 - DNA, 638 bp, Cannabis sativa
  modified_base (58)..(61): a, c, t, g, unknown or other
  modified_base (599)..(600): a, c, t, g, unknown or other
taatgataatttataattagccataatttttttatctttagtcacaaattttgttgtnnnnaaaagtaagattttttatagtgtaccttgattaatgcttaataatgtatataaagaaaattagaaattctactgaaaaataatgacatataaaaatgctatacataaaagtatagttagatttatactgactaaattgaagcataactcttattaatacttttattttagagcaatgttattaggtaccattggtatctagcacctttagacatgtcgtcttgcgattcactagcgatattctttaaaagttattacatatgagatctgatacttaccaatagcgatattgacacaggcactactagtaccttttagcatttctcttttattttactagtaattaaccttcaaaactcaaattttaatagcaaaattcccaaaaaccgagttcagttagcatttattgttcacatgacacaatttacacatgtcacaatattattagcccacgtaaataaattaattaggattttttccccgaactttgatatgtaccaaatcatgcccccgaattgagattgttgaatttaaggacnnttgtccaattttagtaaaaaaatctaacatggatgaaa

SEQ ID NO: 144538 - DNA, 505 bp, Cannabis sativa
taataaaattggcttttgttgtctgaataatttacttgatagaaatgtgcattgaaatgttatctttccccactgttaatgagatttgtattgtttatttttaaacaattttgaacgacaaagaataattgttgtttggaaatttcttgttggttgctttttcaaaagttaacattaacttttgttaatgtttccttagatgttttaaaagtttaaagatattgaatgttgcctttagccattgtgagattttgtattgtttgtccaaacggttttgaatccaccgacggttgctttttgaagtattaaaattaacttttcatgactttaaaatttaattgatagatagttgcctcctctttaaagaagccataggtactctttcagaatttgttgtttgtttctattttaaacaattaatttggtttttgttactataaaaatttactagatagacagttgtctcatacttactcttttagaatttgtcgctgcttcccatttg

SEQ ID NO: 144539 - DNA, 674 bp, Cannabis sativa
  modified_base (47)..(47): a, c, t, g, unknown or other
accctaagtgatttgtgtgactttttagtatgggcaagggcattatngtctttttgccttttgagttttgtctttagtgaaggtttaatatttagttttaaatctgatttttttagcttggtttggctgaaataatgtattaaattaaggaaaacaatcattttctcatttttatgaaaaattagaaaagttaagcaaatcttgcatttttcactctcaaactctttctttctctctttcggcctagagcagctagggttgggggattccttgtgtgttttcaagctgattttaacaaggttctagtgatctcaactcttggtaagtctcttgctttttgttcttgatttcttgggttttaagggaatggagttttgcatgttttgagttgtacttgctgtagttgttgtagttgtttattgttgaattcagaggcttgattatgagttttcatgttgatttatgcttggtttagtggctgttatgttgttggggcaagctttggagttttgaactcaagcttggctcattagtgacaagtttagtttttgtgaatgttgtttgtgttgaggatgttttttgcagttatactatgattatttaaggtaatttaagcaagttttgatgcatgttagtgggatttaaccaaccttgagttttgaactcaaagcttg

SEQ ID NO: 144540 - DNA, 1084 bp, Cannabis sativa
  modified_base (970)..(970): a, c, t, g, unknown or other
  modified_base (1052)..(1055): a, c, t, g, unknown or other
aaaggaaagagtaagcaagttcaatcaaaacatagacattacctgtgctctgtgtggcaaaggtgatgaaaccattgagcatctgttttttcagtgtgattatagctcagaatgcttgcaagagatcaaagtgtctctgcaatggaacacaccagcaggggatatcttcaagcggctacaaccctgtcatcaaacaaaaaagttttctgcagctaagaagagcatggtgaatacagttgtggctagccttgtgtatcacatatggaaagtaagaaatgaagtactttggaaccaccaacaatggctcactagcagaacagggaagcaagccaagcagctaagtaagctgagaatccaagcttggccgcctaaaaagcaaggagagaagacacagaatggatactagaaacttaaactgtacatgattattttgggtgatagtattgctgtgtaaaaatgtgatgtaaactgtgatgtaagtttggttatgagcaataaaattctcttattcatcaaaaaaaaaattacgttaacttatatatactaggtgagtttccatgtgcaattgcacgtgttaaactcttcatttgattttttttattttcatttttactgtattattaattgtgataaaatataaaatgtgaaattaagatttaatatttgaaaatgaagtaaaaagtgtaaatatatattatattatacaataataattacaagctagttaattaatgctaagcgttttaattacatatataacgtgtcctatataagatgcttattatttaaatatattttacatagtatttataatatttgtacataatttatatatttatttatattattttgtagatacttcaagtatcattcgtagtatttgaagtgcttgattcactatcactttcgagcagtgagataacgttgtatttggtttgactcccaccactatatgcatccgctcttgctnttaagtaaataaaaaatttactcgttgcagaaagccttgccactaataatatgttttgatcatgttattgttgggttttatnnnntaaataaaactctttacaatctaattagt

SEQ ID NO: 144541 - DNA, 542 bp, Cannabis sativa
agatttcacacaccgggaagctgctagtagcattctcgcgcatgcatggctctgtttttagacaaattttgtccccctgaccaagaaaactcggacatgcagcatgtccaaactgcgtgcacctgagaaactaggggtatccgcgcgcgtaaggagttgtcacaccttctgatttttttttttattttcaaaaattcataattaattcaaataaaataaaaattaagttctataaaaaaaaatgaattgcttaatgttttccatagtatccaacaaaaataatttgagaacaaaattctaataattttatgtaaaaattttgcaaacatcaaacaatcatcaataaacacatagatcaacttgaatcacatccaaatcacacatatatcgttttaaatccatatttcttgaaaataaaccaattaccatggctatcaggcccgttgttggaatatattttaccaggacctaaatttactaacaagtatgtttttaacaccctaaatatgaacttcttaaacgatgaaaattaaacacatata

SEQ ID NO: 144542 - DNA, 544 bp, Cannabis sativa
taatgtacacggaatacgttccgtgaaagtacatatcacaggacaaaatcgtgtccatatatatacatataattaagagtatatatatttctacaagaattgtatgggagtcgtccttgtagggactttccgaatgaccgtacacatgtgtgtatagtaaaatgagttgtcctaattaattgtatacatatacagatctgcagaatattttcattggtttttatgtataatatttatttacttttactatttctcactttgtaagtccacttgaccacgaatatttatattagtgttgaatatgaatttgccgcttgtggaaaacatggaatttattttataaagtgaaaaaatttacggaattttgcctatatagtatataggaatgttctcatcaattttttataatgagagataaagtagcactaattaacaggtcccattcatttcttggtttgtttgaataatggaatattgatcaattaattacttcaacttgatataaaaatatatatatataaacttcgaatagttatatatatat

SEQ ID NO: 144543 - DNA, 765 bp, Cannabis sativa
taaaattgtgtcacgtgtacactgggtacacgtagacattccaccatggcagctaacagctaaaaatagatggaaatgttaaactgctaacataaaaggagtttaggagattttacaactaaaattttaaaattgggagttagttacaaaaacctgaccacttaaagaagttatgccgcaaattactctatagtatatatttattttcattatttatttatttatctttttgaacaaaaggagctttattcaaaacaagcaatgcaatacaaaacaaaggctcaacgagccaacaggaaagcaaacacggcagcagccaaaagacagagctaccagcccctaattacatcaataatgtatttatcctgctttttaagggcggtactagtcatacttaagattctagattgagaagtacaaactaaatcaaatatacaaccatttctatttttccacaacaagtagatcgctccttcaaaaatagtgtttatcactcggttcttgaaatgaaggggccccggatacaccaatgctgatgtgctcagcatcaatcggccaatccgcagaacccaaccatcttcctatttcagcaaaagttttcctagcaaacacactgtcaaagaagagatgggagtgtgtttctatgtcactctcacaaaccgggcaaatgttcgagagtaaactcagaaacttgctcaattgatctcgggtgaggagttgagcatttctagcctgccaaagaataaacctgtgttttggaacaat

SEQ ID NO: 144544 - DNA, 1271 bp, Cannabis sativa
caacatctccggatggttttagcataggcttcgagaacataagttgtatgccaaattcaagaagtgcgaattttggctatctcaggtgtccttccttgggaacattgttagcaaatccgggatcaaggtggatccggagaagataaaattcatcaaggattggtcgagactgaaaacaattaagtgaatccaagctagggttctagattttctttgcaattcttgtcaatatctagcagctttaagtgaatccaagctaaggtaagtctctaagcaactccctcattagttttcctgagtttcaagttatggattttgcatgttttgtggtttttgctactgttgttgctgtgggtattttatttttgtttttgaagtaaaaataagtttagatatgctgaattaagcctgttttgtgggctgttattagatttttgagcaagctttgagttttagaactcaagcttggctctttaatggtgaaaattgattttgagtttctgtagtttatttattgcttggaatatgtctattgggatataatatgcaggtgtggaaggtttggtaaggattggaatcaatttggtaaggttttggaattttttgggtttttctggtgtaaaccggcaacccagttttacaggacctgtaaaaccggttacccgaattttctgctgggttccccgaaaaattcgtgttagttttagagctttggttggtcaattccctgctagtttagggtattgccatgttaggttacagtagataggttttttcagtttattacctaagtcccatgttgtgatttagcgtgtcacttatccatgttgtgatcgatgtgatttaggggcctgtaatctccgagcagttgttccactcaggttggccgacacacctgaattcggaattaaggtaagattgctataatgtcatgcatatgttattacatgtttagcatacatgttgtctatgcttgttagaatacattgatatcatagtatacttagagttgtactgattactggtaaatatatgttggctaaaatactgatcgatgttaccacatcaatatgactacagttcgactggcgtattgagtataggctgacattatggtcgatagtattgtcgtatgaacgttctagactcagtaccgtgtgggacactgggatagggttatgggtcggtgtatgggcgcctgattataacctaggatattattatgttttatgttatgcttttcttattgagtctgtcgactcacattgcta

SEQ ID NO: 144545 - DNA, 542 bp, Cannabis sativa
aaaataaattccaacagctttgtctactacagaagctgaatacatagttgtaactgaagcttgtaaagaatctttatggatgaaaaagtttcttcaagagttgtgcttgcaacaagaaagatacattgtcaactgtgacggtcagagtgccattcacctctccaaaaattcaactttccattcaagatccaagcatatgtatgttagatatcattggattcgtgatgtgcttgagatgaaagaattgcacttagaaaaggtgcataccaatgagaatggttccaatatgttgacaaaggctttgcttaaagagaagctcaaagtttgtaggcgaagagcgggcttagtagagcccaccaactgaggcagagggggagatttgttgggtccgcccctttattggtgggcttggaccaataagggcttaaggcccatcttgtttaaatcaattaaaaaaatgagaaagagactaatacagtttccactgaaggtgatgttgtcattgtatgtgatgatgggtgtgttagtcttgctacccaaga

SEQ ID NO: 144546 - DNA, 794 bp, Cannabis sativa
aacaaaattagataattatttttctatagaaaaattaatttaaattatcaaggaaaaaaaacattaaccaccattgaaaattgaggatgtcataaccttcatcttttaccggcagttgaaaattagtataagataaaaaaaaaaaattattagttgttgtagagttgtaaacacgttgtatgcgttcatttattttgaaaatatgttggctttgtgttgtttttacattaaattttagttgttaaaattcaaaaatttcttaaattttaattattacgtaactattgtaattttttcaatctatataaatatatatattgaaggcaaaaaaatataaacaaacattaactattacaattaaactaatacttgatcataaactttagtaattttttgttataattgttaacatgtatttaacaactatataaacaacatgaaagcaacgtgtttaaaaaattgatgaaatcaaacaacgtgaatacaactttacaacaactataaagcaacaaacaatgttactacaaaatattgattttcgattgcatgtaaagcatgagacttctatcatactttatttttaatagtgagtagagctttttaacttgataatatagttgtatgtgtgttgttgcatattaataatgtagttgtatctgtcgtttaaattatgtagttattttgttagtttactacaattttgcgaaaaaaattaattaaatatacaacaaaaatacaactacaaaacaacactaagggtgtgtttggaaagccacaatgtaattggatttgtg

SEQ ID NO: 144547 - DNA, 698 bp, Cannabis sativa
ttccagtcccgagacccagccaggagactctgcagataatcaagcttctgttcaagctctttaacagttacatcgagcttaccaaattgggatcgattccaattcaggagagccaccctggtggcgccaacttttttgaaaattctcgccagggcctaattgtgattaaccgacttccaagcattggccaccaccagattgcttctagggtcccgagtccatccttcctcaaatttaaagaaccttttaaccttggtcgccggaccatctgatagaaggcataagggcctatggtcagaattactagtctgggttgagcaaaggatagccctagggaataagttcagccaggctccattgactaaacctttatccaaagcagatttcacatgaagcctcccagaccgatggttatcccaggtcaagttgtccccttgaattgacataataataagacctctggtgtccataagattagagatgatcgggataaaagggtcacggccagacgagccttcccttttagaggcattaagaacaaaatttgtgtcccccaagataagccaaggccccccaaatctatcaccaattttcaagaactcagaccagaattttttcttagcatgaaggtatgggggaccataaacacacgaaaggaaccaagggtgggaagcgggatccgaatacactatccccga

SEQ ID NO: 144548 - DNA, 819 bp, Cannabis sativa
agttgtttgatccctttctcgtcacaaaggtttgatcaaggcgttataacgattcgacccctcttccgtcgaaaaggtttggttaaggaattataatagtttgacccctcttctgtcaaaaaggtttggttgaggcccttttaaaaagtttcaaaaaattttatttttttttgaaactatgggtttgcattgtactatgtatttccagatcaattccggttaatcatacatatatgcccctcaagtaattttaaagtattaacgctttgtaattacttttttgaaagaaatgattatattattcacaactggaattcaaaatatttcatcagtaatgtgatttataatcattaatctcaaaagaacttccccagttcaattgcttattttatcaatcttccaggagcatctggttttgataaaacggattttgatgtccaaggtcaatccccaacgttctcccacaactgtttcaatattcaaggtcgatttctgacatataccggggttctaggtagagtaattctggttttagttctgtcttcaactgccactagttgacgtccagttatggtaaccatagcgagacaatatctactccggtcgcaattcttttacaagtttgttttaccggagtaactgccccttgtattcttgcgacccgctccctcttgagataaccaaagtgtcccttcttctcgtagaagagggctataatctttcatcgctcgagttattgggcagatcgaactgatcataggcatcttcctgcccctttatatatccttgaaggtatccttgcgatatgagactttctat

SEQ ID NO: 144549 - DNA, 541 bp, Cannabis sativa
agcccgggagtaagtgtaagccaacttcaaaccggcctgcacaaaggaaaaaagtcagcatatggagctaagtgtgaaaagtaaaaagggaagcgtccaaaaagacttaccctggtgagctcgttcaagactccgcccaccaacacatgcagagatgagtcgttgtcagcaccagccagttgctcactgacctcaggaaccaaccggttcatgtagtgagccagcatctccttgccctttttggcctcaggcaggacgggcacaggtggagttggttcctgcacccgctcagggaccctcctgaccagtttggacctagttgttggtggcccagactccttagacttggcagatttgggagtagaaggatttgcagcagtcagctcctcagaaaggtcaataacctctccagaaggtctcttctcaaaagacccctctccgccctagagcttccgcccatcctcttcctcagagcgtcaagcatctgccgagacatgtctgcacagaacaaaaacaacgtggttagaaaaaaccagcagaa

SEQ ID NO: 144550 - DNA, 926 bp, Cannabis sativa
ttatggaattatattattatacaacttattatatgtgaattaaattgggaaatgacatgataagaccccgttggtgagccaagggcattatcgtagttttgacccgagaggggtaaaactgtaaattgaatttaattgcgtgcttatggactatattattatatagtatacttgttgtgtcctttttcaggtgttttctgacaagtcggcgcggtatagtcacaatcgggtatttcgagccgaaccgggttcggggccgtaatacattttcgggattttatattggcattttatggttgagtgaataacttgaaatttatttgactatgtatgtgatgaaaatgacatttttgcccttgatttatgtatatgtcatatataggccctaggggcatttttgtcatttgacccattagttagtaatcatcaaaaagggaattttgacaaaatgagaaattcattttctggtttgtttagccctagctgaacccctttttctcttcctaattcatcattttcaaattttgctttaatcttgaaatcttgcttggaatggagttaattgttggggatggaagcttgtgggtgatggtaagcttcaaactttgctactcttgagtttaattctaagttttgttgttgaattgatgattagaaaagcatgtctttgggtattgagtgttcttggatgcatgtggattagagtttataaatgattattttgttgtttgaacttgtttaattgtgggctatgcatctttatttattagtgagttttaaaggttgttttcagaggtagaaagtctgatcttttcaaccctatttattgttgtttggatgagtaaagattgttgtgatattcaagctcttgattatgtggttgagttgaattttgctcaagtgttgagcttgtttggattattgtt

SEQ ID NO: 144551 - DNA, 1551 bp, Cannabis sativa
  modified_base (308)..(311): a, c, t, g, unknown or other
  modified_base (1263)..(1263): a, c, t, g, unknown or other
ggatgggtcgaacttaaattaataaactcttatgctataattttagcataggtaaaattgtgtttttgcatttattttaatattttaaaggtgaaatttttgcttaacaaaaataaataaaacaaaataactcaaacaaattacaattaaaatagaaccagttctataacaatgttataatgaatgaaaataaataacacggaataactcaaagtttataactaaaatatgaactggttatataacataataaattattatttttgagatagatatggtatgagtataattatttggtgggttggagnnnnttgaatggatgtttttgtttgagctattttatttaactgatttttatctgtgagtttttatcttagttgctttacggaaccaatttttttgtcttaaatttttaactagttaataaatataattggtttctttatattatatttgagttattgtgtgttattatatgtttttattattttgttatggaatttgttctttttatatttatgtctcaatattttttgaaattgatctccatttttttgaaaaaaaaatataatcagttttatgagatattatgtgttatgaagttttttttattgtaaaactagttttgtttttaatttatatttcagtgttttaagaactgatttctctttttattttttaattgtaatcgatttaaattattgcgcgttacttgtttgtattcattatgttatataaccggttctatattagttacaactagttttgagttatttcttgttattggtttttattcattataacactgttatagaaccgattctattttaattataactggttggagttattttatgttatttattatgttacagaatcagttatatttcaattataactggtttgaattattagtttttatttatagaaccggttatatttttagttatatctgagacatctacttctggtgacttttttagcgacggtaaattttttggtgacttttccggcgatagtaatttttctagtgactttgccgacaacttttccggtgacattaacttttcttgtgatttttccagctccggtagcggtgactttttcagctaaacttattgttgttttacaagtatgggatttccactttttttttacaaaaatatggcataaaaaagctcatataattgtaaaaaaaaaaattaaaaacaaatcccataacccttttgtattatgtatttgttaacgcaaattttcgttaantaaatttgagcctcacagtaatgaattcacacaggaaaaaataaaagctatagaaataaaaatatgaacacagggtttttacgtggttttgcagttaaaattctgcatagtccatgagtcaatcttattcagatttctgattattttttagggcctctcttgtatgagttttttttcatcctttttttgatattgtctgctactatttataattacatagtggtcagtaaattacaaagttgactgcaatatgtttacaacaatcatccctaaaatcatgggatttga

SEQ ID NO: 144552 - DNA, 773 bp, Cannabis sativa
aagctatgtgcagacagtctttctcgagtttataggcttcccctctcatcctttgcttaggaagatgacttaatggtttgtccctagtggcattttcgtaaagataagtttgtaaccaattctaggtttttcttatcttaaatgccttgtactgttttcattcgaacttaatataattgtgttttcatgcatttttattcacagtgtaaacaactatattttaatcaaacgtatattacttctggatgtttccattgttcgtaatcttcctgtttaagtagttagtagtctacaaaacttttcgattttcgagaagttgtcaattctgcctcgttgtagcagtaataatctgccttaagcaaactttatatactttaatggttttatcactttgtatattttcaatctgctcatatgaataattatattatctatccattttctatgtataagtacttttaaccagacattgtgatgcctcgttttgtactttcctagcttgcgagaactgttagtattcaatcttatacgcgagttgtaacttttgattttcctttcccgtcggataggttataaatcaaaaattatagttgtttgatcccttcttcgtcaaaaaggcttgatcaaggtgttataacgattcgactcctttctcgtcaaaaaggtttattcaggaagttataacggttcgactccacttttgtcaaagaggtttagtcgagaacctttaaatttaaaaaaaaaagtttaaatgacgggtttgcattatacaa

SEQ ID NO: 144553 - DNA, 640 bp, Cannabis sativa
  modified_base (184)..(188): a, c, t, g, unknown or other
  modified_base (599)..(615): a, c, t, g, unknown or other
attcagcgagcacatcagaagaagacatgtgtctagctgggaagaatgaagatctcaaacacgcaatcgtgagtacacttgacgtggataactcgttacaagcacaatttgtcgagtatatttataactcagctagctagacagtcttatgcgagataaaaatgtactaactgttgacttgtgnnnnnacgagaaaccatgtaaatgcaagtgtgcatgacgaggcattaaccttgtcgcgtgggggagatataataacaatacttattgtatataacacggtatacaaactaagtataagcagaggggtaggtcaaggtgacagatagcgaagcgtctatcttgttctaagatggcacacacgaaagaaagatcatctcgacactcgaaactataattgtcagaattaaagtaaaatcaatatcaacctcgggaagttgtatgacgagctctggcttgccatcaaagttaactcagtgaggcatccccatgggataaggcttacctcatatctttaatgtgcgttcatctctactcaataaaagcgagacattcacagctgtgtgaattctaaataaaaactgttggaatttattttnnnnnnnnnnnnnnnnnactcacaagtatgttatttaacacc

SEQ ID NO: 144554 - DNA, 645 bp, Cannabis sativa
attcatgcattaaacaacataaaagtccatatctaaacctcagaacacaacagcaactcaccacagcagctacaacaagctaaataatatttcacttataaaaaccaaagctttgagtttaaaattctaaacttggttaaatcaaactaacatgcatcaaaacatgttctaatccactcaattaaacatatttaagctttagaaaacaacaataaacaacaacagcagccacagccacacaatcatcaaacatgcaaaaatactcatttttcttaaacttcaagaaataaagaagagattgatcaaagattacctcaacttgaattacactaaaacttgttgaaaacttgctgaattgaggaacaaaaatcaaaccctagcagccctaaggattttcgagagagagaaagagagcttgagagaggaagaaatgtgattttctcaacttttctaatttttttttcttgaataaaatgaaataaagatgatttccccttattttgcttcagccaaaccatgctagaaaaatcagattatcaacataattaaaatccataaaagacaaattacaaatgggcaaaatgacctttttgccctcacacactaagttgacataaaaaggggtactaaggggtaatttgggaa

SEQ ID NO: 144555 - DNA, 979 bp, Cannabis sativa
  modified_base (62)..(68): a, c, t, g, unknown or other
  modified_base (358)..(360): a, c, t, g, unknown or other
gatccatgacattctcttcaaatccaaaggaagagatgacatcatgaaattttaaataccannnnnnngatgcttgttttaatccatagatagacttcttgagcctgcataccaaatcttgaccttcattagaggagaatccttcaagttgtttcatgtatacctcctcctccagatcaccattcaaaaaagaagttttcacatccatctactacagctctaaatcaaaatgagcaactattgcgaagatgactctgatagaatttttctttgatagaaaaagtcttcgtacagtcaattctttcttcttgtgtgaatccttttgcaacaagtctcgctttgtatctctcagtgttgnnnaatgagtcttttttagttttatagacccatttacatccaatggctctcaccccattaggaaactttataacaagtttccaaactttgttacacttcatagtattcatttcattatccatggtattgtaccacaattttgatttgctactgttcatagcttgtaaaaatgtttatggatgatttccaattccaatatcagattctaataaatacaaaacatagcctttgtaaatctttggtttaacaggtctagaagatcttcataagacttcaccaacaagatcttggggagcagtagttggttcagtaggttgtgcaatagttgtcggaaactcttgaacatcttcatctactataatataattaccaccttgtggatcttcaatgattggtaatgattgttcaacatctgtttgaattacaggggtgttgaccattatcagtcttacttttgaggtggagggttccaaaggatctttctcgggacctaagtcctttgattgatcactcccactgaccaaggaattttaagaaattttgcattccttgattccacaatcttgtgctatgagatggacaataaaacttgtaacctttagacttttcagcgtaccctata

SEQ ID NO: 144556 - DNA, 1048 bp, Cannabis sativa
aataaatgccatataagggtggtacacttaaaacagccatatttttatcaaacttttttgtagaatctcatattttgtgtaattttcacataaatattgtccacaatctaaaagcaatgtaaaaataatacaaaaacatgcaaattaaacaaacatcaacacactgcgtaaactcaaaaaaaaaaatacaaataatcacaaaaataaaaaataaaaaagcaactataaaacacttgaacaccaactcaaaaacatacgtacctatggaaaacaaaatatatactaattttttcttagttgaacaactaaataacaattagataacaattctaatttaatatgaaaaattattagaaatcaacaaattgtgttaacttaaaacacacacacacaaataaataatctaagtaaattaaaataaacttaaaagtaactacaaatcacttgtacaataactcaaaaaagtatgtacccaagaaaaactaaatgtatacttatttagtacaatgtgatttgatattttattttagttatattttaggattattttataaatactaataaatcacaaaagtttacattttacagacttatagtttttttacaaaaatacgaaaaagttgtttttatgtaaacttcataacaacttcataaacatttaccagtaaatatatatatttttttcttacttaaacaactaaataacaaccaacaaacatcttcatcacaattttactataatataaaaattaaataggaatcaaaacaactccacaagttgcataaactctaaaaaaaaaaaaaatctatgtacgccgacttaaaaatatatttaccagtaaaaaataaacatatactcattttctcttagttgaacaactaaataacaacaaataaacaacttaataacaacccactttaaactaaaaattaattaggcatcagcacatggcgccaacttcaaaaataaataaaaacaaaacacaaataaagaaacatgaatatagtatattctttttttcttggttaaataacttaataacaacaa

SEQ ID NO: 144557 - DNA, 692 bp, Cannabis sativa
gcattgtgaagatggagaggtgttcatgggacagtctgcaatagaagcattggtcacaaatgaagtaccttcaacatgacaaacaataaaacttggataagagacttgagagtccaaaaatatggtaaagtgatatttggcaatgactaaacttgtccaattgaaagaattagaaatgccatctttagaatgaatgatgggacaatgcaagaaacaacgtgccagaacttgcacgaaaatttgatttgaggtggaaattatgagtcagctcattcccttagccaattttgccacatgttcatgctaccataattgatttcatttttgggcccaattaaagttgtttttcttacatttgacccatttgaaaattggtttcttcacttgaacttttgctatgtcaaaaaaacaaattgccacaaaattttttgggtatctacgttttggtacttgtaatatgtttagaagtatatgtactctattatacaataataaatcaagggtataaacattatttaaaaagtgcaaaaaaaattacattttaattattcaacgtcacgaaagctctattggataaggtattgtacaatttataaataaattgtttgacgatattgcaagagtgtctaaaataatattttcattataaaatctcaaatatataattaatctttaaattaaattgtagctaa

SEQ ID NO: 144558 - DNA, 884 bp, Cannabis sativa
  modified_base (31)..(58): a, c, t, g, unknown or other
taacattttgttgtgactaaaaatcatattnnnnnnnnnnnnnnnnnnnnnnnnnnnnaaaaattatcactaaaagtagcagtttttgtagtgagtattgatacttatatattttaatttaattattaggctagtttattagaacttttgtctcccaaattttggcatgtatcaaattatattccctaaacttttaagactttaaaaattctccttgaactattgagattgttgaatttaagggtactattgtccaattttagtaaaaaaatgtctaacatggataaaaattcagggaatataatttggcacatgtcaaagttcaagtagtataatttattagatatcaaagtctgtgaaacataatttagtacttgcacaatcacaaaataagtgaaattgaatgaaattggacaaaagtcttaaatctaacaatctcaatattttaggagaaattttgaatggtcagaaaagttcagaggatatgatttggtacctgtcaaaaatcaggagacaaaaatcttaattagcctaattattattataaaaatcgttaattatttgcaagacacaatatcataagggcttggttggtaggtcacataaatatcacattgtattaaataagaaggaacacaatatatttggataaaactttgtattgtattaattactataatcacaaattttaataaaatacaaatcgtattatttaatacataagttcgaatttgtagtaaaaataataaattttacaaacctatttttttttaaactaagagagggcttaggcagggagatccaatgtcgccattgttatttgtgctaggcatggaatactttagtagaataatgaggaaggttgggaagaaaaaagaatttgg

SEQ ID NO: 144559 - DNA, 543 bp, Cannabis sativa
gtgaaaaacaaaaggaatattagcagctaaaccactcaaactttatgttttgtaacatttaaccacataaatttaatttttgacggcaaaacttacggaacccccatttcgttttgctctgtatccctccgtccaaaaatcacagttaagtgccatagtagactgtccacgtgtacacacttgtacacatggcacgtttttagtggtccatgtaatattaatttctaaaatataatgaaatttaatttaaaagttataaaaattaaaaaataaataaattatataaaaaaaatattttattttattttatttttctctttctttttttttttttttcctttcttcttcatctaaactacaaactattattatcaccacccataccaccacactacctactattattatcaccaccactacaaccaccataccaccaccactaaaaatcaaagatcttaattttttttaggaaaccaaaaccaaaacaacaaataagagtttcatgaggaatcacaccaaggggaagagaaggaaagagaaatg

SEQ ID NO: 144560 - DNA, 1150 bp, Cannabis sativa
  modified_base (590)..(590): a, c, t, g, unknown or other
aggaagccatgacttttgaagaatggctcaatgaaatgcaagaagaacttaatcagtttttccgcaacaaggttaggattttggttcaaagaccaaaaggtgtgaatgtgattggaacaaagtggatctttaaaaataaaagtgatgaattcggtacaattgtgaggaacaagggtcgtttggtggcacaaggctatacacaggtagaaggtattgattttgatgaaacctttgctccagtagcaagattaaaatctattcatttgctattgtgtattgtttgtgttcttgatattaaactgtatcaaatgggtgtgaagttggccttttttaatggaatttcgagtgaggaagtttatactgagcaaccaaagggatttgaagatcctcagtttccaaaccatgtatataaattagaaaaagttttgtatggtctgaaacaggctccccatgcctggtatgaaaggttaactcaattttcaatatctcatgattatcaaagcggtagtgtagacaaaactcttttcatcaaacatataaaatctgactttatcattgctcaaatttatgttgatgatatagtatttggntctacatctaaccatgaagtgtaggtgtttgttagttaaatgaaaaatgagtttgaaatgagcatggttggtgaacttactttctttttgggacttcaagttagacagatggaaggaggaacttttgtatctcaaagtaagtatgccaagaatcttgtcaaaaagtttggccttcaatcagctaaacaggtaagtactccaatgatcaccactttgaaattgacaaaagatgagcatggagtaaaggtagagaatacactttatcgtagtatgattggtagtttattgtatttgaccgctaattgtcctgatattagttatagtgtgggagtttgttctcgatatcaaagtaatcctatataatctcatgtttctgcaataaaaaggattattcgatatgttaatagtactcttgactttggaatcttgtattctaaagacactaattctaatttggcttgctttagcgatgcagattgggcagacaatgctaatgatcgtaagagtacgagtggaggttgtttcttccttggaaacaatttggtttcttcgcatagtaa

SEQ ID NO: 144561 - DNA, 617 bp, Cannabis sativa
  modified_base (293)..(296): a, c, t, g, unknown or other
gagggggtagggatggctatatttctgggagcgaactccaggcgaatatgaagcgcatggatacaagttatgccttggaatgaaagacaattctgaatcccttttgtctacgaacaaggaagctatacataatgcaacggtttcacggaattttaaatatttttacgatttttttgatttatttacagaaaatacgatctttttatgttgtattcttgttgattttttattatctgtatgtttttttttttttgttgtttcgatattatttagacgttattttcatgttactnnnntgtagttttcttgttgttttcgtgctgtttctatgaaaaatcgtaaaaatgtaaaaaaaaaatctttaaacataaaaatgtaatttttttttacaaaacatagtacgttgtgtaattatcccataaataaaataccaattttcaccgaatgcttcaattaattcagcccactttaattccttgaattggctttttttaattaaaaaaatatattaaatgattaacgagaagaataaaatcccaaaaaaatacctatgatcaatgtgttggaaatattttaccaggatctagatttactacaaagtatgtttcattaacatc

SEQ ID NO: 144562 - DNA, 553 bp, Cannabis sativa
gtttatgtttaggctttcagtttctttagtattgcgaaatctgttacaccatgattaattaagactggcagtttttgttatttatttccttttttttgtttcttttcatctcttatgttcactctagttgatagtttgaagtgtctacccttatttaggagtatatcctactctactcttttgctatatcattatcctattcttatttgatgcaaggagctctgcttagaaagcacatcgatgccactttgggtagtggaaatcttagggaagcagtaaaactcccaactgtggaagacctaaacgagtggcttgctgtcaacagtatctctctccccccttatttatatattattatgtgtttagatgctttctcttctgttacatctgcactttttactctctattatatttttgaatagttttttctttgaattccaactatagatttcttcaatcaggtgaatttgctatatggcaccctcacagagttctgtactgcggagaattgtcctacaatgactgtaacgccctaaataattaggcacgatac

SEQ ID NO: 144563 - DNA, 648 bp, Cannabis sativa
  modified_base (43)..(46): a, c, t, g, unknown or other
agttttcaaactttcttttcctgccctggaagaacatagcctnnnngttgctccatatagatggttttttcaagaatttcgttaagaaatgctgtcttgacatccatttgccaaatttcataatcgaaagaggctgctatggagagaagaattcggataaatttaagcatgacgaccagactaaaagttgcctcatagtgcacgccttctctttgggtataacccttggcgacaagtctagctttaaaagttttgacttcgcctccagtgcctcttttcttcttgtagacccacttacatctaattggacgatattcatcgggtgcgtctacatattcccgaacttagttctttttcatggaatccattactgaatccatgccagttgaccattgttttcgttccggacttgccattgcctgtttataggttaatagatcatcatcaataccgtcaccaataaccatattgatttcaccatctaagccataccgaaatggttttgtggaaaccctcccactacgatgaggagtttgttggaaattattttaccaagatcttatatctactcacaagtatggtgatcaacaccctaaatgtgaacttctaaattgattatgaaataaacacatataaagtattagaacc

SEQ ID NO: 144564 - DNA, 894 bp, Cannabis sativa
  modified_base (290)..(305): a, c, t, g, unknown or other
  modified_base (759)..(784): a, c, t, g, unknown or other
atagcttttattttttctgtgtggaatcactaccgtgatgctcaaatttggttagcgaaaatctgcgttaacagagagcaccatgttccttttatagtatttcatctaggattaaaattttattatatggattaaaaagaataaaataatgggcaaaaatcacactaagtggccggccactaaatgtgggcctcactagttacaattttgccactgtattttaactatttatcatttctttcaataatgtcatattttccaattttaatcctataaatgtcaaaaatatnnnnnnnnnnnnnnnnattaattatcaaataaaattactattttttttatttattaattaaaccatacaaagtcgcttaattagcaaataaatcccaaaaccacttttcttcacaattaagccattgcttagtgaaaattaataaataaggcatagtctaattttagaattataatttattaattaaaaccaaataactaagtcttcaagcagtattatctcaactagtgtggggacaatgggcttatataatcaagcttccaataagtagaactagaatttaccaagtaaattctctaacttattgtgccactatagatttgaaattacactcttaattatatagaacgctcttatatgtaccaagaaatagatacactatgaattatgcatcgtttttatccaaatagtcaaagatcctctatagatgatctacatagaatagggacaaatttattgttctacccttnnnnnnnnnnnnnnnnnnnnnnnnnnagctacctataaatgatattccaaaaaactaataaaattactgaaatgagattttaattatttatctctatgaagccaagctcgaagaaaattatcatttcacttctaaa

SEQ ID NO: 144565 - DNA, 878 bp, Cannabis sativa
ccattgttttctggtttaatagtctaagttttctagtttgagattgtttatggttttttggtttgggttcggtctgtcggttcttgtttaagattgcaagtcttgtctttcatttgttttgtgatggcttctagcagtaataagaggatggatgaagaggatagggctacagttatcattgaggaagaggatgcggtagtattatcctatgatgcgagtgtcactactagtaatgatattatgatgattgttggtgtattgttggtagattcttgattgagagatccatagatttcgacgcgatgcactatatgttggcttctctttggcaactgggaagggtatgttcgttaaagaatttgattctaacatatacttattttaattctatcacgaactagatattcaaagtatgatggatcgtagtctttggacttttaataaaaggggggaagatccacgatagatagtgctgaatgaagttgacatgtgggtccaactgcatgatcttcgatcggaatttaaaaccggctacgattgtaaaagatatagaaaattatgttgggaagtttgtcgaatcaaatgaaagaaattttatgggattatggcaagactatttacatgtccgagtaactattgatgtgaccaagccattgaagaggcggatgacactgcggaatacggatgggattgagttctgggttaacttcaaatatgagcatctacctacgttctattttatttgtgggataatggggcactcagataagttttgcccttgtcagtttgatgctgcagagggaaagatagtcaagccttatggagaatggatgagagtgtggcctatgcgtaagaatcacaccataggagcaaagtgg

SEQ ID NO: 144566 - DNA, 1208 bp, Cannabis sativa
ggaattgaggtagatttatagcttttaaactttgaatccttgctgaattttattgttgtaaaagcatgaattagttgatatgtttttgttaatgcgtgtgtgaaaaaattatagtctttttatgagatttaagtgttaattccttgatcttgttgtgagttttagttcttgagccctagatggaatgattagggtattttcttacttaaattcaggttttaaatttgatgtttattgctggaaattatttgagaagcttggctttgaagttcttagttgtgaacttgagttttgttgatctttagcatgatttctagctttttgagcaatctgaaattcagggttattattggattttgatgcatgattatgtgttttaaatccctagtgttttctagtaactttggtttatgattcagaagttttggttatgaatttgagtgagtttggttgggtttttgctgaaaatttgtggaaatgcatgctggtttctttgtttgaaacccatgtgtcgtgacatgctctgggcatgccgtagcctgcccctgttgtgggaacctgggagttggccccaagtgtcgcggcatggcttgggatgccgcggctcgcccttgtgtttttgggcagttttgagttgaactttgaaaattcatatcttttgattcctaactccgatttgggacttctatatatcattggaaagctctttccgacgagctctgtatattatctaaattttaaatgccatgattgaattttatgattatggaatcagggtttaatcctatttgtgaaatcccagattgtgtgactaggattaccggcacctgatcaggagcacctggggattcagaatctctaactttgcaggacatcaggtaagacagcagtgattagaacatagagtttgcgcacagtggcgcttatattgaaaatggtatgtatgattgtttagtaaccgggattagggttattgccctattaagagcggttgatagcctagggtgattaccctagtgatatatgtgtgtaaattccatgccatgttaaatgtaatgagatttagggattatgtacttcgggcataatcaggttagacttagtaaccataaccgagatgaaccattctaagaccttattgtatttagacgtgtgagagcaacacgtaggtctacgccacttggatataaatagatgtgtgagcgcaa

SEQ ID NO: 144567 - DNA, 546 bp, Cannabis sativa
ggtcagacaaacatgccaaattgtgtaattacctccaattacacacaaatccaattacattgtggctttccaaacgcacccttattaattttgcataaactagaaatttcaagaattaattgttagtttcttattgttttttctattattttaagtaacaatatttactctccattctctataaatagtggaatcatctattattaacagatctgaattcatattttatagagagtacttatatttaggggtgttcatccgatccaatccaactattttactcatagtacatatgatccgcactaagtgcagatctcatattttggatttaattcaatctacacagtaactcaaatctaatccaatctataaaagtgtgaattggatcgattattttgaattgattattttttactattaaattatttaatattcatgaaaaaaaaaatatatatcttgttcaataactaccaactaaataaaacaagttattgttattttatatctctaacaacaaattaaaataaataaaataacaaataacaa

SEQ ID NO: 144568 - DNA, 718 bp, Cannabis sativa
ttataattaatctatatttatatagtagtgtatatataaattttatggggaatcactttatatatcatttttttttacttttacagtttggtttgttctggtagttgctatgtgaatttgggtggctttgttggttgttatgtgggttgctatgtaaattttcgtaaaaatataaaaaaaactaccttgaaacataaaaattaaaaaaaaaacccaaattttattaaatgtaatttaatgtgctttgaggattcttaaagcatatccaataatagcattttggagaatgcttgatgaggtggaaaatttaggtgacaaaatatagggatgctataccattgaagataaaagaatgttattcttgaaatttatattgatgccacacaatgatattgatgctatattttttaaataaaaattaaagatgcaatatatatatataataatttaataaaaaaaaaaagatttataatacaataatgtgtgagatcataaatataatattcttgaaaggtgttatatcattagaatattttttagaagtaagagtgccaaaataatttggaagaaagataaaataaaatattatatcatctactagaaatatttagcacctttaaaaaatgctattattggagatgctcttacaaacgaaaatctcttactattttattatactacaatttactgataaatattttgagttatgttttagttt

SEQ ID NO: 144569 - DNA, 510 bp, Cannabis sativa
aaccgggataaaaaagtccccatatatatgggccttttaattgttgggtcggctacacatataaaatgaacagttaacttttagggtttcatttttattaggattactctcattgcctcctaccgatttctctctctttctctcttatctctctctaagcggttgcccacatgaagatcaaatgggttctgccatggtgtatctctcagcttcagtgcttccctactctctattttcatgcatcatctcaggtcaccggtctttttctggcgaaggacgagtcaacggagtttagatccgagctccatgccctctgaaacttccagataccatttgtcttctttttcttttttgttattgagagatctgtgctccatgtcctataatctctttctacttctttttgttattttttctaaaacgctgatcaactctctcacattctctctttcctcatgtgctaaggttcgtggtcgacgggttcgtggtttttcatggtggacgaagttt

SEQ ID NO: 144570 - DNA, 909 bp, Cannabis sativa
aggcttttcgagccatgtcacccacgcagactcaaggaggtgaaagaaatcttttccccgaggatgatgatgttgcggacactgaagaagtcgtggacgaggctgccagcaaagtcgcagatgaatctaccactccaactgcccctattgctcccaatgcttaacttttactttaatattacttttgccaaactttcttaagcggtacaacggtatcgcaatttgtacttagacaaatttatgtttattttccttttgaacaacatatatcccttcggggatatttacttatatgatttctttgcagtacacgggtactcgcatttttttgtttatttatcatctcgattgcagtttaattacagcttggtgtaaaaaatactaaggtagaaaaattttaaaacctcaaaaaaattcataactcttttaatagattaagcaatagtacgaagcgagtgggttatataccccctatacttagaatatttatgtagataaattgactaagtataaatagatagcgagtacaaacgatacaatgcgagtactattgataataaaattttaagctatcgccattccaagctcttcgaattacagttccatcaagttctgggagtcggtatgttgcgtaccaattttttttgcgatgaggtatggtccttcccaattgtctccgaaaaccccatgtgttgggtttttcgtgtttggcattactttttgaagaactaaatctcctactcgcagaattctcaccttgaccttaagttgaaaaaccgcgcgattcgctgctgataagccgcatttttcaagtgagcctgatcgcgcttttcttctaaaaggtcaaggtgaaatgactgtttctcttcgttctgtacaatgttaaaaacatctcttcgtagggaacct

SEQ ID NO: 144571 - DNA, 582 bp, Cannabis sativa
  modified_base (151)..(155): a, c, t, g, unknown or other
tatgtggccctcccaaaataaccaggatgtcctctccctccacaggaataggttgtaacccctggttatttgggttattgggcagactgggctggttgtatcccttggcctgtcttttcatgtaatgcttaaaatggcctcgagcgatgannnnntctatctcatctttcaattgacaaaatttttcggtcgtatgtgtaatatccttatggaatttacactatttgttaggatctcttttgctcctcgaattcctcataggttcgggtttgccaaaggctactttatgctcatgtgcgaggtaaatattctcccgagtttcattaagctcagtataaatagtatacactggcacgtatttgtcatgcttcttttgtttctttgtatcctttgacagttccttaattccgtcctttctcttcagactagaatcccccgagtcatcaattctcgtggaagcagtacctattgaaacattgctgggtttaccttccaagcttgctttcaacaagttcatttcctttcgagcttcttccttccagaaaaaaacttgagccattttgttgaactcagtgatgcttc

SEQ ID NO: 144572 - DNA, 1110 bp, Cannabis sativa
tacattattactcactaattcaactacaaacattactaaaataaattacattattagtaagtacctaaatattaatccaactttttttacagacaatatttttttttaaaaaaaataaaagggaaacattattcaaaaagataagctaatacaaacaaggcacaaggccaacatcacacgacagcagctgaaaacaacagcagcagccacccacaacctattacattcataaaatacatatttttacgacaaatatttaaaaaaaaaaagaaatataacccagaattaattgacagaactaacaaaaacctaaaacaaatcacatccatggcgagcttcaaacgaaccacgaggcgagatccatagcatgattcaaacgaaccccgagctgagatccatggcgagcttcaaacgcgctgtcaccatgagaactctgaagatcgctgcacagaaaaataaacgctgtcaccacaagagagagcgagagagagacgcacgaaaaaaatagaaaaaaacttatctaccttgggcgatctcaaaacttttgctgatgggaaacaaaggcggcctggcggaggttcgtgcgcgaaggagaatgagagaaggcgactgagtgagctgaggagtgcgattgagagaactggggaggagaagggtggtcgacggtggtcagagccttgccgtgttgggaagagagaatgtgcgattgagagagaaggtgcggctgagaagtgagaagaagaaggggtgcggttgaggaagtgagggtgcgtgcggctgagaagacaaaggggatgagtattatgtgtttagaaaatttagagttttttatttataaggaaagagaaataatgagagattaaatgagaaatagagagagaataattaaaactcaacaatgtatatatttatttcaatgaaatttagtattttttttttttaaaaaaataataatttaaggttattgtaaaccttaatattgtattttatatgtgcttattttttttttttttctttttagctttttttcccccaatatataagagtattcttaaaaaaaataataaaaaattaataatatatgtatttttttaaattagggttgagtac

SEQ ID NO: 144573 - DNA, 536 bp, Cannabis sativa
ggatgttaatcaacatacttgttactaaatctagatcctgataaaatatttccaacagtgatagcacacagttgcgagatcaaattaaaaaatgtgaaaataaaaaatattgcctaggacaatgatcctattttcactgcacacacttatgtttgacaagtgtgtacaagttattctcttttgaaagcataacatgtatatttgtcatttgttatgaattttgattagttgcttgctttagaataccttatatttattgaggattttttttttaatttatttcaaattttcaaaaataaaaataaaaaaaataaataaataaaagagagggaggcattggtgacttgaattgtgggctaagaaaattctgtgtcttgtttggtaagtgtcaatatttattctacattgatttcttttaataaattatcttttaaagtttgatatcatattcatagtattttgtccttgattttgaaggattttcttaaatggcctatttttagaaagtatcttggttattttagtttccttttatt

SEQ ID NO: 144574 - DNA, 797 bp, Cannabis sativa
caaaaaataatttacatttttttgcgtctacggcttatacgtcggttttttaattttagtcacttataaaatgaatttatagaatagtttttttttttttaaaaaaaaagaatgcataaagctttatttattatttataaactcaatcaataatgtaaaaatattaatgtaaatatgaattaatagaaaattaaaataattagaaaatgaataaaaatttgaaaaaaaaaataagaaactagaaaaattaactctttgaaaagttaaaggataacattacctatcctaatattagaattgtataattatataaatataattatatagatagatatataaatatagctatatgtatatttttcgttttgcaatatacatatgtatgtatattttgaattgttaaagattaattcattatataggtttcgaaaattattatacatatatcatattttttgagtgtaataaaatatatatataaataagaatactaatagttttaaaaaaataccaataaattataaaaaattaaaaatggggatgttacattactttttttcttattattcaatagaaaaaaattagaaaacattacaaaataaaaaaaatagagacatggaaggagaatatgccacatcaacgctcttatattttcctttatttttatatatctattctatttttattggtttaactatttttaatgtttttttttaaataaaactaactaacagagagttaacgattgaaagttttcaattctatttttaaattaggaaacaaaccgcgcttcgcgt

SEQ ID NO: 144575 - DNA, 557 bp, Cannabis sativa
agccaacctgtacgctacttgccctattctctcaaggatcttaagaggtccaatgaacctcaggctaagctttcccttcctaccaaagcgcttgatacctttcataggcgatattcgaagaaataccatatcttcaacttagaaatcaatatcagatcgctttggatctgcataacttttctctttactctgagcagcgagtaatcgcgctcttatcttataaactacctcacttgtcctctgaacagctttgggacccaagaactttctctcacctacttcatcctaatgaataggtgatccgcattttctttagtaaagtagttcataaggagccatcccgattgttgcctgatagctgttgttgtacgagaactcgatcaggggaaggtactatacccatgatccttcaaaatctaacacacatgcccgtagcatgtcttctaagatctgaatggtccttttggactgtccatctttgaggatggaaagttgtgctgaatttcaattgagtacccatggctcgatgtaagctctcctagaatcttgatgtgaac

SEQ ID NO: 144576 - DNA, 527 bp, Cannabis sativa
  modified_base (376)..(376): a, c, t, g, unknown or other
  modified_base (469)..(474): a, c, t, g, unknown or other
ttatatcccgtatgacttacacgtaagtgatgaagtaagaggttgcatgtgaaatattagtattagatttaatacaattgaaagccagcacatgacattaatttggaataaatcaatttaattgaaaaaaataaataaatagataaagtacttgacgtcaaagcaatacgtaccttataaaaagaataaaacaattactcggaaaaagatttatcattaaaatagataatgtttgttttattcgctaacggcgtataatgattaatgagtaaatgtaaacatcaatagcaaataataattaaggttacattagcttggggtaataaaatgaaatgcaatcaaatgaattaataaggtagcgtttggtaacactttnttaatcagttttttgtttttaaaagtagaaaagtggaaatatctttaaaaatatatacaaaactgtttttacttttcaattttataattagannnnnnaattttaaaaacaaaaaaaaatcacttttaatatttttttaaacagatttttt

SEQ ID NO: 144577 - DNA, 1113 bp, Cannabis sativa
attatataaaaaaattattaacatcattatcattagaatttaaatattaacttataaatattcaaatttttatatcataccttataaataaattaatatataatcttaattaatgtttcaatagttttaattataaaattataatattcagtatattatatttaagttttattattattttaattcatttatatgataaattcatattttattatatattattataagatttttaatatgtcgtgacgtgctttttagacttatcgtgtgtcgtacttttcgagctagtctattcgtgtttaggtgtcgtgttttttgtgctttttgtgtcgagtcgtgcttaaggacatatttttcatgtcgtgtcaatttgtagcatcgtaccgtgtcgtgtccaagctcgtattttttcgtgcctagtcgtgcttgtgccttccaggctcatgccagtttcgcattgtgtcaaaaaactcggtccgtatttacagcattacttgagacattattatcaatttttaaaattaataacttattatctacatcaaacataaatttttagagacttataccataattctctcaaacaagtttacacaatattttcaccaaatctaaatagtatttgtctttttgctgaatctaaatagttttgtcttgtttcaaaaaaaaaaatagtatttgtcttgtttgtttacataatatgaactatttatatgaattatttacaaaataatgctacgtgtgttcagatggaacactcaagagatggtagtgtattattacatacatgagaccaaaataaaaagggagagaaaacaaaaattggtaaaattttagtgaagattggcaaatcacatatggtatcatttgcgtgtagaattaaacgcaatccaatgcatcacaacaaatgtcagatgggtctaaagggatcatcactctcttctctaccatttttaacagaaacaaaccaaaccaaaccatcttccaagagataaccctttttggcttttcaattataataataagaagagcaatttgcggcgaaacccccttatgttgtgatttttatacacttaacccccttatctttatttttggtggcaaaaccccctt

SEQ ID NO: 144578 - DNA, 964 bp, Cannabis sativa
  modified_base (818)..(822): a, c, t, g, unknown or other
tgtatatcgtttgtttgtattgcgtgtttaagatttctgggttgaatgttgaacttctgggaaatgattttgcgtgagtttgcttgtgcaatgcatagaatctctcttttttgcgccttggttgtttctttttactatgcctcttttgggaattgtctttttctgtcgtaataacgccttcagggcttagagtgattcgtgtttttctcagctttttcttctttcctctttcctctttcttttcgcaatgtcactgcctttgggattttcgcacccgatgcttgccagggaaagtcttttggggtttccttatttggcaatgatccggagggggcctctttccagcggttaggggacccccattccctttttcaacattagggtttggtttggggcctaactgctggattttcttaatgttttcagaaccaatatgtctgcttctgcatccggttcaaagtcttccaagaagggggcagttccactggccaccttagaggaggtcatgaagggtcccgcggcccaagaaaaatatacttcccgtgcaaacggctgggaggcggacgagctccactccaccttaacctgtgcccaccagcttgagaagatcgtaacggtggcaggcatcaagccatctactttcgggaccttccaccgcctgcctcgggatgaggagacgtccaatcataactacggggggttcggagcttggagccagacccacctcatgtccggggctatgctccctcttcaggattactttgttaattttataatttttgttggcctcgcgccgtatcagttaattccccaagcannnnncctgctttcaggcttgtttattttgtacgctgcccagagctgtggttcgcccagtccggctgagattttatatttttacgaactcgtttccgtccccagaaagggggacaaatttaaggacgatttttatggactccggtcc

SEQ ID NO: 144579 - DNA, 857 bp, Cannabis sativa
  modified_base (180)..(182): a, c, t, g, unknown or other
agataaaaaaagttttgctttgcactaaaaaaaaatctaaatgatctcgattgtcgttgatctcattcaaattagataatatatgaactgtaatgactgcttatagtggcggacctaggattcaaagtgagggggcgtaattttttttcttcgtaatttttgttgtttttttgttgtttnnntgcatttgtgaaattatccctattttaaattcctagttgacattatcaatttacaatattattcatttgcaccattataccaactttacatttttagtccaatttaataattctagcttattttctttcttaaagtttgtgtttgttaatttttatatattctcatcactttattttatttttgtttaaaccaatttgtgagtaattagttttataaattaatttccaatattcaatccctgtggagatgataatcgatttatcactttattacttgttgacaattgtgtgcacttgcgtatacaatttttcacaataagtttttggcaccgttgccaatgattgatttagtgaaattttgtttgtggaacttaattactatcaatttggttattttgttttcacttgtttagttttattttctcgctctattttacactttgtttgccttgctttggttccttttgcaaggtacttgagatgtctcatcgacaagtccttataatttggttcaacatgacttggagcccttgtatgaagcatggtggagatataagggatttctaatgagatttccatgtcataggttgtccaaagagtgtcaattagaaatcttcctaaatgggttgaatccaagtacacgagaatggatagaaagaggagatggtaccacta

SEQ ID NO: 144580 - DNA, 621 bp, Cannabis sativa
ttacagtcattatcctctccagttaatgggcgtaggttaaagtcgaacggagttcatcaacctccaaccattagaacgacatgaatacttcttataagtaatttggccttgcataacttcttctagagtggccaacttctttggcctcttcttggaggatttggcactggttgtggtaggattcgacatggaaatggcttggtgaatctcgagaatttcttggtcaaacccaaagaaactgtgttcgtgaaggtcttgaagaacttcactcatctgaaagacaagaaatcgagcagttagctcccacaaatgggggtctcctaaccgttggaaagaggccccctccgaatgaatgtcgaaagaaatctaacgattcgcaatgaaaaacatcgggtgcaaaacatccaagcaatgtgggaagatcaagagaataataggaatgtgcaagggcagcttaaattgccagaaatgcacagaaggaacgggggatggaggacctctgccctcactcccctcaaaaaataatagtaataacaaaaataaaaatataaaaaataaacagaaaaaaaaacatcatcggacatctatagaagcggtgttccataaataaccatcgtggtc

SEQ ID NO: 144581 - DNA, 689 bp, Cannabis sativa
aatgactgtttaaaaacgtcgggataacccatttttgtagtagttttcttttttttttttcattttttttctcatttttattccaaaaacttttcccctcaaaaaacttttaccggaccccgacgagttgccgccgcacctccggccaccgctgcccgagcctcggattgctcttcgtatttcatattttcggtgaaggtaatctctattttaattattttagcatttatttattttagttttcatttgggtttatatagtatttttaggttatttgtgtatgaaattgtattttttttttaagtttatgtatgtttttgtttataaatatgtgtatatagtatttttaggttatttgtgtgtaaatttgtgtatataaacatatatgtgtgtatatgtatatatatatgtaatggtatatataagtatattaatttatatatgtgtgtatatgtgtaaatgtatatatatgtatatgtaaatgtatatatgtatatgtatattaaaaccctaatataaattagtgtatatataaatgtatatacatatatataatatatgttatatatataatataatctatgttatatatacataacatatactagtaaaaagttacgtgcgaggcacatatattaaattttatgctagtttttttctatgttatttaaaagtgatacaattaaaaa

SEQ ID NO: 144582 - DNA, 944 bp, Cannabis sativa
aatccatgcatctcgcaagttacgaccttacttccaggcacatccgattaagatgttaactgatcaacccctgagacaagttttatcaaaacaagacgcttctggaagactaataaaatggtcaattgaattggggtagtttgacataacttatcacccacggacatccatcaagggccaggctttggcaaatttcgtgatagaaggaataactccagaggaaaatcttcttgttcagtgagacgcggatgcttggaaattatacgtggatggtgcatccaatgagcatggcttaggtgcaagggtgatattaatttcgctagaaggctttaagtttcactatgctttgagatttcaatttgacaagtcaaacaacgaggttgagtatgaagttgattactggtttaaagatagctgaagtgttgaaggttaaaaatctcctatgccatagtgattcacaactgattgtaaatcaagttctcagggaataccaggctaagggtttaaaaatggcgaagtacctagagaaagtttggaagaacttggaaaagtttgattatttcaaaatcgaacacaagtaaacaactctctaatgtcgatgccttagcaaaaatagcctcgtagaatggattggatgagctaaacttggtttcagtggagatggtaaacgaaccgagtatatgtgaaaaggaagatgtcgagatgatagatagctcgcccacgtggatgacgcccatagtcaactatcttctcaatggacaactccaactgacaaaaacaaggcacgaagactcctgtattcagtgcctcgatacacgatagtagaagacaaattgtatagaacaggctattcaatgcctctcgtacagtgtgtacttcccgcagaagcaaacaaaatcatcaaagaaatccatgaaggcttttgtggagaccatgcaggttgg

SEQ ID NO: 144583 - DNA, 1096 bp, Cannabis sativa
tttggggtttggggtttgggatttgggttttaggttttggggttttgggttttgcagtattggcgtttggggttttggggtttgggaatcgttatgggaatatgttggggaatggaaatgggaataggaattgaaattggaatgggaatgggcatgggtcagggaaagggaatggggattgggaatgggaatgggccagggaaagggaatgggaatgagaatggaaatggaaatgggccggggaatgggaatgggatgggctggggaatggaaacgggaatgggctagggaattagaatgcgaatgggaatgcgaatgcgaatgcaaataggaaaaggaatgtgaatggaaatggaaatgggttggggaatgggaatggcaatgctaattggaatggggatgggaatggtaattggaatgggaatgggccagggaatgggaatgggaatgggaaagtgaatagcaatgagaattggaatgggaatgggctagggaattcgaatggcaatgggaatgggaatggaaatgtgaatgggaatgggaataggaatgcgaatacaaatgggaataggaatggcaattgtaataagaatgggaattggctggggaatgggaatgggaatgggaataggagtgggtcggggaatgggaatgggaatgcaaagggaatgggaatgggccagggaatgggaattgggatgggaatgggaatgggattgggaatggggataggaatgggaattggaatggaaatgggaatgggaacgtgccagggaatgggaatgtgaatttgaatagcaatgagaatgtgaatgggaatgggaatataaatgggaatggggtagggaatgggaatgggaatggaaatgtgaatgggaatgggaatgggaatgggaataggaatgtgaatgtaaatgggaatgggaatgggaatgggaataggaatgggaatgggctagggaatgaaaatgggaataggagttggtcggggaattggaatgggaatgcaaagggaatggggatgggaaatgggaatgggccggggaatggaaatgggaatgggctagggaattagtggcacgtttactatacagta

SEQ ID NO: 144584 - DNA, 647 bp, Cannabis sativa
ttttatctggagagcaaagagttcattttgttctcaacagcttatcacctgagtttaaccaattcgttgttaacaattggaacttaaccgacattaacaagttggacgctgaattgcgtgcttatgaacggacattgtcacttgcatggaggtccttctccagtaatccagataagggcaaaaggaaagctgaagatattgagaatgattcctccgacaatcctactacttcaggctaagttgagaagaacagagaaagtgattccacttcctcagattatcttccacaacagattcaaccagcaataagaacaatccaagaacagttaagcagacatattactcaatgttctaattgtaaaaagaagggacattttaaattaaattgtcccacacttctgaaaactaagaacaatggtaatgttttagtttttgaatcatgtgttttagagaatgacaaatccatctggattgttgattctgaatctactaaccatgtttgttgttcattgcaattgcttgaaaactggaattatttaaaattcagagagctgaatcttaaagttggtaatggcaaaatggtatcggttagagctagaggaaaatccaaactcaagtttcagaacagaattttggatttagacaat

SEQ ID NO: 144585 - DNA, 595 bp, Cannabis sativa
  modified_base (517)..(519): a, c, t, g, unknown or other
attaaaaatacagttttacccttctccggttaaaattacgaaaatactcctggctcaccaacggggtcttagcatgtcatttatcagtataattcacatatattaaattatataataatataattctacattaatacacatttgactagttagggttcactaatctattttcttaatcttagggtattacattatcagtacacatgactttcactgatatgataatcaattatgtagtttacttacacttagatagtgttatatcttttccaaggcattggtaaagtaagcttggattgtatgtattacatcggattggactgatattatacttggataagatataataaacttactgtaatatctttctaagtcaatatcacttagttaatcttagatcaatgatctcaatcctgagatggttaggttctagttcaattgtattatttgtttgttaaagttgactaattaaattcctgatacttacatcttaaatatggtagttcaattgagtggnnncgctaatcatagatacggaatctacagcttctataaatgcatagaagtgaaacaatgatttcctttgagcttggct

SEQ ID NO: 144586 - DNA, 997 bp, Cannabis sativa
cacgccctcaaccaggacatcgtcatcagcatcaattggctccccggcctcattctatcccccatagttttggggtgcaacctcctccgcttcctccgcctcagagggaccgctaggacggacattgtcctgctcctcaatatcctggacctcaacgtccccttcatgatcctcctcctcctagacggctggaactagttcggggctgggtaaggtggcgtgccgggccacttgagggtcggatgcattaaccttacgcattgtcttttgggtacaagccatcatccaattgctggacaaattatttaaggaagaatgcctgtcactcgaagaagttggggtagaacgacgatgaggatgatcctcgtgcaagagttgaagcaggtcctggtcgattcggtgttcgcttcgccgaaactcaccttggttcatctacaaaagacaacacacaagatgagtgtttggtcagaatatcgaacgttaaaacaagcaaatatgccgactaggagtactcaacagattagggaatgagaatattcaacgaaaagtcaaaactcaggaagtctaaaatttttgcgagttatggcaaaaaatttcatgaagcttagaataagaaaaatgaaagacaggcattatgtggttcaaaacgcaagcattactgacaatgaaattggatgaaccgtaacaaaggaaaatcgcagagtttctaaacttagggtttccaacatatcttctacaacaaaatcgaaagtacattcagaaagcaaatgtgcaaagtaaacataaaggaaatcgaaaacttactcaaagaacaaatgtctggattcaagttctgccaagccaaatgagcagttttgatgaaagcacttcagccaacttgaaaccaaaaacctctctttttgctctgaacttacttagcaaggaaggttggtgaaaatgagtttgtggaaaaatgctcactggtatttatagccaaacaacgaaaaagggtaatcat

SEQ ID NO: 144587 - DNA, 1124 bp, Cannabis sativa
  modified_base (425)..(426): a, c, t, g, unknown or other
  modified_base (687)..(690): a, c, t, g, unknown or other
ttaatcaatctcttattttagtcccttgtattattttacaatagagttgtaataaatcttgattttctttcattgttataaaatctctaacaaaaagttaatactacatatattagagaaaacatttctcttatctttgtattatatttagccgaaaaggctatacgaaaaaatgaatgttgtttgaagggttttgtacaaagaagtgtatatatatacacagtattaaggaagcccattgggccggtaatgggccagaataaagacaaagcaaatttaatacccccccttcaagatgaactgtacaagttccttaagttcatcttggttacaagattatggaaataagtgggaaaaagagctttggtaaaaatatcggctatgttgtttttggtggtcacatgtattagcttcaatgtgccttnntggaccttctctcggacaacatggcagtcaatctcgatgtgttttgttctttcatggaatacagggttctcggagatgtagatggcaggtgtattatcgcaataaagaatggcgggatctttgtggtgaatgccgaagtcccaaagaagagctaacaggcaggtgatctcgcaagtggcattggccattgcccggtattctgcttcagctgaagaacgagagacggtagactgcttttttgatttccaagagattagggannnnccaaggaagacacagtagccagaagtggaccttcaagtgtcactgcatgaggcccaatcagcatttgaataaatcttaagatgaaagtctgaattggacatgttagtttcagcataagcagacaattttacagaagaggcagattgaaagaaaagcccttggccataagtgcctttgagatatcgtaaaattctatgagctgcatcaagatggggagctcttgaattagataaaaattgacttagtttgtttacagcaaaagagatatcagggcgagtaatggttaggtaaatgagtttacctatgatgctgcgatatatttttggattttctaataattccccaatatcggatgagagccgaatgttgggttccattggggtagaagcaggagtagctcctaaataacctgtgtcagttaaaagttgtagggt

SEQ ID NO: 144588 - DNA, 537 bp, Cannabis sativa
  modified_base (357)..(357): a, c, t, g, unknown or other
atatcatttatggatgcatattctgattataactagataaaaatgcatgtcccagatcaggatcatacgagcttcataaccaacatgggactttattgctatgaggtcatgccatttgagttgaagaatgctgaggcaacatatcaacgactggtgaatgaaatgttcgcgaattagattgggcgaaacatggaggtttatgtcaatgatatgttggtaaaattagtaaaaagttgaagtcataccacggacctcacagagtgcttcaaaatattaaggatgtacaatatgaagcttaacccaaaaaagtgttcctttggagtttcctcaagaaagtttctgggattcatagtcaangcgaggggcattgaagcaaatcctaaaaaaatcaaggctttgatagatatgccatcatcaacaaagcctaaggaagttcaagccctaacaggatggatgaccgcacttaacagattcatttcgaagtcaactgataagtgtttgccatttttcaatgtattgcgaggcaacaaaaaattt

SEQ ID NO: 144589 - DNA, 529 bp, Cannabis sativa
aaccttcgctattagaagccccatcgacgtacaacatccatccttctccatttgttatagtggtgtcgatcttgtcgtttatgagtgccacttcagtacttggaaactcgagaatgaaatctgccaaggcttgccccttaatcgcagttctcggtttgtatctgatgtcgaactggcttaactctatcgaccatttcaacaatcttcccgatgtctctggtttggctacgacttgcctcaaagtgtagtttgttaaaacttcaatactgtgggcctgaaaataaggtcgcagctttctcgacgacattactagggagaacgctaatttttccatttgaggatagcgggtctttgtgtctaacaggcatttactgacatagtacaccgggtactgtcgtccatgatcttcgcggattagtaccgaactaattgcatattctgacaccgctagataaatcgataagacttcgccggttataggttttgataggattgggggttgccccaaatgcgtttttaatgcttgaaa

SEQ ID NO: 144590 - DNA, 640 bp, Cannabis sativa
gttatataggcacactttatgtaggatagatatataaataaaatataaaaaaaatgaacacaatttccttttctcttctttagaatttatggtttttcgagacataaaataataataatttattttattagttaggtaaaaaaatatgttttaataaatattaaataattcatatctaaaaaagtaactaatccataataaataatctaaaataattaatccaatacagtttgtaatagtgtggattagattgaattggatttgagctattttgccgattagattggatccaaaatataaaattcgcatatagtgcagatcgaatgcactataagcaaatagcgtgggttgaattggatgaacaagtgatgtgattatggataatttttttactactgttacagtgcggcgtgattaagtaaaataaatttaaaaaataataattttcacatatataataattttaacatatattttaaatgtagattctcatttcaatttttttttaacctaactaatttcaatttgcatatagagatggtttcgcacagcttttgaaaaagttaaaagctgctttttgaaaaaaaattgtgataaaaatgtgtttggtaagtaattaaaaaatagctttttgaagaat

SEQ ID NO: 144591 - DNA, 693 bp, Cannabis sativa
  modified_base (344)..(346): a, c, t, g, unknown or other
  modified_base (663)..(666): a, c, t, g, unknown or other
ttaaatttgttaccattaataggtaatacccattgagtcatcttcttctctagtgaaaatcttaaaattatttctcactcgttttttttattttttatttatatatatacacgttctttttattgtttatatattatatacgttaaataatatataatataaatattatatataaatataagatatcttatagggtgagaggtaaaataactttaaatttgaaaattaagttagtaaatgtcatttttaaaaaaaaaaattaagaaaatggccaaatataataaattagcatttaaaaattataaaaatacatttactacaaattattttttaaaaaaatatannnaataattaaattaagttatataatattttaaaatgaataaatatattagatcatttaatatattatgttgacctcaaaaagtaatcaaccaacagcggggtcatatgaatttgatgcttggcacatgtttgcacatataagaatgaaaaacaataaacaacagatttgttatagaggttcgacccccaagcacctactcccattttagttgtatttttaccaagagttaagactatccagatccctataggaatataaggtatgaatcaataatggcaaaactcaagtattgagatgatgctagggtaggcgtgtgnnnnaggaagtgaggaagagagagagagaga

SEQ ID NO: 144592 - DNA, 540 bp, Cannabis sativa
  modified_base (50)..(78): a, c, t, g, unknown or other
  modified_base (344)..(358): a, c, t, g, unknown or other
atgtgttttgtttatcgttttagaggttcatatttaggttgttaaatcannnnnnnnnnnnnnnnnnnnnnnnnnnnngtaaaataaattccaacaactgttatcagggtagttgttatattgatgttatcatataaagtatcatagtgtgttatattgatgtttatagacaactggtaaaataaatacaacgatttgtttgtgatttggatggtatcatagtgtgttatattgatgtttgtgaattctgggaaaaataattgattgtctgtttctgaaattatttttattggatagttttgaaaattttaagcaatttaatttttttacagaactcgatttcnnnnnnnnnnnnnnnagttatgaatttttgaaaatcgagaaaaatcaaggtggtgatcacctctcccacgcgcgcggaagggctacttgcagcctccaagcgctgtggaaacaagggctccttgcgcgcgcgggtggtatgcaatgcataccatctgtacagcgtgcaatttttcttcgttttcttcgatttttcat

SEQ ID NO: 144593 - DNA, 1432 bp, Cannabis sativa
  modified_base (98)..(105): a, c, t, g, unknown or other
  modified_base (392)..(395): a, c, t, g, unknown or other
ttgttttatttcatgttaagctaaaagatcagattatatcaaataaccctgatgtaagttactacggtaccaaacacattttcgatcaataaatgaannnnnnnntttatttcaaaattcatattgagtcaaaattactaacgtgttgctaatttaccatccagtgcgtacaaaaggtctgctcgaacccaagactcggaacagataaaaaagcatacttgtaaaaaacaagtgaccaagagtcataagtctgctaagtcacttggggggcacctataattgtacaaaggatttggtaaagataaaataaacacaattgcacgatgattataaacagataatgaaattcattaaagataacaaaagcacataataccgggattaaaagctgnnnngtcagcctgttgtctgtaaaatgaaaaataattccaagtttaaaaactgcttggctggtcgtgatgtctttaaaaaaggccttacaaccaaataagatatataaaaaaagggataaaagagaagtatttaaacagctggagtcccaagctcttgatttggatcttctgggctggtaggagctggaggatctgttgtttgaatgggaggtacatcaacattctggccagaggaagaaggagtcgcatcgggctcaccataagccacttgaaaggcacagtactcgagatacatgtctttggcctcgcccaagcaatcaaaatttgcctgagggtagccttccaaaagtcataaaaaatctcgagaccagttgtctctaaggcacgcactttttcttcctgctttgccatccccgacttgtacttctcaatctcagctgtaagctcctcctcctgggtcttcttctcctcttccaactgacggaagacagtcagagggaccaccctttcgtcctgaaggctattcatttatgccgatagggagccaatggtagcctcaagctggtcggacgcctcgaggtccttagtcaactaggctattttcttctcagcaataaaaagcttcttgttgacctcacctagctccattcgaatagccccaagctccaccctggcatcatcagcgtccttcctggccaagtccacttccgccctcatggtgttggacagagcagcattcttggaggcagcagacttagctcaggagtatgtgtaagccaacttcagatcagcctgcacagagaaaaaactttagaatctgagccaagtaaaggggattaaaggaaaatgtcaaaaaagacttacccttgtgaattccatcaagactcctcccatcagccactccaaagaagattcgtagtcagcgctggccagttgctcactaacctcaggaaccaaccggttcatgtaatgggcgagcatctccttgcctttcttggcctctagaagcactagaaaaggtggagtacgagcccgcatct

SEQ ID NO: 144594 - DNA, 1166 bp, Cannabis sativa
  modified_base (231)..(232): a, c, t, g, unknown or other
attctggcgcttcattccatgttactgctcgtagtgatttcttcacttcttacactactggtgattttggcaatgtaagaatgggaaacagtggtgcatcgaagattttgggtattaaagatatttgcttgaaaacaagcgttgttagcaaattgattctcaaagatgttaggcatgttccagacattctgtaatatctcgataagtctaatggtaaataattagggtttnnatttatattatgagttaatcagattataagtgggattatgatcctactaatctatttcagcataaaatttaaatgtactataagtggataaataagcgtaatttgttaattacgaagatttatttgaaatactagatataatatgagttatttgtgaaataaaatattttcaggttcggcgacccttgaagaccgagttggaggccaaaaatgtcacaacggttttaattagaaatattattgggattattgggataagttaattttagaaataccgatgtatcatagggtacttgaagttggccaaataccctaaaaatatagatttcttagtggctaagaaataataagacaaccattaataataaagtttttattaatattattattattatttatatatataaaacttatctttgttaagtttatatatatattataagttacagtaagtataaacaaagacgaacgaacgaattctcgttctctccccttcgacaaaattttctctccctatatttattttctttgatttttaacccgaaacctaacgatctaagctccggtagtatcaagatagcaaatccttgaagatgaaagcttaaggtttggtttaatttcgttttaagttttaaaaaaattagttttatatagggattttgtgagtaagaatagttatgaaggttctgaccttataggattgttttcgggtagtcatgggactagtttcgatgttttcttgctgaaactgaggtaattttgggttaaaaattgagtttggaactttttaaaacttagtatgaacgttaatgacgtttttcattcaatggattgattttaatttctgttatgtaaggatggtaatatttatggtatatatgtgccatgtgaagtttggagtgatttagataagttttggtagtatttcggtgag

SEQ ID NO: 144595 - DNA, 2702 bp, Cannabis sativa
gaaagtagggccttaactttcttgaggctatcaggaggcaaaaaactagtttttcaatcactggatatcgtgtctccgcccatatcatgtgtttgttgacatagtacatggggtgttgagttttttcctcttcccaaactagggctacgctaaccgcattctcgaagacggctaagtatagtaacaagtcttctccgagaacgggttttgacaggattagaggtttagccatgtgttcttttaattttttgaatgcctcctcgcattcttcggtccattcgaatttttggcatttcttcaggatgttgaagaacggaatgcacttgtctgtggatcgtgaaataaactggcttagggcggcgacctttccggttaggctttgtacgtctttttgcttcttgggagaaggcatgttcaggaggacttgaattttttctgggtttgcctctatcccccgctggctgacaataaatcccagaaacttgatttaaccccgaaagtggacttcttcgggttaagtttcattccatatctccgaaccacttcaaagcattcctcgaggtcatctgcatggctttcacatgcctttgatttgaccaacatgtcgtccacgtacacctccatgtttcgtccaagaaggcccttaaacatccggttaaccattcgttgatatgttgcacaagcattttttagtccgaaaggcatgaccaggtagcagtatacccccttatcagtcctgaagctagtgcattcttgatccacaatgtgcatcttgatctggttgtagccggcataggcgtccatgaaggacaatagcttgaatctggaggtggcgtccaccatttggtcaatccgcggtagggggaagcagtcttttgggcaggccttgtttagatcggtaaaatctatacacacccgccatgtcccactaggtttaggcaccagcaacagattggctagccattctgggtaatacacatcccagatcatgccacttgttagtagcttgtccacctctttctccagagcttccgccttcactggatcgaggggacgtcgcttctgctgaactggtggaatatccgggttaacattgaggacatgggttatgacatggggacttatgccggtaatgtctcctgggcaccacgcaaaaacatctgtgtctgcccttagtgctttaattattttttctttttcctccggttctaggctctttcccagtcagaggatcttggtagggtcgaggtcgcacattggcacttcctcgaagtcctccataggttctacaatttttttggatcccacacggggatccaactcatcttcttctgccacttctggctcgataccttcacggaccatcaatactggtaagtgggcctcaacattgtaacattgcctggcctcaccttgattacccctcacggtccctactccagcctcctaggtagggaatttcagacacaagtgccaaatagacgtaactacgccaaagtccactagggtcggtcggctaaggattgcgttgtaagcagttgggcagtctaccactacgaatgtgcaatatttaaaagtgctctggggtgtgtccggacacaaggtaactggcaacctcacttttaccattgggataagtgtggttccattgaatcccgtgagctaggaaccgcttggcgacagatctcggtccgtgaggcctatcgccgtgaaggcttctttaaacaataaattcacagaactcccattttcgatcagtattctagccacgatcttgttggcaatgggagtttctatgaccagagggtcatggtgaggaaaatgcaccatctttgcgtcttcttccgtgaaagtaattggctgatccatgagtcggggcctttgagctggtaggtgagtgacttcccacacctcgttgtgtttaacagccccaacatagcgctttagttcctttcgagtggcccctccaatatggcgccctccagagataatagcccctattctgttgggtcttggtggcagggtgggagtctgttgaggtcctccaaagggtgcggttggtgctagcgctccgggcgcacccccttacgtcccttggggcagaggtccccctgccggaatcgggttgagatggggcagccggttcttgatccactcatagagatgacccaatcaaatcaggttctcgatctcatctttaagatttttgcattcattggtgttgtgtccaatgtcgttgtggtacttgcatctgttgttgggatcccttcgggaactatctctatatagaggaggcggtctccggtagtgcgtattttgccttgtggtgaaatacacacgcttttgtgagtccgtcagctcagtgtactgggtgtatttgggagtatacccccttttttggcgcttgtcctccgtccggttgctacctttcgaggacctcttgcttcgggagccttgagaaggtttggctaggcttgcagtaggagcggagtgagatgggacttgtccgcttattcctgaggggttcccatagtgcgaagatgcgggagccaaggcctggctctgattatatcctggagtagcagagaattgtataccgcttatttgtggagtaaccgaaggtacggttcctgggagttggactctgggcacgtatcctgccactccggttggatagtatcctccataagccactatttggg

SEQ ID NO: 144596 - DNA, 656 bp, Cannabis sativa
tgatatgcaatccaacttaaagcttctttaatgcctattattttagcgacttcaggttggacacggccaatcttcctcttagtgaaagcttataacatattaccatgatgatcccgagctacacaacctacaccaaaccaaccctcttgatcaaacaaagccccatcaacattaactttgatcttatgtaacataggtgcagtccaatgctcataatgtcgccccccttcattcaaatgagacaaagaaagaccctttcttccttgagcacatttatactgattaagaatgttttttgctgatgcaacaatatgtccaactcttttattgccaaataaaattttaccttttttatttaccatattaccattatttaaataataaaaaataatcatcattgtatattttcaataaaatattaaatgaccatcaatcactactgcaaaacaagcctttagaggcggtttttttcaataaattaataaaattttaataaaaacacctacgaagtcggttattttgtaatagctgactccataggtgataatttttttatttttaatgaaaaaatcttatggagtcggttattacaaaggtgatttttttaattttaatgaaaaaacacatatgatgtcggttattttataataaccgac

SEQ ID NO: 144597 - DNA, 767 bp, Cannabis sativa
tggcaaaagttctaataccaacgttaatttgtcaacctcttttgccaacacatcaaatgtagattacgttttgctagcacaatatcaaactcttgccaacataaaaatgtactggcaaaagtgacatttcttgtagtaattcttatcaaaagatacatacaatctatatatagacaccaatttttaatacatcaatttttttttatttatacactaatattatttgttctcccgataaggacacatggaattcttacaacaaatatagtttaaatacttaaaactcaatagcgggcccaaaagatacattaggccggattcgcaagtgaatagtcttttcggatgaagaacagacaactaggggtggagccagaactaaagaattgggaggccaatatcagacagtgcaatatacaataaatttaaatttcagtgactttaataccttttaaggatgtgtgtcaattataaaaaatactacatttttaaattttataaatattttatacaatattttttttaaaaaaaatgaatcaaatcattaaattaaaaataaaatatgagtgttacgctaaaatttgacagagtttaatttaatattaccaaaattaataataatatgtaatttcttaaggaaaaaatactcatattaatttttagaataatataattagttaattttactactatttattaaataatttactaaatatatttttaaattaaaacaaattaattaagtctaataaaaaagtaatataataatt

SEQ ID NO: 144598 - DNA, 515 bp, Cannabis sativa
  modified_base (296)..(296): a, c, t, g, unknown or other
gaaataaaaagtacatcataattattgtcatcatgtataaacaaaatatagagatcataataataacaaaagtcaagcttcaacccactaccacaaaatgggtttatattgtcagctaaaatgatagtcaaagccgggaaccaatgaaaaaaattagtgccaaacttatcgtcagttgtgaacctaacccatttaaataaatctaaccctaattttatataaccctaaatatcaaatttcaaagccaccccttattttataaaagaacataaattgttctctctctctctctctcnctctctctctctctctctcatagccaatgatctcgatctctctcggtttcttagatccagtggtgcccagccccaaaggtccgccaccgttgcccagcccaaaccatcctctctattgaaacttatttatgttggaaatattttatcaggatctatatttactaataagtatgtgaattaacatcctaaatatgcattctctaaaacaataaaataaac

SEQ ID NO: 144599 - DNA, 722 bp, Cannabis sativa
tgccatagagatactgtggtgtatttagtatagtctagagttcaaagaaattttttttgaagtacatatatcaatagctttttccaccccctatgtgtagagatcttgtggagttatgaatataatctagagttcaatagatgtaaaagatcgttgaactgcatatattgcttcttaacttcttccacccctatcaaatcaaaagattttttattaaacaaaagcttaagaattaacaattattcataaacattgaattttaaactccaagtgtttatttggtattatctctttacagagatgaatataccatagatttggtatcaataataaaatacaaatacatacaaaacatgataaacatataagtataattggtattgacatacacaagataaagaaaacacgaagctaaatccataattgcaattcatttcttaaagagaaaacttattaataatctcaaaaaaaaagtcataatgaattttctgcataaatatgaaatagggaataaaatcccaaacaaataattgaaactaaattgttcataaactgaaacaattaaatcaaaaataaaagtagatttcgagcttcatcttcatcgtggacaatctccacccttttgtccattcatccgactcaactcgctaggatagcaatccaagtttaagctgctggagctgaaataagaagaaaataaacacggttagtagatccagaat

SEQ ID NO: 144600 - DNA, 762 bp, Cannabis sativa
  modified_base (425)..(426): a, c, t, g, unknown or other
  modified_base (504)..(506): a, c, t, g, unknown or other
ttgttaaagtttcttaatcttgatacgatactctgttttgatctagcaattgtagtttctttctttatgtgttggaatataaagggaaatcggaagggccttctgggaacacacagttttatctctccggtctcgtggtatcagacatgtctttcaggtacaaattactgaaggcggaaggctttacgagtgcgaaaccaagatatgttcatggaaggaaaccaagatatgttcatggaaggacataagatatgttcatggaaggacatatccaggtgggattggcccacttctcctttgttgagggtcccactgataggtttgcagtgctgacttggagtccacgtgtccaataccaaaaacgcgaataacagttacaatttggttcgcacgtcatcatcccaaaatttgggataacaattatnntgtgcaattgttatattttattgtatacaaaaattataatttttttttttaaaaagtgtataagagtttcccataatnnnaagtttaattaatatactatcataaaatttaaaatagtttacattgtcaatatatatattcacatcaagcatatatcgattcttcaatataagcacccaacaagcttatctatcaagttgttgtctccctactgaccagaacgacaacttgccgttaagggaaatacttctttgtacaatcttaatgtatcgatgaggtataattttatgatgacctgtcttgctacatgttacaattttgattgcatgtcataca

SEQ ID NO: 144601 - DNA, 766 bp, Cannabis sativa
attcctcttgagtgcaatcatctcggttgacatagctttattccaacctttatgtctaagagcttcttcaacactagtaggttcttcataatcactgttccactgagagtgtcccatataaactttaggcttaaaaatccctgccttagctctagtaatcatcgggtgagaaggagctataggcacgatttcttgagaaggatcaagagaaccagcattgacatgaccaggtgagtgtccagagtaaacaacatcactcagattaccagtagaaacacctggactatgtgcatctgcaggtaactcatcaaaaaaaccagatgaagtagcaggagaactaacccgagttacctggttttcatcattaagatttgtctgaactgtaacgtcttctccagggacttgagacattgtatcagatgagttgcccttctctgaactgttggacacagacttgtttagagactgaaatagaacagaccaagaaggcacactaacacacacagactgttcaggtttgtaattgtttagaaagccagttttgaatggaaaatcctcctcattgaatataacattcctggatatatagattcttcccgtggaactaaggcatttgtagcctttatgagcatcactatatcttagatttacgcacttgacagaatggaattggaatttatgtgtttgatagggacgaatgcacggataacatgcgactccaaagactttaagaaacttgtagtctggtttcttaccatggacaatc

SEQ ID NO: 144602 - DNA, 656 bp, Cannabis sativa
gctgagtagtcttctttttgagaccaaaaatggtgctttgtctttcactgttcctgaaaattatgccttcgcagcattctatctcactatattttatgtcatcttcatcgttcgtggccgcaagaaataatttgtttttaataatttgtatcttattaatttatcaatataaatatctcacactcaaatgaagaataatccacaagattgactcaataatatagtggattttatcattgcaaacttgactttgactttttggagtttgtttgttagtgtaatacagttagtttggattagttaaaacatgttgtatttgtcctaatctataacagaattctgttattctattttccttgtatgccagctgaattcttgcatatataaaagaaagtctcagcacattttgagagtttgagcaatttattacactttcaattgcaatctctcttttctttttctttgtttttctttgtaaagtcaaaggttttcatagcttcaacttggtttcagagccgatggcgatgaacatcggatcaccagacgctccatctacccaaaatgtggtcgtcgtagctgtgattttttgtttttttaaagcttatatttgttaggttatttttagtattaattttagattaagtttagtatatttt

SEQ ID NO: 144603 - DNA, 592 bp, Cannabis sativa
  modified_base (533)..(533): a, c, t, g, unknown or other
aatctcccccttgacaaattatggtcaatgacaacaataccagtgcaaaacaaagcaaccatcaaaatataacaaagtctaaacaaatagaggcacaaacactttgaacaaccaaacaacaaatgcaccactttccacaaaggataagtatttctcccccttcattgagcataatccatgtcaataatattgtcctaaaccgaattctccccctaataaaataagaagtttatcaaagatctccccctgaatggcaacaaaaaatgcaacatagactcctcattgcaaagaaattccaaagtatctattacaaaattatagaagaaagtcaaaccatctcataacacgacctaaaacatatggatattagatataaacaaatgagagattgaccgcaaaataatcagatcaccacgatattacgaatgatgctacaaatgagattaattttcatttcaatcaaaaacatgccaaatgatatatctcatgaattcacatgttcaacttgtaaagaggaaacacaatgaatggcntaatcaattaacaagtgagcaatgatcatttgagcaaagaacaaattcattcaacttca

SEQ ID NO: 144604 - DNA, 783 bp, Cannabis sativa
ttgcattcattggtgtcgtggccataatccttatgaaatggcaaaacttagtcatgtctctcttgcttacatctttttttatgggtgcgagcttcttgtacggggctaatgattgagtagccatgtacacactttctatatctcctgtcaagataaaaaatgtagtaaccttggtaggattctccctgggagtttgttcgattttaccagcaaactttccctttttcccatttccttgcctattgttgttgttagaccgtttaccacctgagcttgaattgcttgagtattgggggagctagacggatatcccagcagagggagcttttggctggctagatttttgctcaacttctgcctgcttgatggctttttcaagcttaatgaaaccttctgcacgatcaaggaagtcactcatagaatctactggtccgttcttcctgatgtccttccaaagttctccaagaacttcaatacccccaagtatcgcggacaactttccgtcttcagtcactcgtgaaaccttagttgcttccgtcatgaatctactgatgtaagctcggagaggttctcctggtctttgctttactttgaccagatctcctatgtgtaatggaagttggtgagaagaggagaattgtgcatggaattccgaggagaaagccttccatgagttgaaccttctgggcgccaacttgaaattgatggaaattattttaccaggttcttagatctacttacaagtatgttgattaacaccttaaatatgaacttctaaaacga

SEQ ID NO: 144605 - DNA, 579 bp, Cannabis sativa
  modified_base (365)..(388): a, c, t, g, unknown or other
ataaagtgtataatttgttcttgttgaatcctcaacacatgaacaagaactgttcttgagagaaaaataatcttcgttttctttgtatatttcaaaaatagtgtatcgaaaatagtatatataaaagtctgttctgatttctcaaattagatatctatttataatagtaaattcaattaattaaatcagatataattattcaaataaatatccataaccgaatcgattactgatatttctgatgagggaatctctcaactactttaagagaattaatcaactaaaaatatatttaactacttttcaaattaaactatttatctaattgaattaatgaattaattaattaacctaaaaagaaaaannnnnnnnnnnnnnnnnnnnnnnntagacacagtgcatgtggcgcctcttatgtcttgtttaagacaatgaatgtgccttttgtcttgacaacttttatcttaataacttttttctttttttttctatttaaatttgaaaaattatttattacaaaaataaaaaattactattttgacaattcaaaataattttttccaaacaacattatacaac

SEQ ID NO: 144606 - DNA, 1220 bp, Cannabis sativa
  modified_base (548)..(550): a, c, t, g, unknown or other
  modified_base (1083)..(1083): a, c, t, g, unknown or other
aagtataaaaagaattacaaatttaactaaatgaacatggtcgcacgtggtatgaaaatatatagtgcgaacatgtgcgaccctatgggacttgtgcgaccttggtggttgtttatggttattcagagtaaattcaagttacatagtgtaaatataaggtcgttcatagtcgttcagagcaaattaaagttctttaaaattggttgaagaacataaaagaccattatggtcacaaagtataaattcaagatcgtttatggtcgttcaaatcaaattcaagtactttaaaattggttaaagaccataaaattcaaggtcgtttatggtcgttcagagcaaatccaagttctttaaaattggttgaaggacataaaagactattagggtcgcatagcgtaaactcaaggtcatttatggtccttcagatcaaattcaagttctttaaaattggttgaagaccatagaagaccatgatggtcgattaatataaattcaaggttgtttatggtcattcagattaaatttaagttctttaaaattggttgaannncataaaaaaccatgatggtcgcataacgtaagttcaaggtcgtttatggccatttagttcaagttctttaaaataaattgaagaacaaaaaagaccatgatggtcgcataatgtaaatttaaggtcgttcgaagaaaatttaagttctttaaagttagttgaagagcataaaagaccatgatggttgcatagtgtaaattcaagatcgtttatggttatttagagcaaattcaaggtcttttatccataaattacaaaaatcaaaattataattcaaaagactgtaataaaatatatatgttacctgttcatgttcattgagtggtgtgggtattgtggttgatgcatcacttgttgattccattataattctgaatgattagttattgcaaataagagattgagtgaagaaaaatattaatggctacaactaaaaaaaaattaaagaaaagaaacagaatgagaagagacaagaaaattatttggggtttacctctgttagaatgaatctcaaattcttttgtctatggctnccaccacttgccaccattcatgaataatggatggtctctttggtcttaccagcaagtagaagaaagaggagtggaagagaggaagagaagaagagaagaagaagaagaagaagaagaagaagaatggttcacttgtg

SEQ ID NO: 144607 - DNA, 504 bp, Cannabis sativa
ttgagaagtacaaattggaagctgaacaacaaagagcagagatgacgaggctgggagaaaaagtaaatgccttagagacagctggtctcgagatttttttatgacttttggaaggctaaccctcaggccaattttgattacatgggagaggccaaagacatgtatctcgagtactgtgcttcccaagtggcctatggtgaacctaaggcgaccacttctacttctggtcagaacgttgacgtgccccccactcagacaacagatcctccagctcctaccggccctgaagacccgaaccaagagcctgggactccagctatttaaatacttctctttttatctttctttccggccataagaacttttatatatctttccggccataagaccttttttttaagacatcgcgacaggccaagcagtctttaaacttggaattatttttcattttatagacaactggctgactgggcagcttttaatcccgatattacatgcttttgt

SEQ ID NO: 144608 - DNA, 852 bp, Cannabis sativa
  modified_base (225)..(229): a, c, t, g, unknown or other
tgggactacctatgttagcaagaagtatcttgttttggtagctcaccatgagggaactccatggttgagtgtccttgacttggggtgacttcattcaggaaatttccccatgagccgtgcgagtcgaagcaaagcaccttggaaacacttggattggttcgtaggggccaatcgtcaattcaggaagcagctagagtgatgcactcgtgtataagagccatcatnnnnntgggagtaagggcccaatggaggcttgaagtggagacattgctagggtaacgtataaaagaacgtcaagaagagtagtggtatcactaaggtaaagaagattacctaaattacttaaggtgatacggtaatgatggagagtacttcataattgactagatagtcaacatagtatataaagagaccattgaaattttgggaagaaattactttattaagcaattatagaaagacatacttacccagaatggagaaaagcttaaaaattgagatgcaatttattggacatgtatttgagtgattggtaaatatttgatcacaaagtaggttgtttattaaacaatgaactatatgattgagtataaaataaattttagggtagttaaccaagtatgaagatagtgatgattgcaaggcagcactggtggcgtatgaactagggagcaaaaccttagtggtaatgacgggaaaaagtatacgacggtcttagatgttgatgaattagcatcatcagcgggggacttactataagttggcatagtagttcatgccaagggattgtcaataaaaaagagaatatacttgaggtatgtatatttttggatgtatttgaaaagattatca

SEQ ID NO: 144609 - DNA, 604 bp, Cannabis sativa
aaacaaaacaagttaataagtgcacattaaaaaccaacaccaaatatatataaccaataaattgtaactgccaccccacataaaacacaaaaataaaaataaaagtgccacatcgtggcaaaaacagtggtaaaatagttaccacccccactaaatactctaaccaatgaaaaaaatattaaaaaaacaattttaaaaaaatagaataaaaaataaaaaagcaaaaaatcaaaatacaaaaaaaaacataaaaattaaatataaataatactattaacctaaaaatttaaatatgttgcacaaaaataagtggttacattttataagcataatcctctagtctggaaaacatattcaacacaaacaaaacagaaaaaaaaaacctagaaaattcatgaagatttaacaaaaattaacaaggaaaacaacaaaatcaacacaaactcaaacttaaaacaaaaaaaaaaactaaatagaacaatgatcaacaaccaaaataagaacaaattttgaaaaaaaaatagaaagaacaaacaccaaaataccaaacataacctaaaaacccaactgatcatcccaaaaacaacaataaacccaaaaaacc

SEQ ID NO: 144610 - DNA, 1059 bp, Cannabis sativa
tagttactaacttgtcaacgcgtacacttgcgtgttgaaattatcacaacaatactaaacgtgatcgtagcctgcttaacaagattgttgcggctacttgtgcgacaacagtttacttcatctagtagaatcgaaatacttgcatttctgagcaaaaaatgtttaagattttttatgtgaacaatttgattaaagtagcgcttaaagcgagattatttcttattgataggaggaaaatatctaaaagagatcagtaaatttttaattttgtttgtaatatgtaagtaagtcggtcttttgttgtactgtaattctggtttgtgtagcttttttctgttttgattaattaaatttctcttttaataaaaaaagtatcaatgatactaattatgaatgtattaaaagaattaagttaaatccaatagtagtaaactaagcatatataaatgattttaaaaaattacacaataaaaatattaatagaggaactaaagatttgtggtcttcgacatctcttgtttgttgatccaacgaagtcgcaactattgtacgaaaacttgtctctttcttcttctcgcctgtacgacccagttgaacaacgacggcgtggggtggactggtcggaggaggaggtagtgcggggtcagtcggatggccgcttattgacgccttcagtaaaaattggtgacagttatatactactttttcattattatttaattttatttttatttgttaaagaggtcgttagtgacattggttcttaattctttttaattctttttattacttttaaataaattgcaatcagttttttgagcagttatttacttttaatattcttttaaagtatttaacttttattattattgttttaaaagtattattatcgtattaactcaaataatgagagttatgttgctatttttatgagttgtttttttttaaataaattattattattatagctaatttggatttttttttcccgaacttcgacatgtaacaaatcatgtcccctgaatttttttggccgttaaaaattcccccttaactatt

SEQ ID NO: 144611 - DNA, 853 bp, Cannabis sativa
aatttttcaagataatctatagggttagaggtacctttatattttagggattcggatagacgaaatcccttgggaagttgggtttttcgcacttccgtagtgaaaggagaggtcccatgcagcttgtatatgggctttctttgctactcgagcatttttaaagcttgcaaaagcatgctttggtcaattcctccagccacaggagtcgggactgctgtgactgcaggagtcgcaactactgcggtgaggttcgctgggatagtgatcccagtagtcgcagtcgatgcgataggcgggttattgtgagtgtttataccctgattgcccatatggggatcacggggtgtttcctcgttatcggcggcgcgagaacgcgctctgaaaactgcgttgaggtgattacggagatcacctcgatgtacctgatagtgtccccctgttgcgtttctacagagccggaccttgtgtatctacttggtgtacgaccatgcgaagacgaagaggcagattttgcgtcattgtctctcgatggtcgactgcgaggattgcgtcgctcaggatcttcatcagcctgtgttccttggttaggatatctcacggattggtctctcaatgttggatgattcaggtccagaccctcggggttggttcttcgttccctgcgaacacggttattacgacatctagaatttgttacctaagggttgtccgtgcaagtagtagggactcgagtggggtgtcgggcctgattctgtcaatccacttcagcctgtagtgcacgcagttggtcctggatcgcagtatattgatcagtggtgagctggatgattccctcagataccaccgccggagt

SEQ ID NO: 144612 - DNA, 1704 bp, Cannabis sativa
  modified_base (382)..(383): a, c, t, g, unknown or other
  modified_base (1190)..(1207): a, c, t, g, unknown or other
  modified_base (1330)..(1330): a, c, t, g, unknown or other
tgtattggtcttacaggcgagtgtttaaataatacaagtgtttacagtattaaccttatctttgcactccttttatttctcttgatgaagaagaaagcttgtaggaatttttgtagaggttcggctagtaaaaaattgttcaccctttgtacaaaaaaaaaataaaggtatttataggcttacatgtgtgtaagggcattccctcttcccaccttgtgtttcatactcaacacactgcaaaagcaggcactacaacatgacgatctgactgttagttggtaggaaactttcccattgtgtggtgtacgactgctatgaagtatttcattgtgtggtggtccaagctagaataaaactcaagaaatatttggtataaatttanntctttgactttaaattttaaattttagtttccagaatacaatacagagaactttcacaagttgctaatatcaatttttagtcaatggattcgaactgtatgtttatgtacggaatatgagttttgtattctgtgaccagaacccacatggactattctaagaactactctttgttgtaactagacctaaatcatcaaaagaccacaaccaaaataatctatctatggcatttgcattttgttcatagtggttttgacaaaattattctctacaaagagtaaatatgccaatatccacttaaaagtaggatcatcgatattcgaacatatggatgtacattcaggggtgaatatgagttattgttaaattatttagacaatcactctagattttaccttctgcaaagaaattgaaatgtttgaaaaatttcataaatttttagcaatgtttaaaaatattaaggtaagtggttgaagatcttgcgaattgataggggtggacaaatatttagttatgcagttcaaagatcattaaattgaactttgaattgtatttaaacttacctccctagagatttaatttgcatattgatgatagtataacgtctatgcttagttactagcagttgcctaagtccttctagggaaatactctagtgataggaaaatttcataatgataaaatggttatgtacttagtgtacactattactagatttatcgatgtcctgatcatgaacttaagaaagctagaactgttaacttaagtttgcatgtttgatggctattctaagtgattaggggtggnnnnnnnnnnnnnnnnnnagataagaaagtgtttgtttcaataaatactacttttctaagaatatgactaaatatgaaaagaaattaacaaattagaggagatactatttgattctaaaatgttctatcatcttattctanataagatggtcccactgcctctattatcttcacacaactaatgaggttaataccacttatgtttctagacagaaagtcacggtaccttgtcgtagtgggatggtttcaaggaactcaccctattaagacttgggagacacttgtgactaaaatccattgttagtttagacaagtaatggattgtcaaaataaggaactaagaagcaaagccaagagaactatggttaaaatcattcaaatggagtaaccaaaggttttctagtacaagggcaagaaaggaattttttgataataagtctattcgatggacttaacaaaacttcctgattctagtatcataggtttgagtttatctaaacctatggcttgtggta

SEQ ID NO: 144613 - DNA, 709 bp, Cannabis sativa
  modified_base (599)..(622): a, c, t, g, unknown or other
  modified_base (670)..(684): a, c, t, g, unknown or other
tttttattttttttttaaatctaattatttaaatatcagaaaataacaataataattataaaaaaaaatgaagaacggtttggacaggttaacctagccaaatcgacgaaatcattgggcgggttgaacttttaataatttttaattgggcgagttacgattaaatatttacaacccgatatttatattgggttttttgactgaggttttcggcaaccaaatatctaatgtaataatgagagcttacggataattaatgcgaataatttttacgtggttcaaacattaatgagaagtagtccacgagtctctgttattaataagggggtaattttttttacaaagaatgtttgtttgtgtcccttttttcccatccccttctacctgacctcgagttggtttctcccttttgatagcttattaggagatgacgacaccaactttttaatttatgaatttgctaggacaaaaatagatcgccggggtaggattagtctcgctgcactatacttgcatttgtaattctttggtgtcattctaaccttctacttattttgaatagcgaaccccatggaggatctgttgggttttgtgccctnnnnnnnnnnnnnnnnnnnnnnnncaaatttacttattaataaagatctgaaataacatttaatgttgcatnnnnnnnnnnnnnnntttcatgattatttacataatgtat

SEQ ID NO: 144614 - DNA, 548 bp, Cannabis sativa
tattttaggttgattagaattttttaacatctactaaaactaaatcgtatttttaaactttttacactgttaaaaatttatctaaattattgagattatagaattatatgacttacattagcatttattatatgtatttaaaagtattttgaaagttaaaagtaaatacgtaaaatagtgagtaagttcgctcttaagcataagtgggctaagtccgtgcttaaggttcatatttttttagggcccaaaataaaaaataataaaaaaaattattagtgtaaataacaaatattcacagcttcccacaatattttttttgaggaaattagattgtatatccattttacttaatttgttttaatttttacctctatttttatattttttttatctatacctatttttatggatgatgtttccattagacatcttaggttgtataaatttactaaattatatgctagatttaagtagagagtgatggtatattaggcaattcactcaaaaaagtgggtatattttaataaaaaataatatgagggtatttt

SEQ ID NO: 144615 - DNA, 778 bp, Cannabis sativa
  modified_base (62)..(76): a, c, t, g, unknown or other
ataactagcccaaattgggacttgatttttttgtaagaaattagaggttattcttgaatagnnnnnnnnnnnnnnnaggttctactgtatatatattttacaattattaaggtatgtgtatattttatagttttagttatatttatataattttcaacaatattttaccgataatcatataaaatataagaaaatattagcatcattagaatatgaatatttttattctatataaaatgtggttatgtaacataatttttggtttaacgaaattttttagttttctacattaactttaacagaatatctcaattacttaacataatattttttattaattttataatattattatataatatttaaaaataaaaattaagtagatattttatataaaaaattactttaattttacgataactttttgttttaaaaataattaatgatatatatatgcttctaataatttgtacattttattataatcacacacttctaactacaaattaaaaatattgtatctatcactatcattatttttttaaaaaaaaatatatgtttggacataatatataaaatatattttgaaattaattaattctctaatcaaactcaaattttataagaatattttctaatataatccttatatatagagattaatataaattacgtataacaataaaattcattattttattgttatataaaatatgtacatatataatcacatctaaagagcacaccaatataatcgcaatagctaaaaaaaattctc

SEQ ID NO: 144616 - DNA, 947 bp, Cannabis sativa
tatactccatacatttgatgctagcatactttaccaatgtcttagaaaggacataaaacttattcaaggtgtaagtaagctttatcgctgattatcatgttagtgtatgtgatacccaaaatttgactatcattttaaaaaaggacacatgtcaaattaggaagaatatgaatcaatgaatgtaacagtaattatatttgaaaatagaagagctcattaatgcggaattgacagaatatatttacaacttgctgactgaaaggtcttatgaaagataaagatacgccaactgttgcctcgtatattaacgagaaaccatatatggcttctgatgtacaaggcgaggcatcaacctcactatgcattaggagacaagacatggagactggtaagacacttagtgtataataccccttatacataataagtataacaatctggtaaatctaaacaactaatagtgaggcacctatctcgccataggaaggtgcgctcatggtatcttcatcaatcagctcccaacacctttcaatagggtctatagtttcgtcaagtcagctctcccagatagaagctgacatacaatcgatgttgactgctatggtccactttgttaccaagaactgcgattttcaaatggagcgttgtcttcaagcgcatgatgacgaggcttacatcatcaacctcggaaaaccatgggaaaggtgtcagcttgctaccaaggccattgttaccgtgttcccagcgagacatccagagcgttacagtttacaacatgtttaatacacttttaccttcacccggtaaaagcggacctatcacaactgtataataattaaatattaaccacatttattttacgtggtatgtaatcaaatccaacgatttcaggggataattgttgtaaagatatcagtcaactgtgtaattaactgcctgactatgta

SEQ ID NO: 144617 - DNA, 884 bp, Cannabis sativa
actttgcctcaatttcaggagagatgggatcagcaaatgaatcgttaagagcgtaaaggcccttcacataagtaaccatcttaaaatccctctcatctccttctgattgagaacctgatgacatacctccattggagtgctcctcacatcagccgacccaaaatcaacaaaaggcgatttcaatgtcggtgcacgctttctcttatccaaaagaggagtatcagaaatagtgtcctcagcttcttcatcagtatgaatggcagctgtctttacaccaacaacacctggattgggttctgggacctaaaataacaatatgaaaatcagaaaaggaacagttgcaaaacaaacattaaattttcaagcaactaaaataaaacataatttacttgcaaacaaataaagatacacttacattgattttacgaatagcctctaaaccagccaacacaacttggtcatcatcaatttcaagctagcttaaattatcaaaaaaatcatccccctttaaactagactctttggccttaaggttctcaacatccttagccctctcatcactgcctgcaacaacctcagattgattcacatcagcaggaggaacatcattaacaaccttatcatcttcagcagcatcaccaccatctttaaccaactcatcaccatcatcggattcagaatcaatattttcaagatcagacaattccttgtcatcatcctcggcatcatcatcatcatcatcagaatcttgtgttactaactcatcagatgattttctctgatttatacaacaaaaatgcaactaaaataagataggaaaaaaactaaaaacaaagcatgtaaaaacagaaacaataaactataattaaatacctcaacagaag

SEQ ID NO: 144618 - DNA, 549 bp, Cannabis sativa
ttgactcctcgaacattccaactagcaattttatccattgggaagaggaggttctccccctcctcttgtgtccccaatgatttctttgcctctctcttgcataagcaaagcattatttccaccttctatttccccatcatcttcctcttgtccagtatcttgttgcagcctgccaaatgcgctagccactgctataacagctggttcttttccttcagttatcttctccttccatactttctttggtagctcaaacccatcctcatcactggttgtctttgcctgagtctccacattaggttttttgaccacccattcagttttgtttccttctttcttcctacaatgaatagcaacatgaccaactcctttgcaatgagtgcacgttgtaggtttccattcatatttcacaaaaactgaaatgtcatctccatgttcatcttcaaaatcaatctgctctaggaaatcttgattcaatgaaacttctataaggattctcggatagttcagcttctcctttgctttagtaaaagaatcaagcatcactgg

SEQ ID NO: 144619 - DNA, 876 bp, Cannabis sativa
  modified_base (439)..(442): a, c, t, g, unknown or other
atagaacatgattttgaaaaatatttttacttttttaattttaaaaacaaaaaactgattaaaaaagtgttaccaaacgccacgtaataatttattttattaatttaaacaaacttgtattaaaaaataatgggcaatattaagagaatttgaatttttatgcttaatttctttatctaataaaaaaaatctcttatttttgttggagttattttatatatgatgtgaagatagtgctatattggagaagtatatctactgcaacctcaaatttgaaggatcgttggagttgctctaaatatgttataattttacacaaaatttgaggttgcagtagatatacttctccaatatagtactatcttcacatcatatatacagtctttgctgtaatcactttaaaaatctaaaccgtaaatttgaaaaaaaaagttaaaannnnagtatatggggtaattctccaatttaatgcttcataattaataaataattattttatttttatatataattaacattaaataaatatataaaaaatatttttatttttattttctaaaataatatataagattcctgtactcaatctaatttaattaacagcaatatgattacatattaccctatacaacccaacacagtttacctatttccctataatcatattctccttcgtaatattccctataatcgaacaccccgtaccaaacgctcttccattggattagttttgagttaaaattctactatttttgagattttaatgtcccattggagaagtccaaaaaagtcgatctcatttccaaaaaaaaaaaaaaaagaagaagaaaagttggaaataactttggaaacagtctcattaccaaaaaaaaaaaa

SEQ ID NO: 144620 - DNA, 1417 bp, Cannabis sativa
gattggattggatcgtgcggattagattggatcggatactttgtgaacacccctactttatactctcatgtgcctgtaaatttgtgcatgccatgcttgattctatgggcggtcttatttggagtagttattataagttttttttttttttttttttcagctttttagaattataatatttttttttaggagtgtttggataaaaaataaaattatttttcaatttaaaattaaaataaattacataattcttaatttactcataaaatattttttttaatgatattcaaatacttcaaaaaataatttttattaaaaaaagatcttgatatagtagttcatctacatagtaaatagagtcaaaacttatttatacttctaaatataagggtatataagtaaatagagccaaaactaaacgggatctttatgtacttttcaaaagtaaaaattacacaaagtatcagaaaatttgaaggctatatttttttattaggtattttaatgcatttttaatattgactttacaaatatttttgtggaaattacataaactatgggaagagtttaagatgaagaaataagagaaagtgaatgaaaatttctcagttgtttattctaatgaggtgaacccctatttatacaaaagtattgactaaatagatgagaaattaaattaaaggaaaatacaatcaaacattaatgatgatgattaaacatccataaatgatatttcataacaatttcccttggatgtccataaaaactgtctcattaaaaatcttgctaaaaaacttagtcaaaagaaaaaggagtgcagtgtaaattaacttctcctcatttaggcattcgtggagatcttttaatcgatgaattctaatattgtgagctatcttcttaaatgttgatgttggtaatgactttgtgaataaatttgcaagattgacacttgattgaatttgttgaacatcactatagtcattctcctttagatcatgggttaagaagaatttggtgaaatgtattttaattctatctccttcaatgtccctccttttagttgagcgatgcaagctgtattattttcatagagaactgcttgtgttgatacttttttattgagtgtaatctttatgtttcccgagtatgttatgtcaattatctcactctcacacattctctacttacttcataaaatgcaagtatgttaacatgatttgaagttgcctcgttaaaaatcttgtcagaaaaactaagtgggacaaaacctgagctaaggaaaaagagtgcaatataaatttcatattcataactatttgttagttgcctcattaaaaaccttgtcaggaaaacccagtgggacaaaacctgaactaagggaaaaaaaagtgcaacatgaatatgtctccccgtcatg

SEQ ID NO: 144621 - DNA, 838 bp, Cannabis sativa
  modified_base (29)..(46): a, c, t, g, unknown or other
actcgttgtatatttggtataaatttaannnnnnnnnnnnnnnnnntagattccaaatagaaattttataatttttatttccagaatacaatacagttaatgtaaagcccgtatttataattaagtaaattcaaaggataattttaatatattataacttgataagcatatgggtcgggatcccgattatcacaatatgatttaaaagtatcttactagcatatacatatatatatatatattttatacaaatacgtgaataggcaactcaaaacacagactcaaaatagtaaaagaccgaaactctccaggttgcattgccgcgatatgtacaatcagtgtcgagctccatctcactgttcctccagcttcgcttttcctttacctacacaagatagcaaactgatgagtcaatagactcagtaagataaacaagacatatatacaagtaatgcgatgtcggctctatgcttaagccgccctaagctcaatattgagctcagcaaatggttaagaacgttcttaagggaagtaggacctctgcaccaaatgcaccaaagtaccaactctgtactcgtgttggtagagtcatcaatgtactcccgagaatttactaagtgttgtaccacatgcacgacgtaccctctagtactcgtgttggtaacaccgtaactacaccgatatcctacactatactagcactcctaaaatcacataaacaattagtgttagtactgtagataattaaaaacaggcatatattcatatataaattcttatgctatcttaccttgctccgtgctcaggtgtgccagtcagcctgagtggaagtgcagct

SEQ ID NO: 144622 - DNA, 577 bp, Cannabis sativa
  modified_base (545)..(551): a, c, t, g, unknown or other
ggtctgaggctaggtctgtgttcggttctaggttttggtctaggtcttggtcatggtcctagtcttattctatggtcatggtttgccaattcttgtttaggttctaatttttggttccaaggctaggtcttggttcgggtttggttcttcttctgggttttggtcctagtctgagtcccagatcaagacaccgactactggtctgttctaggccccgttacctgaatcccgagtcaagatctcgatcactgtcacgggtctcagtctggttcaggttcaggtcccaggtcccatttctgaatttgggttcgggatcgagactggggtgcggtcccagttcccgaccctggttctctgtcctgagtctttttccttgtttgggtatgagttcaggttcaattttgggtcctcagtccaggtttgggttgggatccaggtccggctcccaattcgggtctagatcggatttggagtctgggtactggtccggtttcggttatggttctaagtccaatttcagttacgattccaagtccaagtcctannnnnnntcccggtcaacttccagttttggttc

SEQ ID NO: 144623 - DNA, 984 bp, Cannabis sativa
gacaaagagtaaggtgaaggatttcaagttcttaaaggagaagatcgtatcgaagagctacccttattagaactgtggcccagagcgtccctctttactcgatgtcttcttttcttctccctaaggttctatgtagagaacttgatcaagtgattcgtaaattctggtggataggagaaggagataaagatcgttatctcacccttgtggagtgggatgctttgtgtctaccggtggaccagggggtcttaatttcaaaaaatgtggattcttggttgcatttgttctgtcattgtccgttggccaaggccacctggtatggtagtcaatgggcgattcgttgtgagcatttgaacttttcctgtcttagagattttcttctgtggctgcttgatccaggtttcttagggagtgcaagcaaggaggatagagaggctttttccaagtttggtatctgtttgtgtgatgaactttggaatgccaggaaccgtgcctaccatgatcaggtgttcccgtcgtgtatgggagttttagcaagggttaactctgcttgttcgacaatggtgggggcctgggaagctccggctttgtcccactctgaggtcggttgggagaatggtatggattggatcaatggtagaagtgtatatattatattactctataaagtagtgtatattggtctgactagtagaattaataaaaattttgtatattaaaatagattatgttgttgtattattttcaagtaatagttttaataacatgcacaggagcaattaatcaaatgacaaagaatttggcatgtgaatgggtgaaggacaacattcgtgtaaacacagttgctcgagggcttactagaacctcaatgttagagaattattcggtcgaaatttactgtcttcctttttttttatatataattttaagtaatttgcggcataaatattaaagtttaacttacaaataaatacttaaatttaa

SEQ ID NO: 144624 - DNA, 503 bp, Cannabis sativa
  modified_base (305)..(308): a, c, t, g, unknown or other
ttttctgaaaccctaactctctctctctttctttctcgttaaaattattttttttctaacttttttaaatttgaaaatattgttaattattttttataatatttaagttattaatactaagtggaccaataaaaatttgtcacatgtactttacacaatggcagtccactatggtaaatagatagaaaagtagagaacaaaacaaaattgaagtttgaggggttttaccctaaaaattcagtatgtcaaatttaggtagtttgaccacaaattaccttattaaatattaaataaggaaaaaaaannnnttagtatatttttttttttttttttttggaaattaaactcttattaacaacaaccaagagtttaatacaaatcaataagaaaagatatataatcctcaatctaagccaattcaccctaagtgcatgcacaactaattcatgagaaacgaacatgaactagggatgccttaggaaaactggaaagcaaagtagcaa

SEQ ID NO: 144625 - DNA, 2028 bp, Cannabis sativa
  modified_base (1766)..(1770): a, c, t, g, unknown or other
ttattatcacccctctgattctgattgaccttgacatacttctgtacatgcgggttatttttccttatcagtaattcaatttcccgcttctgattgttgcattaattagtgtcttggtcgtagtctccatgaaatcaacaaaacttggtcatgtctctcttgctgacatcttttttcatgggtgcgggcttcttctacgggcctagtgactgagtggccatgtaaacactttctatatcctcagtcaagatggtaaatccagtatatttggctttattctcccggggagcttgttcggttttgccgatgaacttttcctatttcccattcccttgcctattattgttgctggaacgtttaccatttgaacttgaattacttgggtaatgggggagctggacgaatgtcccagtgaaaggagcttttaacttgctaggttttggctcaccctctactcgctgaataacctcttcaagtttgataaagccttcagcacggttgagaaaatcgctcattgagtctaccgaaccgttcttcctcatgtccttccaatgctcaccaaggacttcaatgccgcccagtatcgcggacaactttctgtcttcagttactcatgaaaccttaatcgcctccgtcatgaatctgttgatgtaggctcagagtggctcgcctagtcttgtcttgacttcgaccaggtctcctaggtgcaacggaagttggcgagaggatgaaaattgtgcatggaattcctaggagaaagctttctgtgagttgaactttctaagtgccagcttgaagtaccattgctgggcggctttcgagagggtggcaggaaaaattctgcaacatacgtctcctcgtactccctacaagtccatttgcatctcaaaatatttgaggtgggaaagaggatcttcctttctagtgtacatcttccaggttggcattttaaacttgtagggaaacgccagaagactgatcccgggggagaaaagggttctacgtgctcggtccaacttgagaccattgtttctctgaccggccatgccttggaacatattatttagttcgtccagctgtgcctgcacatctggactaacctgtttggaattttggtcgatctgagtcacgtcagtatctttctaagcaagaatttgagtgcaggttccgggctgcatgatcggcgtgtcaagctgatcatctactcctctgctcctattcagatcgtttctgagatcatgagtcatccctaacctatcgaatacggaagcgcctggttgtctcagcgactggttggtttggctaatgtgctggtgactagcaccattaacttggttggaattgtggggtatgacttctctcgatgaattactagacaaggtctacccacctactacttggaccacaggcaggacctgtgactggagatttggcgactaaccatttatagtctaagagatatttaatgctggatcttcgtctatttcacccaaggggatgacattcgagggttgttgcttgacagattgataggcttttcatatcagcacagtggcttgccgactacgattatcaatgactgcatgatgagcccttaatggttccatctccttgtccttccattcggcaaacatgcgcctctgctcttcaaacatgagatttaccgcagcgcggagttcctcctgatcatgatgtcgggtgttggtatgatcctgcgtgagtccaagagtagcacggaggttctggatctcagtgtcatctccaannnnngtttgaacattggtagcgggtggaacgactgtgctatgaacgccctggtcagctactgaactggtattcccagtctcttgcacactaggcacaatctcatccacaagagttgtcacaccgtgatacgcagttgacagttgtctgggatttacggcatgcggaacccttgtgtttcctagattctgcagtgcaggatccaccgccgtacttgtgattaaatttagaatgaagagggatccttgattctgctctcaatga

SEQ ID NO: 144626 - DNA, 820 bp, Cannabis sativa
atatgtacttttttcatataattaagatatattttcagtttttgagtgaattgtttaaataattttttgttagagtatatttttgtatttatatttgttttaaaattttattacttcgttttttgaatgtgattatgttttttatatacttaatagttttttattttgtttttttttttaatatttttaagattttattgcagtttgttcaaatgtgattttgatactatataatttaagattttttttttcatttttaagaccttattgatgtttgtttgaatgtcttttttatattgtatgccttagttttttttgtatattataggattgtacttttctttaatttatactctattttatactttcttgcatctgatttagtttattgatcattatctggtggttaatatacttttgtttatcattaatatgcatgattgtgtatatcatgtgatttttgtaaatttttttgtttttgatactgcatactttagattttttttaattttttatttttaaaaaatgtgtttgtatattatacgattgttatatatgtgtatttttcatatgattaggatatattttcattttttaagtttgttgtttagataatattttgttggagaatatttttgtatttgtatttattttaggattttattgctttgtttgttgaatgtgattttgtttctgtatacttaatggttatttatttatttctttttttaggattttattgcagtttgtttaaatgttattttaatgttgtataatttagggctttttttttcattctttttacaattttattgatgtt

SEQ ID NO: 144627 - DNA, 856 bp, Cannabis sativa
aaaatggtatttaccctattaattttcaatgttacaatacattaaatactgttgtatatatttaatgatctaatatatttattcgttttcgttacaatataataatatgcaatactaaaaataattatataacctcatttacatttaactattatatttttttaaaaaaaatatatgtaatatatgtatttttataatttctattatttaatttattatatttggccattttcttattttttttaaaaaaaagaggacatttactaacttagttttcaaaattatgaccattttgcatcttagccctatataatactcttgtttcctttatgtggcccatgttattttcctttatcacatatatagaagaaattacactacataccttttttaatttaatacttttaatttttaccctctttttcaaaatttattgtatttatctcttttttcaatcattctaccaattttacccctatcacttgacgataattttcattcttctctaatcaaaattttggcccaattttctcataaacatacacatgtatctataaagaacacaaattttttatgtttggaattatgtcttaattatgtgagtgtgtgagaataatttcgatataatactcataaaaagatgtatatttgaattaaattttatatgaagaaaaatttggttaatgtataaaagaagtggatattcttcaacttctcccacatatatacacatatgagtttgtcaagggaaatttgaaaaactatactttaaaaaccttaatattttattcttaaaccagtacatttcaagctaaaaaatatatgacacttttataaaaaacccaaaaataaccct

SEQ ID NO: 144628 - DNA, 1059 bp, Cannabis sativa
  modified_base (467)..(469): a, c, t, g, unknown or other
cctatcgtaagagtatacacattacatcataataaccacatgatctaaaatcaatggtcaaaaaaaattccctaccggtagggaacttttgctaggtcctaccatagtcttgccctatatatatagaataattcaatgatggtaactatatttttgttcttatatatactatacatacactttcttaaccatctatatgacttttaaaagtcaacattgtataacatgtatttgtttgtagcttattaaattttttattttttattttaaaaataaataaacaccaaattaaaaaaaaattaacaaccaatcaaaaaaaaataattttttttttaccaaataataactttcctttagtgtaaatttttcaatttttgtagggattttattagggttgttatacgattttttgttgcaatttaggttgatcgttagttacaataggatttttatgtagaattctgtannnatgcaaaaaaaaaaaaaaaaacagcttagaagtgtaaaaataaaaaagtcccttaattagttcaacaaaataaataattattgtcttaattgttttggtaaaagactcgaagaaactactttagaaacccaaaccgtaaatttgaaaaataattaaaacagaataacatatagggtaattccgaataattaattagtgaatactcatcttatcccgaaataagaaaataaaaaaaagagaataattagaagtgggactaagataccataactttttaaaagtaataaactttaacttatatcattaatacttttcatcaaacctcactaatttacatcttaattaattaattaatcagcacaaaaaaaaaacatgtaaaaatttaatgaataaatatggttcccaagcaaaagaatgggaaagaaatatggtatttttgaaggtttgagtttctgaatgaaatagagaaaaagaaagaaaaaaagattaattaattggaggaggtaagaataacttagtaatctatttaaataattattatttagtttaagagtattattaaagaaattaattttatgaataatctagta

SEQ ID NO: 144629 - DNA, 888 bp, Cannabis sativa
atatcttttttgggcatttttgggcattattggggcattattgctttcccctgcgatatgtggccctctcaaaataaccaggatgtcctttccttccacacgaatatgttgtaacccctggttatttgggttattgggcagactaggctagttgtatccttggccctgtcttttcacgtactgcttaaaatggcctcgatgatgagactttctaactcgtctttcaattggcgacattcgtcggttggatacccaatatccttatggaatttacaatatttgttaggatctcttttactcctcgaattcctcataggctcgggtttgccgaaggctaccttctgctcatgtgcgagataaatattctcctgagttttattaagctcagtataaaagtatacactgtcacgtatttgtcatgcttcttttgtttctttctctcctttgacggttccttaatttcgtcctttctcttcggattaggagcccccaagttaacaattgtcgtggaagcagtacctgtggaaacattgctgggtttatttcccgagcttgttttcaacaagttcatctcatttcaggcttcttcctttaggacaaacacctgagcccttttgttgaactcagtgatgtttctcaccagacgtccttgtaagtcatccaatttctaaccctagcggcagtcgtgctaaaatgacttaagtacgccttaagtgtcttgctaggctgctgctttatattggttagcgaggccgcttcgggtcacctatccctagtggctttaaattgctcattcagatccctagatagctgctcccaagaagttattgaatgatgagtaaatttgttaaaccagctactcgctgctccaacaagcgaggtgggaaa

SEQ ID NO: 144630 - DNA, 951 bp, Cannabis sativa
aaaaagaaatttcagatgatgaagaagatgatgagatggatgtttttactaaaaattttcagagatacatgtaaaagataagtgacaaaaagaattttccaaaattctccaaatgtaatactttttctaacaatcaaaagagaattcaatgcagaaaatgtgaaggttttggacatattcaatctgaatgtgaaaatacactgaaaaagaataagaaaattttcaatgtcacatggagtgatgatgaaactgatggtgatgaagatatttctaaaaatgttgcacttatctcagtttcttctaagtttgtttgtgattaacaggtaaaagaaagattggtatgtttgaataataccattgaaaaagaaaagtctgattctgatgaatctgaaatctgtgaggagtcactagctgagtcttacaaggctatatatcaaaagtggatacaggttacttctgaaaatagatcattgtcaaaaataaataaataattatcccatcaaactgaatctcttgaattgaaaattaaagaatatgagactgatttttgtttaaaagatgaagaaaatattctattaaagaaggaacttgaaaatttcaagaaaaatattcaaatgcttaaccttggatcttctatttttgaggaagtgacaggtcaaagaggctttgctggtcttggatcaaatggtactaaaagttctggaaaaaaaaaatttgtaaaatctaatgttctaaccaatttacctgctgctgcaaatttaagatctgctgctacaaaaatgtcatctgcagaagcaaagtctccagtaagttcaaaaaggataagatatcatgtaagaaggtttgttccaatctgtcatttttgtggtattaagggacatattcgacctaaatgtttcaccatgcaaaatttatacaaaacaagttattttggtaatttgaaattttttc

SEQ ID NO: 144631 - DNA, 804 bp, Cannabis sativa
tgaagatatacaacaaaacgtccagtttatccttttcaggttagaatcgagcgaacccaatacttcatcgactctactgtaagacactattagaataaaggactaatttttacacttttttttaggggggaaacaaaattaacagaaaataaaacaataatctaccgtcgtttctccgcttgaaaacataacgctccatctgaaaatcacagttcttggtgcccaggtgaacttcggccgccaacatcatttgaatgtcagcttctttctgagagagctgacgcggcggggcagtggagtttccggtcgccatggttgacaccgagaatcgcaatggagaattgtttgagactctgcgaagtgcgaagatgctactgatgagtgttaatctgttctagggtttacgaagatgctacttcaacatgtattatataaagatgggcttttgttcatgggcctgcactacttcaaaccctagcaagcaatttttattgggcctgatgcaaactggccctaaatcaaaattaagttaataaatgtgcttttttattaaaaaaaatcaacaaaaatgtatattctgttaaaagtttgatgatgaaattacaattataactttgaataattaagtatttggtatatttattttgcgtatatcgtttttatgtgcaattgtatattaaaaaatattgaaaggtaatattttaatttaagattgtagtgtattattttaatgtgcataatgaacgaaagacagaaatttaaaaatgtggaatattaatataagtttgaggtatagttatattt

SEQ ID NO: 144632 - DNA, 668 bp, Cannabis sativa
ttttgacaaattgggcaatgttccttgcttacactttcacacacttatgcttgacatagtttgtggtaaaatcttcatatcttcgaaaatggtgttataaagctgttacattctatttgatttgtctttaatattcttggtgactgagttaattttttttttctgcgtaaccggtatgacctcattccactagttcattagtttgataaaataattttgacttttcttatgagtttgttttttttcatcagggacaaagacaagcggacattctgtactttttgttggcaaaaatatcaaggttattttattgtttaaaaaataaaaaaatatataaaaattatgtgtgactgacattgtcaattgagttttcttaaaaattcttgttatgtttcactattttcttaggtactatttttgctcttaagtgttgattggtgctttatgtgttgtcttagtttccttcgcagatcaaagcttgtgtgggattgaagctaagcttgtgtgggattgaagctcaaaaattaatggctggaggtatttcgatccttattcataatgtatatatgtttgatttaatttcgcattttatacataattatgtatgtttcagtttatacaaataaatgtctaacaggttgtatcagagcggattatatatctctgcc

SEQ ID NO: 144633 - DNA, 686 bp, Cannabis sativa
attgataaactccaatgcgaagatggaagttgggttgactgggaatcgggtctatcagatgtcatgtgttcttatttccagaatctgtttactagttccaactgtgctatggatgatgttcttgatgagatttctgctactgtgacttccactcagaatgactttctcttacaacccttgactgatgaggaagtgaaagaggctctttttcagatgcacccagataaatcccctgggcttgatggcacgactccgggtttttatcaaaagtgttgggcaattgtgggtaatgatgtcatcaaacaggtccgctcttttttcttatttggacagttgcctactggtcttaatcatactcatttagtattgattcctaagaagaaaaacgccactcgccactactatgggtgatatgcgcccgatttctctttgtaatgtcctctacaaggtgtgctccaaggttttagctaatcgattgaagcatgttctgcctgcggtcatttcaaagaaccagagtgctttcattcctgggcgtcttataactgataatattatgatttcgtttgaggtgatgcattatctcaagcgaaaacgagttggaaaggaaggttatatgactcttaagcttgatatgagtaaagcgtacgaccgtgttgagtggctgtttcttaagaatataatgctaa

SEQ ID NO: 144634 - DNA, 1250 bp, Cannabis sativa
  modified_base (1151)..(1164): a, c, t, g, unknown or other
agtagcctttgaatttgaaaatttaatttttccacaaactagcctgatggttaattttgaaattttgttttatttattttaatgataagctcaaatattacttattttgttataaaaatttgaaatgatcttgttttaatgataatctagttagaatttcatgtttgctaaccatatcaaattttcaaaatttgttattttgaaatatatttcattaaattaaattgtaggattaaaaagtgttagttttgacattttatcttactggatatttattttaattaaaaatttatatttcgtcaaaataacatgaaatatttgaaaagttgttaattttggtttgaatagaaattttagggtttggtaaccatacaattttaaaactcaagatattttgttttatttaaatattaaatagaattgataacatcctaaccttcaaaatatcttattttcaattttgtttattttttaatttatttttattaaactataagattaaaaatataatattagaaatatctcaatcttcaaattaagatattgtattatattatcttatttgatatttaattggttgattttttttttaaataaactgaaaatttgaaaaatagttggatatttgaatttctttttgaattttagatatttaacagatttgttacattttaaatatttttaatattttttctaacaacctaaatttaaattctagttaagatattttataaatattttattttaaaacagttatatcttaacctactttcgagatatctattacatgtttgttttgattgttaatttatttatttatacaatttttttaagacaaacctattatttatttgatttaaattgctttgattaacttgttgacagatctaatgatctgattttaatcatagactaattatcagtagatcttataaataatttgtaataggtaaaatttgtaatttctttcatctgtgataaacctagaaacatgatatggcccatccaaattatttgacctgtgtgaccctatatttttgtttttggacttagatacatataggaagcccatttaagtttagttaattaaatagactaggttgctaaaataaaatatcactttgatagtttatttaggcccaattagtatnnnnnnnnnnnnnngaataacaattatttatttaatgactccagccccccctcacacaaactaccccaattatgaaggcccatttgccttatttaaataa

SEQ ID NO: 144635 - DNA, 557 bp, Cannabis sativa
  modified_base (34)..(38): a, c, t, g, unknown or other
ttaaaattctgtgaaaccgtatttttgttgtttnnnnnttttttttttttgtgcatttgtgaaattaacccttatttgtttttggtttgggccatttcgttttcgaaacataattgtatttttctactatattaaatgttctgctactacctcaccacctttaacgactctaaatacattataataatgttctattaaaaagcaaaaagtacatcacttcaaagtaaaaacaccctataactaatactccaaattaaaactatataataataatggttagtatttttatcctttaaattttgatatgtactaaatcatgtctcttgaatatttttaaggatatttgtcctatttcattcaattttactaattgcccacatactaaatcatgctaatatctatcaaattatatctttcgaactttaacatgtaccaaatcaaactctatgaattttcatcgatgttagactttttttactaaaattagaaaaaattccttaaatccaacaatctcaataatttataaaaaaaaattaacgaccttaaaaattcaaaaa

SEQ ID NO: 144636 - DNA, 556 bp, Cannabis sativa
ataaattagtcatcgatagtttaaattgataataataaaaagcctatcttaacaaattttagatttttcttctatattaaatttgtttttgtttaaatatatacattaatcgttaaaaataattaggcaaattaagaattataaaaaaaaaaaaaaggagaacgaataccaaaaaattattgttgataaataaataattaagaaattttaaactaagaaaaaattgaaggattgatagatttattaaatataataataaaaaatttgaaatttcatttcatttttaatagaaaaatactataataaaaagtagactcaattgtacactttaatgaaaattatatatgttaagaaaaaaaattaagatagactttaattttatttaaagataccgcgtataagttaattttaaacatcttctatacaagttaaactaatagtatgtattaacaaagaccaaaaactctataattctattgtcttatatgtactttattctcttttattctttagtaaccccatttcaaattgtagagtcaaaatacttttatatata

SEQ ID NO: 144637 - DNA, 1137 bp, Cannabis sativa
agaaggaattcaattgagtgcatattgaacaaaaataatgtttggatatctgagcgagaactaattggtcaggaattcttggagttctttgagaatatttttgctgggtctagcaatgcaagcccgctggattgtggccacctctttagggaaaagatttctcttgcggaccaggctggggtggtggagtgcccctcccgggaagaaattaaaagtactctgttcgccatgagaaatcataaagcccctggacctgatggcatgtctgttttattcttcaaacactattgggaatctgttggggaagatttttgtgaagctgtcgaggatttctttgacaaaggtagaatgcataagggtgtgaactccacgaatgttgtactaatacctaaagtgccaaacccgaaaagacctactcagtttaggcccatatctctttgcaatgtgctatacaaggttatctccaaaattattgcaaatagaattaagcctatcctcccctcgctcatctgccctactcaaggtgcttttgtccccggtaggaatattcaagacaataatgttctggtgcaagagattatccactcttttaataagaagaaaggaaaagagggtttctttgcgataaagattgacctcgtcaaagcgtatgataggctaagttggaattttattaatcatgttcttgattgtttcggattcccccaaaaattttgcaggtgggtctctcagtgtatatccaccacatccctcaatatttgccttaatggtgggccggttggtaagatcttgccctcgtgtggtatccgacagggggacccgttatctccctaccttttcatctgtgcagtggaagtgctctctagattggtagaagaagctattgggaaaggaagtattcatggaataaagctaagtagggggggcccggtgatttcccatcttttcttcgctgatgacctaattttggtgggacgggccaacctaggtgaagcaaaagcctattgggagtgccttgacaagttctgcacgtggtcgggacagacagtcaacaagcttaaaacctcaatttttttcagcaaaaataccccggttgggatgaggagaggaataaaggaagctttgggtattggaact

SEQ ID NO: 144638 - DNA, 1199 bp, Cannabis sativa
acttaaaaatttgagacaaaaaaaattagtttcgtaaagcaactaaaataaaaactcacacaaaaactaattaaataaaataacttaaatagaaacatccattcaacatgttccaaccccaccaaataattacacccatgctatatctatcccaaaaatactcattcattatgttatataaccggttttattttagttataactggtttgagttattttgtattatttgattttattcattataacactgttataaaaccggttttattttaattataacgggtttgagttattttgtgttatttctttttattcattatgttacagaaccagttatatttcaattataactggtttgtgttattttgtattatttatttttattcattatgttatagaactggttctatttttgttaatatctgagacatttacttctagtaactttttcaatgacttttttgatgactttttcaaccgacggtgaccattccgtgactttttcgacaacacaagcatgtcgatatggtgtttttgctactgtcgagctagggttagtttttggttggttctgctgattagtggggtcattttaggtctgaatcttctggttttgaagcttgactcttgggttgagtaagtttgagttctaagaaattaaacttggctcaacaatggtattttaaaattttgtgaataattattgttgtttgtggttggaaactacccttcgatgttgttataggtgttctagaaggtttggtatggtttagacacgatttaggcaagatttgaatttttttagggaaacatggtgcaaattggttaactggtttgataggtcttgtaaaactggttaaccggatcagggtcaagtttctcgaaaagttctatttgtcgattcgtgttattttcagagccttagttggttaattccttgatacttagggtattgttataatagttaccaatagcagaatccttagttgggagtttgggttttccagattggggttttggcgtgtaatttacccgtttatgtaaatgtgacttagggcatccatccaacacgaggtttttcgttcaggtcggttaactcatttgaatttagaaacgagataagactagcatagaacatattatatatgcatgttgtgtttgtgattgtatatattttgggtgatatcatagcagcacaa

SEQ ID NO: 144639 - DNA, 614 bp, Cannabis sativa
  modified_base (258)..(265): a, c, t, g, unknown or other
  modified_base (325)..(337): a, c, t, g, unknown or other
aaagtccagccctttgccatttgaggaattgacctgatcagacaattacctaaaggtaaagacggggtgcaatatgcagtggtagcggttgattactttactaaatggagtgaagccgaaccacttgtaaccattacattaaagaaagttcaagactttattgtgaagaacatcatatgtcggtttggactaccgtacaaaatagtctcagacaacggcaagcagttcgacaaccaatccttcactgatttctgtgcnnnnnnnngtatcatcaaaagtttctctgcagtggcgcatcctctggcaaatggtcaagttgaagcannnnnnnnnnnnntgaaggatacactaaagaaaaaacttgaagatgccaaaggaaactggccagaagagtttcctgaagttcaatggtcataccgtacaacggaaaaaaaagcaactggacaccacttgcaatggcgtacagttatgaagctatgctgctcgctgaactcgagccaccttcccatagaaggttgacgtacgattaaggtaccaatcacatactccttgcagaatcactggatgaaatcgaagaaaaatgagcaactgcaaactaaaagttgatagcccat

SEQ ID NO: 144640 - DNA, 730 bp, Cannabis sativa
ttatgaattacttaacttaattgttgctaatatttactaattttttaatttgtagtggcgattgtggagtgtttgccatggagtacattgagcactgcatgctcaactgatcgttagagctagttaatgatgataacatgctcaccttcagacataggtggtgtgtggacttattttaccagaactagacatggtagttttttgtaagtttttgtaatattattcttatacacataaacttttgtaattgtattatattatactgtgaaatatgaaatcgctcaattgtcgcatatatatcgcatagaaatcgcaaatattatcaaatttgaaataataatttgcttagctcgcttaaaaatgtcgcacacacatcgcgtagacatcgttaaatgtagccagaaatcgcatttgaatctcaaataacaaattaaaataaaatcgcacaaagtcgcacacacatcgcatacaaattgcgcgcaaaaatcaattgcaaatatgagagcaaatcgcacaaacatcgcaaaaatatcgcacagtgtcgcacacacttttaaaatatccatgcatattgttaaatattcaagctatactcctgttaaacaacaaccagcaatacaacacatattcaattaaataagagaaacagttcaaactcgagctttgtatgtagctctgttgtgccctgcaccgtgacatagcgaacaatgacgaggttccactaccacct

SEQ ID NO: 144641 - DNA, 549 bp, Cannabis sativa
tctaggtccaaatcaggctccgagtgtggttcgcgtcctaggtcttggtctagcttgggtccgagtcctaagttacaatcccgatttaagtctggatgcagttctggttctaagtccttggttcttatcctagttttgtttcgagtttgggtccgggtccaggtctagctttgggtctgattccaggtgtggatttgagtcggggtctgagtctgcatccgggtttgtgtccaggtttggaccccgatctttgtcttggttcgggtccaagaccaagttcgggttccgagtgcaggtccaagtttcggcctgggtaaggatctcggtcaagatctaggtccagcatacgatcccaatcttggtcttggtccgagtgaaggttcgtatccggatccctatctaggtccaagtctgtgtttgatatcaggtccccgattgaggtctaagtctgagtctgagttccggtttgggtacacgaccgtgtccgggcctgagttcaagtctcaatttgggtcagaggctaggtctgtgttcggttctaggtctggg

SEQ ID NO: 144642 - DNA, 680 bp, Cannabis sativa
accaaaacaatagcattccatgaaaccaatcaaaaacccttgttacgaagttgatgtattctagagagagaaacaaaaacaaaaaccttgtaagaagagtataagagagagagaaattaccttagagagagaaagtaccacccaatccaaaatccaaaatccaaatccaatttggtttgtagcagttgtgaggaagaacccttggaatagaaaggggaaaactttatgtatatatattatttccaaagaggaaagaagaaaacgtcgtgtcgtttggatcacgagcagagtgagagagagagtgaccggtcgtcgtttttgatgttgtgagtctgaggttgtcgttttggctgaatactagtactgtcgaatagaggtgttcatcaaaccgcacaaaccgctagtaccataccacattgcataaaatatgcggtttgaaatctttgcggtgcagttgcggttgcagtttgcacttttgtcaaacccgcagtgcggtgtagtttgcggtttagaatttaataattgcggttcaaaccgcaccgcattatatattacaaaatcacaaatttttacaataagaagaataaatatatatataggtgcactcttaatgggtattacccatgaatgggtaaaattagaaatttttgagtttttatgcttaatttttttatctaatt

SEQ ID NO: 144643 - DNA, 677 bp, Cannabis sativa
  modified_base (605)..(614): a, c, t, g, unknown or other
catttcttgccaactttgctcgagtttcccagagagaaaaaatcctcagaccaagagaaaaccttcgaacactttacaaatttcccttttagccttcattcaccactgtcagtctaccttttctttgtttgatcgacaacagaacccccagtctcaacacttcactgtaagtttctcccatcccttgctttactgtttgtgttcatggcatgctttacttatctgtttgtttttttttttctgggtttggtatttgaagtttctgggaatgtattcttttgagttattcacgtaacaggtctagattcaccacttctagtgttagggttactcttgtcacgtacttgttgttattttttgcgaaggaccatacgcccttcgtgtactggccttctagggcatagagaagactttgtttttcttgattttctgccctttctttttcttttatgcgcaatgttgtcttctgtgagttctttgcacctgaattttgtccaggaaatccttctagggttttctggttgacagatgtctggagggggcctcttttcagcggttaggggattcccattccctttttttggtttagggtttggtatggggcnnnnnnnnnngaatcttaactcttttttcagaatcaaaacatgtctgcgtccaccctaacctgcccccaccag

SEQ ID NO: 144644 - DNA, 608 bp, Cannabis sativa
taggctgaataaggattaaaagagaataaaatattctgcaaaaatcacttctaaggaccgaccataaaggaataatctctagttataacttggccactttttcaaccacttattattctttcaataataccatattttccaattcaatcctctaaatgccaaaactatttatttaataataataattaattatcaaataaaattgtcatttatattatttattaattagacaatacaaagtctcttaattaataaattgaccccaaaacttcttttcttcacaattaagtccttgcttagtgaaaattcttaaataagacataatctaatgttagaattaaaattgattaatcaaaaccaattaactgagtctgcaagcagtattatctcaattagtgaaggggccatgggcctatataactgaaatttcaataagtagatctagaattcactaagtaaattctctaacttattaattctgccttgcgccactatagatttggaattccatatcactcttaattatatagaatgctctatatgtaccatgatgtagatacattctgattatccattgttacaattctaatagtcaaagatcctctata

SEQ ID NO: 144645 - DNA, 558 bp, Cannabis sativa
aattgcattcgagttccttggataggttcagttgttgaacctgagtctgttctggtgcatgaaagaaacacctactggtgtgatcgaattggtgtttgctttacagtgtatatggtccatatatacatattttgcgaagaactaataataacaattcacatgctaaaaatcataccatatgttatgtgttatatataatattgatgtacgtataattggatgaaattatattgtatacacactttattttacttgttttaatttttacctctatttttatattttttttagatatatccacttttatagatgatgtctccattagatcttttaggttatgtaaattatatgctagacttaagtagagagtgagtgtatattaggcaatccacttaaaaatgtaggtatattttaataaaaacacaatgtgagggtatttttgattaatttacacaaaaaagatgtatttttcaaattttgaaataatgtttttaatgaaaaagtaatcaattgatatcttattcacatcaaaagaaactaaatagttttttttttttt

SEQ ID NO: 144646 - DNA, 675 bp, Cannabis sativa
tgtttctttattgataatttaatgataaagataacattgaaatagagttttattaagggcacaaaacccaacatttttgtcaagatcttttcttggaaaaacgtaccctttaattttggcggttgtacggtttcgagagtcattatgaatcatctcttcatattttgtacaacttccagctgttagatttttcaatctttggctttcttgtcaatgaactttgtgtataaaagggcggctcaagcttgtcatttttcataaacctctggcttctttagtgaaatccattttcagaatggataatttcctcacaagtgaccccagagagtatagatcttgtgagcaatctcaaaggtcctcctcaagctgatgaagaattccagaggaagatcggcatggtttcaggtggatctgggaaggaagttggcgttgtttctattagagaatccagccaacccaagaccctaacctgtgccaggagatctttacgtcaacctctctccggtgttgaggaatttcctgaggctgggaaaaagatctcggtttcaggaaatgggatcttctgatgataaggggaatgaggtctgtgcatagatcaatgctctgtacgtgtagccggtctttctcaagctatgtgtagacggtctttctccgagctacgtgtagacagtcttt

SEQ ID NO: 144647 - DNA, 690 bp, Cannabis sativa
  modified_base (184)..(184): a, c, t, g, unknown or other
gaagacattagtcttgaacttgtggttgatgtttataataatgtggtggtagcatgcaccgtggggtgcatcacggaacacgatctctaaagcatgaacaatgccttgatgtctatccgacacaaaggctaagttcttaacatcaccaatcgtttctttcaattttctcataaaatatgtccangaattgtggttttcactatcaactacaatgaaagctatcgaaaagatatggctacctacatccagtgccactgcacacaacattttcccaccatacctaatctataagaaagacccattaacgcatacaacaggtcgacaaaacctaaacccccggatacaaggaccaacagagaagaaacaatagttgaagcgaccatcctctaccacaaaatttgtgatggtacctggatttctcaactttaacttgtgcaagtaaccaggtaatttcgagtatgaatcttcaggtgtatcccgaactaggtgtagtgccttctctctgcacctctaagccttttcataactcatttggatcctgtaatccttgtgcatatctttccttatatcagaggccaaatgatccgagccgtctatagcaaacttatccttaattagatgggcaactatcaaaggtgatgcttgacgattatcttttcctcgaagattaagggaacatgtatgtacatt

SEQ ID NO: 144648 - DNA, 710 bp, Cannabis sativa
  modified_base (637)..(637): a, c, t, g, unknown or other
accgtaggtatcttaggagttaggtggatataatcttttatcccctctcgattgatgtgatcccaaataaagtagtcatcactagtcttattgactataacgtaatagccgaaaaaggggggttacgccatctgtcatgttgtttatggatattttaatacgtctttccccatggggcattaaatgcgaggtgactgttcaagagatctctgcacctcccggaacacttagcatacctccggcctcccagagagtagaaacacttcttgtgctctcctccaggggacacctccctgagatacttccctttcgcctaggacttagtccacgtattttgggaaaaaaataagggcaacgcatacaatcatcaaatatgcacataaaccaacatgaacacatccaaatcaacacaatcattgttttaaatccatacatgaaaataaatcattattatggctctgaggccagttactaggaatatttaataggatctagatttactaacaagtatgttgaattaacattctaaatatgaatatctttaaaataatgacattaaacacataagagttttagaaaaccttacattagttgcagaaaaagaatattgaatccttccgctcaaatctctaacccntgttcctttctgtcgtagagtattatcaagatctgagcttggatctctttctctctttcgggtttggttacca

SEQ ID NO: 144649 - DNA, 897 bp, Cannabis sativa
tttttctttctttttcctttaatttttaattttacaaataattggataaacctaggctgaattgaagtagaaaaaaagaagttgtcaagcttctaaacaaccaccacatctcactaataaaatgaccaaaatgctcttgattcttaaacttaagctaaaacaatcctaggggtaaaattgtcaaaaatcacaaccccgcccaaactcaatattctattcatctcaaatatttatcccactaagaaaaatttctagacttacccatgtgactctaacggccatccatcacatttttcgttatcgtcgagcaaaaatcataaaaattacataatgcataaataacttaaataatacctctagagtttaatacaatttctaaaattgagaaattttaactctaatgcccatttctaaaaatggtacccacaacataatatattcatgcataatataaaaatatcaataattaatgctaattatctgctaatttccaagttaaagttaagcggtctttacaattatcctcccattaaaaggatttcgtcctcgaaatctaacctgaacatttatggatactgagccctcatgtcagactctaactcccaggtggcttcctccaccttactgcttctctagagcaccttgaccaatgccatgtcttgttccgaagaactttatctctttttttttttttccaagatctgaacatgttattcctcgtatgataggtctggttaaagctcaagattctcataacttagcacatgaccaggatctaaaacgtactttcctaacatggagacatggaacacattgtgaactactgaaagagctggaggcaaagttagacgatatgccactagtccaaccttctcgagaatctcaaaaggtcctgta

SEQ ID NO: 144650 - DNA, 671 bp, Cannabis sativa
tgcaaaggatgccgccacgacatcgaaccctccttctagtggtaatatcagtaaggggactgacagtggtaaccctgatcataaacagaaggctgatgcttctgaaacatcaaggggtaatagatgtttttgggaaatagaggtggccgtcagggacgcggatcttcattctgatcttatcctgagtgtctgaaatgcaagaaacacaatcagggtaaatgtcgggccaagacttatttccagtatggcatagtgggccagttcatcagatattgtcctcaggccaagaaagaggagcctaagaagaatgctactcagaactcgggatgactttttaccatgactcaggttgacgctgatgctagtccgtcagtggtgacatgtcagttatctacaaatggtcgttccaatactatattgtttctttcgggagctactcactcttatgtgtcgagtagagtaattgaaagtttccataaaccatgtgatatttatgcttcggggttgggtaccatgttgcctgcggaagaccttattgtatctaatgggtggattcgttctttgtctctttggattgactgttgtgaattaatcgccaatctaatactagtctgattttgatataatcctcggaatggattttctgtctaagtatggggcaacgatcgact

SEQ ID NO: 144651 - DNA, 638 bp, Cannabis sativa
  modified_base (57)..(61): a, c, t, g, unknown or other
  modified_base (235)..(235): a, c, t, g, unknown or other
  modified_base (439)..(442): a, c, t, g, unknown or other
  modified_base (537)..(543): a, c, t, g, unknown or other
attgtattctggaaatagaaataaaaaatttctacttggaatctaaaatttaaagtnnnnnacttaaatttataccaaatatataatttgttttattctagctttgacaaccactactaatctaactctaagtatgatttgcctaaagtaagcatatctaagtagcagattctaagatcgaggatttatatcatttcgggatagaatgtcgagaatataatcatatgcgccattnaatttcttaagagaaaatagaaagacattatatgcaaaatgatttataaaccattcatccaatgatatatattatttaagctaattcgtaatgaataagctaaaaggaaaaataaaggataatttcgattaaaaataagaatccaacaatgtccccgattagcgggagtcaaagttattcttatttttataaacttcttcattnnnncatattgtaaatactagtctaaggcgttatctattgatgaacagctacatgttgcatttacaaatattattctatcgagatctaacactattatnnnnnnntaatggatgacaattcattagggatttgtcccattaaaaacaacaagccaagttagaccaacaatgatgattcgaaatttaaactacaattaata

SEQ ID NO: 144652 - DNA, 688 bp, Cannabis sativa
  modified_base (158)..(168): a, c, t, g, unknown or other
  modified_base (629)..(643): a, c, t, g, unknown or other
ctccagttctactggagccatcctatacggagctttagatacaggtttgcctccaggtgccaaatcaatcacaaagtcaatttctcgttgaggtggtaatcgcggcaactcctcggtaaatacgttaagaaaatctctaacaaccctgactacctcannnnnnnnnnnttcaggtctgctggagtcaatcacaactattaaaatcctacacatccactgtgtagtagatccctatcttttaatactaaaataactgggatccgatacccctgaaccgatctaacataaacaaatagatcttcaccttctagctgaaaagtcaccatttttctcttgcagtgtatattggccgaatacttggacagaaaatccattccaagtataatgtcaaactccgttaattccagttcattagcactcaactctttatcttcaatcctaactggcatagacctaatgcgcctattggagataactaactctccgctacgcattaggattccaaaccctctttctagaaaatccattccaagtataatgtcaaactatggtaattcaagttctataagatcagcactcaacttattacagtgactgttgggtttgtgccctaaataaaacccattacnnnnnnnnnnnnnnncaatttagaattttgaagtgattatgtttacatgtattttacatg

SEQ ID NO: 144653 - DNA, 505 bp, Cannabis sativa
  modified_base (36)..(37): a, c, t, g, unknown or other
  modified_base (268)..(281): a, c, t, g, unknown or other
  modified_base (430)..(450): a, c, t, g, unknown or other
agttggaaattaattttaattaattttagatcaacnnaaatcaagtaattttcattaatgatttaattaaaataaatagactaaaatgtattatttttaattagaaaattaataattggtttatgaattatctagatagatattttctatgtagactttttggtattttgctagatatatttaattaaataagaaaattaatatttaagttaaatttattcaagacacttaaatattttaaattttccttaagagatttaattaaatnnnnnnnnnnnnnntatgttgaaaattaatttatttaattttagagcaacataaataagaataatttttccagttttattttattttattttaatgtaatttcgaagatgtatttcgtaatacattggatttcgaaattctgtcatatatatttatagaaaannnnnnnnnnnnnnnnnnnnnattttaattaattttggaccaattaaattaagtaattttcataatatttattaga

SEQ ID NO: 144654 - DNA, 770 bp, Cannabis sativa
gaaatgtaggtttcccattcactgtgatgaaacgggagaaaggaaacacctaggtctggaatcagtacaacaaactaatgaagccatagtgaagattaaggccaaaatgcttgccactcagagtaggcaaaagagtgatgcagatccaaagcacaaaaatgtggagttttaggtaggagattatgtgttcctgcgggtgtctccaatgaaggggatcaaatgtttcgggaaaagaggcgagttatgccctaggtttacaagaccttttgagattcttgagaaagttggactgatggcatatcgtttagctttgcctccagctctttcagcagttcacaatgtatttcatgttccacattacggaaatacatttctgaccctactcatgtgctgagttatgagaatcttgagctgcaaccagacttatcttacgaagaacaaccggttcagattttagacaaaaaagataaggttcttcgaaacaaaaccatagctttggccaaggttctctaaagaaatagcaaggaggaggaagccacctgggagttagagtccgacatgagggctcattatccagagttgtttatgttagatttcaaggggggataattgtaaagatcacttaactttaatttataaattagaagataattagggtgtaataatgaaattaaaatattaattatgaattatcattttatgaagatatatttcaattcagaaagcattatacatgtcatatatggaattttatgtttttgcatgtattg

SEQ ID NO: 144655 - DNA, 650 bp, Cannabis sativa
taatgtaccatatttgacattaaaaaaaaaatagtatgattttcttctagatattctataaaagtacgagaaatacgaaataatttataatataaaaaataatgttcaaataatttattttatacatataaaataaaataataattatacgtgtaatatactgaacattaatggtaatattatccaaaattttagtaaaaaagtaatatttttaagtaataaaagttaaggaattattacataaaaaatataaattgatactttatttacaaaaatactttaataaggtgtagacaatatttatacattttatgtaattttaattatcaaaataccacttacattattacttacaccaacagacgatagttgcaggatggttacatcagacgatagttactgggtagttggccgaaggttgcatcagacgaaaattttaatcagacgaaagaatctgggtagttaatgggtggttggccgaaggttgcataaaacgaaggtttcaatcagacaaaataactgtaagtaaaatatttatatatctgtaatgcaactgtattacaactgttgtgaaacattaaaaatcataacattgtttccacgtacatataactctatctatatgtctctttatgatttaatatgaacaa

SEQ ID NO: 144656 - DNA, 1249 bp, Cannabis sativa
ttcggggatatcatcgcgacccctagacccctactccgggcctattctcattggaggcgccatccacaaataccttccacgctgggacttgcggtgtggttatgcttgcggtagcttctgcttcatggcactccgtgatgaagtttggtagcgcctgcccttttatggaagtgcgtgggatgtagtgtaaatcaaattggcttagctgcattgcccatttgagaagtcttccagacgcctctagctattgaaggacttgccggagcgggtggttggttaatactttgattgggtgagcttggaagtatggtctcagctttctcgaggccattaggaggcaaaaaactagtttctcgatcaccgggtatcgcgtctccgctcctatcatgcgcttactgacatagtacactaggtgctgagttttttcctcttcccgtactagggccgcgcttaaccgcattctcggtgacaaccacgtataggaacaagtcctctccgagaactggtttcgataagattggaggtttggccatgtgctcctttagttttttgaatgcctcctcgcactcgtcggaccattcgaatttctcacatttcttcaagatgttgaagaagggaatgcatttgtttgtggatcgggagataaaacggctcagggcagcaacctttccggctaagctctgcacatatttgtgtttattaggggaaagcatgcttaggagagcttgtattttctttgagttcgcctctatcccccgttgactgacgatgaagcccagaaactttcttgatttgaccccgaaagtgcacttctttgggttaagtttcattccgtatctcaggactactgcgaagcattcttctaggtcatccacgtggtttgcgtatgccttcgacttgaccagcatgtcatccacgtatacctcactatttcaccctagaaggcccttaaacctccggttcaccattttctggtaagttgcaccagcattctttagtccgaaaggcatgaccaggtagcaatatacccctttatcgatcttgaagctagtgcattcttgatccgcaatttgcatcttgatctggttgtaaccggcgtatgcatccatgaaggacaataacttgaatccggaggtggcatccaccatctgatcggttcttggcaagggaaaacagtctattgggcaagctttgtttagatcggtaaaatctatacaaactcgccatgtcccatttggctttggtacca

SEQ ID NO: 144657 - DNA, 811 bp, Cannabis sativa
tctcagttatattctaaagttcctatcatgatcataacaaagtaaaccatcactagtgtcttccaaataaagatgggctggaattttaaaattttcccactcagataaggcactgtgatactatgtccaagaacttcattggtatctatttctattactacattaacatattaattggaacaaaatacaggatcaagaataagttctaataatttgctaattttttcattatattacatccatatctaataaaaatatgtgtgtcatagagatactgtggtgtattgagtatagtctagagttcaaaataaactacatacgtcaatagcttcttccacccctaagtgttatagagatcctgtggagttatgaatataatctagagttcaaaaggtataaaagatcattgaactgcatatattaattcttaagttcttccacccctatcagatcaaaagatcattttattaaacaaaatattaataattgcataagaattaacaattattcataaacatcgaatttaaattctaaatgtttatgtggtattatctctttgtagagaataatataccatagattttgtatcaataataaaacaacaaacacatacaaacatgataaatatctaaatataatacagtattggcatacaagttaaagaaaaatgaagctcaatttcataaaagcaattcacaatgaaaacctcttaaagagagaattttattaataatctcaaaaaaaaagtcacaatgaattgtctgcataaatatgaaatagggaataaaatctcaaactaataattgaaact

SEQ ID NO: 144658 - DNA, 1025 bp, Cannabis sativa
  modified_base (28)..(30): a, c, t, g, unknown or other
  modified_base (83)..(83): a, c, t, g, unknown or other
taaaagcctaataattttttttttattnnnttattttgggcccccggaaagtgtgggcccctaggcacgggcctagcccgccnatgcctagggccggccctgcctacaatctatatatctactaaattagtttaattgggatctcgcagactccatctataatttattttgaattagagattaattttatttaattaaaaaaatttcaatttttatgatagtttattgattgatttagttattatatcagacaatttttatatgatttttttttttttaattttagttgtgaacaataaaataagacatggaataaaaaaaaaatatatagtcaaatgaaaaattatggctctataaacttgaaataataaacaaatgaaaatttttacactaaaccatgttctaattgatctcgattaccatgtgtattatcacctaattcatgcaggatttatatatatctttaactatataaaaaggagaatggcttctcaaaataaattatataattgtccttcttttttatatctatagcctttataaaaaaaaagaaaatgttttagacttccactaagtaaattagttaattaacttttactaaatattaaactacaaaaaataataaattattcttttataactaaaaaaaaatctaagtcaaataaccttacctattgtaattcttttaaaaataaaaaaaaatatttttgaaatctttttatatctcacatttaattaataaaaaataatttatctttctacaaaataacttaaaagtatattattttatacaaaaaatttgaaaaattatttcacaattgaaaaatatttttgaaatctttttatatctcacatttaattgatgaaaataatttacttattattttattaaataaaaaaaacacaattttaattatataagtttatatatatactaggtgattgttacgtgccaagccacgtagtgttagttttatttaatattttagttttttattttaattaataattaaaatagtataatt

SEQ ID NO: 144659 - DNA, 868 bp, Cannabis sativa
tatacttgcgtacataattttcaaggtgacttcgaagttgaagatcgagattgagaggtacaaagaaaagataaagattgggtttgagatttgtatgaagagtcttctgtagatgaaaatgattcttgggtaagagtataagagataaacactttgagagattccaaacagagaatcaatctcaactgtaattgtaccatgttcttgctcaatcaataaagacaatttcggtggtattccaaaactggaatagagccatagatcacatcaatctagaagacttgaaccaatgtatatcttggtgttgattttattattttattgctttaactttctggttgcaattactctgttcttccatattttatctctaattcttgtttatgaattgctaatcttgtcattgctaattgtttgtggattacgtttaaattgatttgattttgtacataatagttgtaatttttcctcatcttctgatttcaagttaacgtcaaagaattttaatgagagtacaataataaaacattgcttatcattttattttaatttttttttcaagaaaaaagattaatggtgtattacaataaattatgttaacatgtaatgataatatattacaagcataaatatatgtatgtaatatactttcattatgggcatttaaattatatagcaatccaagaacaacttaatattattcaaacgaaattacattgttattagtcatcaagaaccatataatgacttgctacagatcggaagagcgtcgtgtagggaaagagtgtagatctcggtggtcgccgtatcattaaaaaaaaacaaaattttcagtgcaaaaacaactgcggccaattctaaatcatga

SEQ ID NO: 144660 - DNA, 809 bp, Cannabis sativa
tgtgagcatctagtataattatgtgatatatgataccatgcttagaatattaattgataaatgtttatctaattgtaatggaatagttgagttagggttcaaaggcaataagtgcgtaagtgtggtattagtgcttggcttgctagggttgtttgtgaaaatggaccctccgtaatcatctataccatagggcgagcatgtagagcttggtgttgacaaaaccaatctaccggcgccgcctgggcctccgctgagtttgagggataatgtaggggttggcaatgctaatccacctgctaattggcagcaaatgtttcaagaaatgcaaggtattatactttttcaagaggaagaattgcatcggttgaggcaacctgcaccgatagctcttgtagatccaggggtaccaccagctcttgtgctagtggtgggtaaccaggggttcatgttgtctcacaaagattcagtgtttgagcacctcgtgaagctgcaacttccaacgtttttgggaggtactgatataatgaaagctgaggaatgaatgagtactattacccgcatccttgatattatgaggtgatgggaacagagagagtgaattgtgctacctttatgttacaagatcatgcccacgtctggtgggatattgtggggcagactcgagatgttaggacaatgacttgggatgagttcaagagtctgtttggggaaaaaaattctataacatagatgtgagggacgaatgccacaatcattcaggacttgaagattaccatgttgggttttgtgccctaaataaaacccattac

SEQ ID NO: 144661 - DNA, 936 bp, Cannabis sativa
  modified_base (495)..(496): a, c, t, g, unknown or other
cttggtgagtttaattgtttatcaattttttgaacttggaaattcaaagttaatttaacacttagatggcttcaactagacacaaacaacaacaacaacggatattactggggcaattgaagaagtggaagcattaaaaaatggtaaatgcatttatattttcactatattttatgagttttcaatattcttattattttattttattgttttagaaatactagttaggggtatttatcaaaccgcccacactgcaaaaaaaaaatgcagtttgaaattttttgcggtgcgattgcggtttgaatttttcctaaatcgtgcagtgcggtgcaatttgcggttttgaattgttaacatgcagttcaaatcgcactgcaccgcatattatgaaaataccaatttttatatttattgaggtacaataagtgaatgtccaacctaaagctcattaattattatattgttaaaacataatttttttttcatatttatttnnaagtcttatggtatttttgacaagtgttgctcaagctttattgtatttgtgatagtttaattatttggtgatagtccaatgtgcaaaaaccgcaccgcaccattttttacggtgcggtttctgcagtttcttagtttcgcagtgcaggtgcgatttgaaaaattagaaaaatcgcatgtgcggattggtttgaaaaaatagtcaaaaactgcaccactgcgaacacccctataatagatcggatccatttaatacttttaatccaatattagctggattgattggatccatccaatcccatccttgaaaataattaaaccttatttaaaagtgatactttctactttatttaaaagtgatacacttaaaaattaaagaataaatgttattagttattaggtgagattattattatgtatatctaaataatataatttata

SEQ ID NO: 144662 - DNA, 884 bp, Cannabis sativa
cagttacataattatgccccttctcttagattacgtttctttaaccgttaaaaattatcatttttaccccctgaattttgaccaatacaaaattttgcccctattattaaaaaataattttcaatttttgtaaagcaattataatattctattgattctgaaaaaaaaaataataaaaattatgaaaaaattggataaaaatattaaatttacttaaaaaagcttaaattatttctaaaaaaatatttttaaactttattttatttataaacacgtatcatacaaaatcaaactaaaattattgagaatctaataaattttttaaataaactaaaactttttgaagaaaaaatcaaacttatttatattattaactcatatcttaacaaataaagaaaaataattaaaaaattcaataaaaatataaaattattttgaaaaaaaaattataaattaaactaaaaaaatattgtgtttacttaaataaatttacattttttgagaaaaaaatatactcatgtttgttctcgtaaaattattttttacaaaaattaaatttttatatatattttttaatatctaaatgaatttttaataaaatataaataatttttaaattacttaattagttttataatttaaatttattttttaatttttttaaccattcaaaatgattttttcttaagatctaaattaattttgtaagatttactaaaaaaaatgttgaatctttcttatttttattttgagggggtacaatttgatagttgtcaaagtttaggggtaaaatgactaatttacaaagactagtcagcattttaaacggaataatgggacggaacctaacagaaggactaaatttctgtacatataaaagttca

SEQ ID NO: 144663 - DNA, 596 bp, Cannabis sativa
tttagatctgtgatttatatatttcttaagtgttttataaaccctaacattatactgtgcgtcattgtccatttttgtagtttggagagagagagaacaaatttatagccattcaatttggtaatgttggtgtacataggctagctactacaaaaccctggccttgttaatttgttcttgttagaatatgaattttctttattttgagaaagaaagaagaagcaaatttatagtataatagcattagtatgcaaatgtaacgaattgtaaaacatttgtagctaaatataaggtcgaatatatgaatgttatattattttataatataacaagtataggttcctcaaaaaaaaaagtatagattaaaatatatggtaaataaaggtgtaacttatacttttgtaacttactactacaaaaaattgttacttttaatgacaattttttagtcacaacatagttttttggtatggaaatttttattaatataagtataacatataaaaattacataaaagactttaattaattaaataggcatttaatagcgtgacacatcatcatccctaccgtaataccaaaaaaattgcataaca

SEQ ID NO: 144664 - DNA, 518 bp, Cannabis sativa
gtaccagacaaagtaactaaagaactagggaaagtagcatggaggttttggtggacatatatcaattgaggaaaaatattttctagctatgaagtcttgggactcgatttgcaagcctaaaagttatagaggactgggtattggaagatttgtagatattaatttctgccttttggccaagctgtggtggatgttgttgaagggtggagatgctttgtggatcaaggttctgctcaataaatattgtgttggttctagttactggcagagttctcttccccatcatgcctcaacaattgtgaagggaatctagagaacacaatattttttgattgagaatgtagtttggcttatcgggaaaagttcaaattatatttttggggtttgcaatggagatgcaatgatcaattcttagtgataggggaggcttttaatgcggtgcaaacaccttgtttaagtattaggaatttgatcaataatgagatgtacaattagaaggaatcagagattcatcgtct

SEQ ID NO: 144665 - DNA, 663 bp, Cannabis sativa
  modified_base (605)..(628): a, c, t, g, unknown or other
tagaattgcatgacataggaaaagtgtgagattgagagattccactaattctatgagtttcatttaaagagaatcatattgctttatgagagctttattgattaacattgaatagagatatcttgttagctaatttaattcaaatctatcgtcactcgagagaggttaatagattatattaggattttttaaactacaaaaggataaattgggataatcggtaaattgagattcatagtttgaaataagaaaatcaatgctctagatttctactttctaattaaaaatcactgtttgtctatttatttttctatttatcttattatttgattcttaactataatttactttgtgctatctaattaaagtttaaaattaaaaagtataataattagtcaaatttaataattaatccctgtaatttgacaacctttattattaaatttttactataacaacactgtatgcttgcagtaaaaattatgtatttttccaaagggtaattaggattttttttctcctcaaactttgacatgtaccaaatcatgcctcctaaacatttttggcagttaaaaaatttaacctgaactattgagattgttagnnnnnnnnnnnnnnnnnnnnnnnnattcaattttactgtttcagtgattgtttatgtac

SEQ ID NO: 144666 - DNA, 697 bp, Cannabis sativa
gtaatgacaacgactttaatttttattttgtctttcaatttatataactaaaatatagtttttgcattaattatattttaattttgttaatcacataacataaattctgttatttgttatggtcaacacatttctaataaatcaagaatcatgattttttatttttgttagttataaatttttaaatgcaaatatcaactaattatatctaattaatttatatatactaaatgtatatttgaatttaaataaatgatttatcttttttttttaaatacttatactatgacaaacatcgaattgaatactaatcttataccaatatcataagttttctaataaagaaagcttcttatattattttgaaaaaaataaattagaaattattatggttaaaatttaataaattttattattcaattataattaatttatttcatatatataattttaaatttttttaaacatacgtcgcgaagcgcaagttgtttactagtatataaataatacattataaattttgcagtacgataatataaaagaaataatttttaaaaaataataatagaatgcaattttttttttttttacaacaaattaaaaattattattgaatagagtattcttaaataaaaatttcaatgatgttataaatattaataattatgtggatgtccaaatcttttatttattacca

SEQ ID NO: 144667 - DNA, 855 bp, Cannabis sativa
tttcttgatcaaaaaaaaaaaattattagagaaacatttatatttgtcactaacaattttacattaaaaaataatttcacacacataattatatttttcactctacatctttacacagtatattttgtaaattattagtagcaggaaatattacaaaaaaaagttctagcaccaaataaattatcctcaaagaaaaagagtagagcataaaaaacatgtccaaaagtaaaccacaaaattaaaatatatattctttcataatattgtcataatatcattagaaaaaaaaaaaaaaaaaacattgcactcctaagtaatgtttgacatagtgtatttttaatttctaagtattttttaaaaaatccaaacagatcatgatgatttgttggtaacgaatgaacttacacaaaaaaattattattaattaagattatatttaattatagaaaattaagcaatatatataatatatatacctgttgcataagttcaatcatacttgtttaattattttgatcaccaaatatactttgaatctatacaatcacgcattaaaattaaaaaaaaaaaaaacataaccattatataataatatttaactttgaacaaaaaattaaaaaagtatacttgactaaagtttgatgatattagtggcatatagagcaatgagcttgacaaattttgttcggaaaaagaaactttatcaccagattgagtatttgtattattggaaggaacctaacaatataaattgtaatcaataatgtaattacaaaataaataaaaaaaaaactaccaaataaattccataacaattacaataaaatataaatgtacctttttaggagatgtatt

SEQ ID NO: 144668 - DNA, 721 bp, Cannabis sativa
  modified_base (565)..(580): a, c, t, g, unknown or other
ctatagcaaatagacaaatattgttgtggcaccaataattatgtgttacatattgagattaaggattatacgtcaaggctttatcaagttggactcgataaccagaaccgagatgaactattctaaggccttactgtaattagacgtgtgagagcaacatgtaggtctacgccacgtagatataaatatatgtgtgagcgcaacacataggcctacgccacgtagacataaataagcatgtgagtacatgtaggtctgtgacatacagacatatcaatggcattactatttaaatagcgtgatgagcatatcatatttgttaagatttatactgtcttgctgggcttggctcatgggtgatctactgtgcaggaaagggtaagactgtcattgataagccatgagtgcaggagctggacgaagaatgtacatgttcgggccatatcagaccaagcgggttaagggtctaccagtgttaaatttttgaaactctactttgccgcttagaccgactaactgaaaaagacttgtaataaagtttgtaaatatttttgggaccccaacnnnnnnnnnnnnnnnnttattacaagttttattttcatttaggttatcataaagtttaaatttcgcgctaatctcattagtaatcccatataggggattaggatttcataagtatcttgggtagcgtgcctaattatttagggtgttacaatttggt

SEQ ID NO: 144669 - DNA, 840 bp, Cannabis sativa
taaatctagatcttggtaaaatctatccaacaggaagatgagaatattcctattattttgggaagaccattcttagccacggggagagcattaattaatgtgcaaaagggggagataaatttgtgtgttcaaaaggaagaagagactttcaatgtctttgccgcaattgaaattcttaactgttgtcgagtggtagttgaaaaggataatcgagaagaataaaaggaagcgcaaagaacgatttcaaactttttgatgacgtatgaaaagactgatctgtgggaattgttaaggtgcttcttagtctagggatagctttgaaatttgtagcgttggaggacagttctcttcatttggtataagggcccttatggatgcaagaggtggactgtatcccagttaaattttgcaaccactaccaccgccatactgatgtggcgctctggtaagttccattttctctctctttaatgtcacattggggacaatgtgtcaattaagtttggggggtgaacttaaatttttatttttagtcctttatttttaaattttaagtctttaagtttttagtttttattattttgagtcaatttacttaatgtgagtcaatttgaaagtaggtagatagcatggtttgaaaattttatttatttcaaaaaatctgtgtgctagacggctggatcttgttcggcgctgggtaaggtggcgtgccgggccacttgagggtctaatgtgtcgacgctacgcattgtctttttggtacgagccatcatcctatggctaaacgaaagacttaaggaagaatgcctgtcactcgaagaagttggactagaacaaaga

SEQ ID NO: 144670 - DNA, 527 bp, Cannabis sativa
gatctgggagattctcatatttttattggcccatagtttatgacatgattgtttgttacaattgttatcactatggttggtcgttttgtgattttttttttattctagattggataatagagttgttattacataatttttattgaaagatttttggctgatagttgttgacagggtgatttatcatatattcatttagattgaagatctaacattcttcgcgcttctttgatgctttcacgctggcgccttattagtattttagttgaaggtactattaaggttttcattcttatttttgtaaacgacatgatttgcatatcttgttaattctactcgtttgaattatatataattatgtaatgaactattgtctaatttacttattaatgaaatttttttatttttctctctcaaaaatattttatttgttttataagaatagagtgttgttttttttttttttttgacaatgaactttcattaaaaatactcaaatgtttatacatagagaaaagatgaaaatc

SEQ ID NO: 144671 - DNA, 654 bp, Cannabis sativa
tttctaagaaacaatttagtttctcgacatagtaagaaacaaaattctatttccttgtccattgctgaggccgagtacattgctgctggtagttgttgtactcaattgttatggttaaaataaatgttgattgactatggatttaaattgagagttttaactattttttgtgataacactagtgcaataaatatttccaaaaatcatgttcaacattctcgaacaaaacacattgatataaggcatcactttattagggaacttgttgaaaataaaactttatagttagaatatgttgatactgagaaacaattggctgatatttcactaaggccctagactcaagtcgctttgactccctcagaaaatccctgggagtttgcattgtctaatctcttttattctcgtttttgtacaatattgttgagttgttcttttcttgcatttaatcttgtttcattcctatttgacaaatcatgtttatgcttttggatgataattagtttaggatcttgtacttatcatacttttgaggttgagttaaaagattcatgttacttttatgtgtgaatgtgattgctttaagtacttttacagagttgagtgattcttgttttagtttcttgtcaggccccttgctggaatagagctacc

SEQ ID NO: 144672 - DNA, 1605 bp, Cannabis sativa
atattaatataaaggaaagcacataaggatataggtagctttctataattttttttttttatatttttttaatttttttgagagtatcatgttaatgtactaagaagatatgattattcaactaagtttactttttgtaataatcccacattgtttaaaaagtatagtgcatgggtcattacaaatacactataaataaattttttctcatagtattttaatttgtcccaaaatatatattttcttccttgactaattaattaaattactcttatttaattaattaattatatttttttaatttgtcccaaaatatgtatttttctctttgactaattgattaaattagtttattcatttaattagttataatttttttaaaaaattaattatctattctatagtctattacaataatatacattttatattttatataaaagtaaaatatatttttcatcttaattagtacacttttaaattataaataaagtattcttacattcattttgatttgtctaaatatacatggttgatttatcacttgatattgcccaattacatataatctttattttattattattttgagttctcaaatcaactctatttatttatctaatatatttatatactcatttaataaaaattacttaatatataaaaaaatacaaaaaaataatcataaattaaatttgatttttttaatgattataatgattgtacgagggacgatataattataaccattacgcgattgcacaaccaacttcatacagtatctatcattttaattattacaaaacagtaagataaataaatatttcaatatagaagcaattagtcatatgaatcgtgacctccctttttatcattataatttaaggcatatatttcaccacataatttattaaaattaattattttatcaaacatttcataaagaccaattttattattagccttttttttatataaatctctcatttttttagtttttaaaaatagataatattgggctgccctttttttacagttattatcttatgaaacaaaatataaaaactttcatactattaaagaaataataggtctaaatagttttttaaaaagaactacatcatcagtccaatttattaaatctaaaaatagtttttttttttcatttattcttttataataatacatgcaatttctttattaattctactagttttaacatctatcacgaatctttttacatattttaaaaataatatgtttctaatttcaatattattacttacacatatcaaaatactatattttaaattaatcattcaacaagtacaatatatgtatatataataaaaaaaattataaaagttcaacaaaaccgcgcttcacgcggcttagttccttaatatatataaaggagggttttgaagagatgatgtgacattctcttattctaatgttctactttttctaatttgtaattttttgttttttctattgttttgtatttaacattattaataacaacaaccaattaataaaaaagaagaattctaataggcattatcaaatgatgaatgtgttttctcacttttataacttacacta

SEQ ID NO: 144673 - DNA, 516 bp, Cannabis sativa
agattttaatcttagggacaaaaagtgatttcaaagaaaaattctgtaaaactaacaaataatatgtcaggagaagttgaaatgtctcgtttcattaaaagggagcaaggactaaggcgctagcggcaatagaacacaagaattcggaagagcagagctcaaaagataaagagaatgcaggacacgagaagttgggagaaaaaagtcacatggaccaataaagaagaaactaaagaagcacaagatctattctggcctataaattgaagattgttcatgagtaaaaaaaggaaatagaaaagattgtgtaaataaataaaataataacagtagaaggaacaaattagtaaatagatgtatatatgaataaaaatatacatgaataatagccgcacaaaaattgagacgtatgtatacctgagtttaggtgtgaatgaataaaggtaaaagcagctgtcacttgatttctttacgaagatagggttcacctcgaagaggcacgatacgctacctcta

SEQ ID NO: 144674 - DNA, 574 bp, Cannabis sativa
cacctatacctgtacaaagcatttggtaaaaataatacaatcacaattgcaaggcaattatagacagagaatgaaacctctagacggagaagaacttgggatatacttggatgtcacggagcatgttgtaagtgctgtactgatcagagaggaaaataacatacaacatccggtctattacatcagtaaaagactcaatgaggctgaaggccgatacccattgatagagaaactcacttactgcctgattctagtaacaagaaagctaaggccctattttcaagctcatcctattcgggtatacactgaccaaccattacgccaattattgcaaaaattggatgcttctggatggttgctcaaatgggcagtggagttcggccaatatgagattatcttccaacctcgaatagcaattaagggccaggccttagcagactttgtagtagaatgcacaggcaaggaagaaagcatatcagaaagcaaccctgagccaggttaaataccttagccaagtaacagtgaagacaagccgacttggaaactacatgggacgggtcggctacagatcaac

SEQ ID NO: 144675 - DNA, 672 bp, Cannabis sativa
ctaattacttattttctaattaaaatataatatattttagtatatttattttaataaatcattagtgaaaaatttacttgattaaagttgatctaaaattaaaaattaatgtttaactttaatctatctttcaaaaaaaatatatttcaaaatatctgcattaaacaatgcattttgaaatttagtgggaatcgattaataaatattttgaaaattattctaatttaagttgttctgaaataaaaatttccagtttaaatttaattttctatctaattaaatatcacgaaaataactattatttaagtttctagaacaaaatcaacttaaatatttaattttctatttaattagatatattggatattagaaacaaataattaagtatctagaatagaatcaacttaattattaattctaatttaatactagaaaaaatattataattaaagttgatctaaaattaatttattaatttattttcaacttaaatatacttttctaattaagtattagaaaatataaccaattactagaaataactacctagaatatatctcattaaactaagtgtttttctaaaattaattttaaaataatcttatgaaaataaatattttatattttaaaactaattatgttgcttaattcaattttaattaggttagacta

SEQ ID NO: 144676 - DNA, 863 bp, Cannabis sativa
gatgggatcgcggtggtggctgctcacaatggcagtatggatccgtttgcggcttctctagcggtggctccgccaccttatgtacagatttcggagatggaaaagaagcagaaattattggttgaggaacaattgatgtggcagcagtatgctagggacgggatgcagggacagcttggaatgggaaacatgcaacataatggttacaataatggaggttatacacatacctattaattaaaattaaaggaaaaacaaaaatagggtaccttaatgattttaattgattgttgattatagggggttagattttatttatgattttgatcgtaattttttttttttttttttttttttttgtaatgtatgtttggagttcgatcgaaagagtatataaattaatgaatggatcggtgcacaaaaattatttgtgttttaaatttaattagcgttggcagatatgaaggtatgcgaatactacgaatcaactttttcttttttgaatgacgaatcaactttttgaaatgttattaaaaactactcaaattgttgacattttctttcttcaaatttataactctaaaatttgtttcattgcgacaaataaagaaaaaataagtagcacaaggaaatgttgaattgtctgtcccaaatgcaagtcccattacctgtcccaacaataaaaaattgacacttgtgtggtgaaaataccctcaattttcaagccagaaaaatagaatttaaacaatgaaaggattaaataaacttagctttgaatcaaatgaaatcttattcaatctttaagcactattacaatccgaaccaagtactcaattgagtctaagtgttgaacacattacaaa

SEQ ID NO: 144677 - DNA, 692 bp, Cannabis sativa
ctggggggcaacacctgcatgcagcggtcaaattcagattcaaagcctccaacaacgaggccgaatacgaagccctaatcgctggactcaaactagcaaatgagaagaaggccgagcacatcgagatctacagtgactcacagctagtggtaaatcatgtatctggcgaatatgggggagaaaaaatgatagcatatctgagcaaaatacatgatctgctcgcacaattcaaaaggtactgcctcaggcaaattccaagagacgacaatacaacagcagacgcattagcccgattggcgagcagcaatataagtgacaaggcaaacctggtcccgatctagtttcttgaagagcctagcatcaccggcacggaagaaatcgaaatgatcgacacatctccgaattggatgacgctaatagcagcctatctcaactctgggaaactcccaaataactgaaatgaagctcggaaaatgagaaggaaggcagcacggtacatcatcgtatacgggatcatgtacagaagaggattctcaatgtcattactcagatgtgtcacacaaaatgaagctgcacggcttctatatgaagttcacgacaaatgttgtggaaatcatgcagccgaacagagcttatcaaagaaaattctaaggcaaggctatttctagccgacgatgattgaagattcgaaa

SEQ ID NO: 144678 - DNA, 716 bp, Cannabis sativa
caaaacaaatcgtttaacaaaataatttacaattaattatcgaattcttaaataaaaaccactagaacttaaataaaactaatatttacgtggatctagtatatatataagcatatattacattacataaatataataaaatattaggtgggctataattattgtattttgggcccaaatttaatggcaagaaattggacctaaatgcgagcccaatcttgtgattttgtaggcatagcctttagccttgaccctaccacctatcaaacaacttattttggtaggtccaccaatatcttctccaaagattttaattcttatttatgtgtgacatttattaattcgagatgcattttttatattcctgtatatattatatacatatattttattttgggctacctttttcttgttcttcaaaaatagtgattgtaaatatttcattaaatataagatttaataaggttaatactattttgtattttgtattttataaaagttaataattagagtttttattttattaaataataagatagattttatatatattttttttaaatagtattaatagaacgttaagttcaatttttaaccatcctttaatataataaacttgaaaacaattcttaatgtaaaggggtgttcattggatcacatccaatgtttttaagcctattcagattcgatccaatcatatattggatgttagattt

SEQ ID NO: 144679 - DNA, 992 bp, Cannabis sativa
  modified_base (273)..(276): a, c, t, g, unknown or other
atgtgtaggtaagggcaaggccaatgctgaggaaccgtgaggacgagccaatgaagattgtacatgtcggggcagttacgcctggactgtacgatcctcgcgacatcagtgcttttgtagttagtcgctgggcgacaaatattttgtaaagaactagtaaacttttgtaaagtgttttgtaatcgggatctcgaatattttgtatgaaatatatataagttttaattaaataacaaaattttaattagtcacgattttcattaacctcgttgnnnngcaacgagctgcatagtacgtttaaaatcacgtcaacacgcctatgctagttagggtgttacagttgaactccttgatgaactccaactagaaagagggttgaaaatggtggaaatctgagttttggccctggttcagaagctacgaagttgagggagaaggagaaggtgatttgttgtttttttgacttttctttgtctttatgttttgcttttcctttttgtttgcttcctcagcagctggtcatcctcaaaaggatcagccacagccacctatccctttcaaaaagagtgactaagctctaaggatgaaaagacttaaatgcccttattaccccgcaaagtgatcccgtagccttaggggtaaaattgtcgaattctgttatttcgttaaaccttgatattctaagatatccaataatattgccccgtaaaatacttgattcaaatatgtgcccatatgactaaaatttccattcgacccatttccactgttaccgggcataaaaatgtaaaaatatgaaaattcacagataacatgcaatcacacatataattcaataaaatctccggaattgtgaaataataatcataacacatattttcatgaaaatagtgtctatagagaataaaacatataaataatcacatcccatgtctaaaagtaacggtcattacactaccattgctagtgacgcccataaaattcaagattct

SEQ ID NO: 144680 - DNA, 678 bp, Cannabis sativa
cacttgcactaacataaaaaaaagaagtgcatttcaatcaatctattgtcttgatgtccagatcaagtgtaatatatttgactaaacgcaaattacaggaactgtaagtctgtggtaaggaattgctttcaccaccattacttctttcgtgttcataaaatattatgcaacatcacttttcgatatgcattactcctctagggaaacagaattctttactgcttttaagcgcttctgaatgaacagaagacatatctctaattctatccaaaatggaataaagatgaaaacagttaagaactttctttagtttgaataactttcagtgctttttgaaagtaacaaagtcatttagcttcattggtggaacttaaattattatagatgggtttttacatccttctagaataattcctccacaccagagtaaccaccatctcgaataggttatgagttggtatagattgattgtcttccaatgttccttgtttgattaaatcttagatggctcccactcaacagtatgagtctggttaagttcgtacccaagtgtacacttaacctcttactattagttctcaaggacctcttgttgtgacattttatctaagtctgaaactataagttccttctagactgtcatcaacttagcaatctagtattaacattaatgtaaaa

SEQ ID NO: 144681 - DNA, 568 bp, Cannabis sativa
aaagaaagggcctctcacagggctatttatactcacgaacaaattctctccaaacttggatcctatttccaacatgattttctaattcacccaaagtatccttttgccaatctagtccccttacgaacggcacttttcattccaaaatctatagctcatcttttttggtacctaacatgcctctgcacaatggctttcgaagtccaaactatggatgttcacactgctatacagtctttcgtcgaacaagaaaaaacaaaccagcctaccaaatctaaatggacattttgtcttggtacgctcctctagaggagtggcaaaaaatactttgggatgaatgggaaaaggttctcaacaataggcacgtctttgtttatctatcaagaccacatgtagccaacatgatggattgctacattgtcttctttattagtcttaatgcaaaattagacgcgaacaagaacatagtttgcaatcccacttttgaactatacggattgcaggaagcaccttttagagaaagtgcagagtacagagatctccaaaaagttatttttgagaaaaatca

SEQ ID NO: 144682 - DNA, 645 bp, Cannabis sativa
  modified_base (576)..(585): a, c, t, g, unknown or other
tcctaattggtccaagtcattaaaattttatttttttttaaataaattaattaaaatataccaataagaaaatgacacgtggataatgacgtaatattttaacggttaggttataaataaaaaattttagttgtttgatcccttcttcgtcaaaaaggtttgataaagtgttataacgattcgacccctctctcgttaaaaaggtttggtcagggagttataacggttcgactccactttcgtcaaagaggtttagtcgagaaccgttgaatttcaaaaagaatttgaaatgacgggtttgcattagacaatgtattttcagatgaatttcggttaatcatacataaatatcccttaagtaatttttaaagaataaaactttgtaattacttagtatagatgattctctttattcataactgaagtttaaagtttacatctataatgcgagttacatcatttatttattgatagtagggtcgcaaatgttctacgttccagtagttctttattaacgagccatcaagtcgatccaatttacaaactttgactccaactactgcttcgatgacatannnnnnnnnncaattcgggttgaacactcctgcagatgcgtctcttgtatttgcaaaggctcgtcttagc

SEQ ID NO: 144683 - DNA, 843 bp, Cannabis sativa
ggcataaaacccaacaaaaaaccctttgttcatacttttacttttatagcttttatattttctgtgtgaaatcactactgtgaggttcaaatttagttgacaaaattctgcgttaacaatgacaagtatgcgttttggtgtgccgtgggaaaaatggcctttttgccatttgattctttgtcttttagtgaaaataagttaagtaatgtaatcggattatatttcattattttagttagataaacaccgaaataaaattattatatcattttattcaaaattagaaagaaaatcacaagcctcttcctctctctctctctctcgcacccaagaactagcaagggttagggttctcttcagttcaatttaggtcatttttagaataatctttgtgattccaatcctaggtaagctcccaagctcttcatttgttgatttcataaaatttcaagctaagtttatgcatgattttagagttagggttctgtgatgttaatggtatttaattttgtattgtgagattaaattgaagttatttaagttgatttgagttgagtttttggtggttgtgaggtttgtttaaggtttcagcttaagagctcaaactttgctctcacattgtggattttgattatgagagtattggtttgttttattgcatgatttctacttattgttgtgtaattaggtactctggaaggtttggtttagttaagggttgaattaagttattttttgggttttttgtggttcctgcactgaactggtcgactggtttagcaaggcctgtaggaaccagaattccagttggtccccaggaaaccccacagaactggacttccg

SEQ ID NO: 144684 - DNA, 582 bp, Cannabis sativa
gtcgaaggcatgggcaccatctatactcggtttcagcagatccctatatattaccgtccacccctcacaatagctcttagggacagagctcaaaggattgttcagctggcggacgagggctcagaatatcaccttgtagacctcataggccaactttgtggagtatgggctttatccaacagatttcattcctcatctgtgaaggagaagaagaggaagtccagtgctttccgggatgagggagctcattaggataatgaactcattcaactaaagcgtgaggctaagttgaagggaagagccggggccgaacaacatgctcaagaatattctgagcaggaggatgaggctaagcaagagcaggaatggcctctcaaaaggaagaagaaactttttgccgggcacaggcgcagtgaacattcgatccagatcagggagcccggtctacctactcggtcgtccactcctgtagaaggcaaggggaaagctgtcctagaggagcaagaatactcgtcggatgatgatgccccatcagtagttgttcgggtagatgcccctgccagagtgtagggtactcgatct

SEQ ID NO: 144685 - DNA, 568 bp, Cannabis sativa
atcattaatcataatttcatgtatcttagaaatgtttgttttgttttgtttttttaaaagaaaaatagaatttttattaattaattagtaaatcggacataattcattacatgcagttattgtccatcgagcaagatgcaaaaataggctaactaagttgcttacatcaaataggacaaaccctacaacaactttaactaaatgacacatataagccaccgactgtgaagcattaaattaatgtgaaaaatactaaatttttatcctgaatgaatatgtgacaaatcatacctatcaatgacagtcagccaaaaatcttcttacaaaaattgggtaaaaataacccaattattcaaactagaataatggaacatgacaaacttgttcaaaattttcgacattaaatatagatgaaccataaaactattatatataataattaggtatgtgtacttgattgattcatagtaattacatcaattccattcatagcaattacttcaatttgatagtgcaatactatcaactaagtcttcctctctagatctctaaatcagaagcagtttat

SEQ ID NO: 144686 - DNA, 717 bp, Cannabis sativa
tattaaatttataattgagaaacattgtatatagttatggatagttttgaattttttaaaatttaagtattatacctcaaagcaatttttttttttacacttttaaattttttttacttacatttttactaatttttttataagttttcacttagaaaaatataattttcactttactttcatgtagcatgttaaaacaatattaatagcagaaaaataacattttatattgttgtaaaataaatcatgttattttcttgtggtagcaatgtccaaacaacagaaaaataacactgtgtatttttgtaaaaatataaaataaaatccctaaaaatataagaaaacggcatatccataaaaatataaaaaatttgtcaattttgtatatttatgaaataattcgaagaaataaagggtggccaaagcccacatgaaaattgggcccaaaaccctaataagagatgaaaccctacgaaaaccaaatatatagttcagttctctgctttccactctcgtgtagcgatataatcttaaccggagctgtagattcaaccacatcgcaatggtaagattctttgccgttttctttagcttcaggaagatcttaatatctttcgttattctccagaaatttatgatttaatttatttgttttgtttttgatttgcaattgcaggcgccgaagaaggaaaaggctcctccaccgtcatcgaagcc

SEQ ID NO: 144687 - DNA, 867 bp, Cannabis sativa
  modified_base (807)..(815): a, c, t, g, unknown or other
tacttgaaagcatatcaaatatcaagtatttagtttctgtttctttcttagccttaaaatcatacaaatcaaagtgatataacacttacggataaaatctttgaaaccacggttttatacaacactcctctttgttagttggccaatattttactttgttggtcaattttgatttggatttctatatggatttgtgtgattcttcattggcttgattagcaatactgtttggatatatgttgaaatttgtattaagaaacaatataagcacaaaatttcaaactaatcactatctatatacatgcacaaatttgttatgaacgattgtctaataaaatatacatggtacctgtatttgtgttgagtgattgttgaagaaagttcttaagaggactggtagatgttgactcatcccacagccacaagttatacatgttcattcacaaagattgtctaaaatggaataagactaattcgagataatgtccttgtttgagtatagtgcacaaaacattacatacttaatagctatgtttttagtgaaaattttgtaagtgagccacgtggagttcgttagttggtctgttggtccaatgataaaactctataatatgtaccagacaaaatgttgtcatgtggctcaagcaagcgagccaacaccccataaaaaaaaaatattgacggctaaattatttaattataaatttttcaacacttaaccacaaaaatcgattttttgagggcaaaactacctcaactctcataccgttttgctctgtacctctccgtccaaaaatcacagttaannnnnnnnntgtactgtccacgtgtacacacttgtagttgtacacgtgacaaatttttagt

SEQ ID NO: 144688 - DNA, 552 bp, Cannabis sativa
ctcttccgatctttttgttatctattgaatacatacatatatttcaagagttatgtgcataagtcataacttggttagacctagtatattactaggataaaccactgaaagaacataatgtatggattacgtaaatatatatatgaatagggttatgcgaaccaggttagacttgataaatataactgagataaaccttactaaggccttattgtaaatagatgtgtgagagcaacacgtaggtctatgccatatagacatatgtagatgtgtgagagcaacacgtaggtttatgccacatagacatatataggcgtgtgagcgtaacacgccggtctatagcaaatagacaaatagtgaagtggcaccattaattatgtgatatatatattgagattaagggttatgcgttcaaggcataatcaggttggacttagtaaccagaaccgagtcgaactattctaaggccttatgtagttagacgtgtgagcgcaacacgtaggtctattccacatagacataaataggcatgtgaacgcaacatgcaggtct

SEQ ID NO: 144689 - DNA, 699 bp, Cannabis sativa
  modified_base (200)..(201): a, c, t, g, unknown or other
gaggaagaaaattgtgcatggaattccgaagagaaagcttttcaggagttgaactttccgagtgccaatttgaaataccgttgctgggaggcttccgagagagtggcaggaaaaattctgtagcatacatctccctgtactccttgcagatccatttgcatctcaaaatacttaaggtgggataatggatcttccttccnngtatacattttccaggttggcatcttaaacttgtggggcaattccaggatattgatctcgggggagaaaggggttctacatgctcgatccaacttgagattgttgttcctctgaccggccatgccttggaacatactttttagttcgtccagctgtgcctacacggctggactaacctgtttggcattttggcagatctgagtcacatcagcatctttctgtgcgagattttgaacacgggttctgagttgtacaatcggcgtgtcaagttgatcggccactcctctcctcctatttagatcatttctgagatcatgggtcatccccaacctctcaaatacggaaacgcctgactgtctcaatgactggttggtttggccaatttactgaccattaacttcgttggagttattgggtatgacttctcccgatgaattactagacaaggcctgcccgcctaccacttggcccacctgtggaacctgtgaccggggattt

SEQ ID NO: 144690 - DNA, 592 bp, Cannabis sativa
cccgcactgcgaacacccctactgagcaatagtctcccgaaaaagaacatccagcagaagggggctatgatccgaaggagaaatatcaagattaaacaatttagatgaagagaaattatttaaccaagaattactcaccatcgctctgtccaaccgggcttctatccattgagcagtgtctctactcttttcccacgtaaaaggatggccacacagatccaaatcaatcagcccacattgatgaacaacctcctgaaagtcgtcaataagccacgatgggtaaggcaatccatcgaacatctcaccctgacaaagcacattgttgaaatctcccattaaacaccaaggagtggtagaacgcccatgtaaagtccgtaataggtcccaggtattcttccttaaacttctattaggttccccgtaaattccagtgaacctaaattccctctgcccatcaagtgttataagactatctaaatggtttgtgtaaaacgactcgaccttgacctcctcttgattcttccataacagtgctaaacccccgcttcttccttgggccgcaaccacaaaacacccctcaaagcccaaactc

SEQ ID NO: 144691 - DNA, 621 bp, Cannabis sativa
atctaaatactatgttttagtcaagtaagtttttgctgtgactaaaagtcaaatttagtcacaaaaatttatgttgtgacgaaaaagttgtcactaaaaataatagttttttgtagtgtggtaatattatagatgtgcatgacaacctagatccatcctagatctgttcacgtgtgtagcgcgcacccaatgactgacccatgatttttgatctgtgggggcttaattgttataaaaatatttattatttattttacattaaaattataattattttgtgaggactttttactattttgttgtataattatttaactaaatagaagatatttaatttttttttttaacgtactaatttttttttgtactgggggctatagctcccacactatcattagtgtgtccgtccctggtagcaccctctcctacatgttaatatcgctattggtccaacttagtatcatgttctatatagtttaatgtaataatttttaaagagtattattagtcaatcgcaagacaacatatctaaaaggtctgatgcctaatagcaatgtttttaatatcacgtggctatttgcatggtagagctggagattagtcaattataattataatgac

SEQ ID NO: 144692 - DNA, 533 bp, Cannabis sativa
taagtttagatccaataattttttagcggcataattatttgatattagtaaaattataattttcatcaagtttcgtcagtacagactccgttaatattttaaatttgtaactagacttattagtttattgcatccatccagagccaataatgtagaacctaagcctatgtaaaggcctatttaaaacaataatagaatttatattgacgaaattatataaaaattacaattttactaataatattattatgaatacttatgttgttaaaaataattattagctttatataattacaaacttaaactgttaattacttatgccgcaattattctaaataataacaataataatcatatttgagttatttacaataaaagcctcatcatgaaaataaatttattagccatgtgacacaatcatcaatatataaaaggttaagtaggatttttaccttctaaattttgaaatactaaatcatgttccttgaacttttaaggtcattaaaaattttcctctgaactattgagattat

SEQ ID NO: 144693 - DNA, 515 bp, Cannabis sativa
agacagaataaacatactatataataatatagtccataagcactatatatcatataaattacaattctacccttctcaggtcaaaactataaaaatgtccttgatacaccaacaaggtcttaaaatgcaaatttacagcatagtttcacatattaaattatataatatattaataatataattctacattaatatataattaattcaattagaattgctaattccatttcataatcctagggtattaccaactcaaaacatgcaacttttgttgattgaatgttcattattataattattattattattggattagttttttgctctgtccacggaccaaattttaatatcatattaaagtggtggtattgattctttctttttcgacaaagttggatattggtgtttggatatttatgcacatcgcaattttcacaatccaaaatggcaacatgatggatttcctacccacagtaacttcaatacaaaaaaaaaaaaaaattacaatttaagtt

SEQ ID NO: 144694 - DNA, 1361 bp, Cannabis sativa
  modified_base (1149)..(1149): a, c, t, g, unknown or other
gtaaaatatttccaacaataacttggcaccatatcacctaatcaggtgtacttatatatcatattgcctaatcaggcaaaattattcacaatctgaaatccatatatcatatcacttaatcaagtgaagtcgtatgtcacattcacaataatactgtctaatcagacaatcgacgattacaaaaccttacatgccatgtggtacattaaacttttcttacctttgatccagattcatgcatgtcggccaacccaagttgagaaatatccccgatgatctctgccatatgtcacaataacggtaaatcaataaatatttatcccaaaacactgcttaacactcgtgtaagacaatttagggttttctaccaaatccttgggtataaatactcaaaaataaaacttatattttggctctaaaacatacaccatacggtagatatcgttgcaagcttcgaaattgtagatagaacgtctaaaatggacacctgagtgaaaagttatgacaaaaatacgatttctaatctcctaagaattttagaaaacggtagaacacgaaaatcccaaattttgcattcaccgaaacactaccgaaacttatccatatcactccaaactttacaaggcacatatataccataaatattaccatccttacataacagaaattaaaccctaatgaaaaatgtcattaacgttcgaactaagctctaaaaagttccaatctcgatttctaactcaaaatcacctcaaattcaacacgtaaacatcaaaactagtcccatagctaccaaaaaataattctataaattcataatctccataactattctaattcacaaaaccaatatataaaatcaatcgttctaagcttaaaacgaaattagaccatacattaggctttccttctctaaggattttctatcccggtactaccagagcttagattgttaggtttcgagttaaaaatcgaagaaaatagatagagaaagagaaggtttcgttgaacgaaagagaagagagggttttattattcttgtgttcttcaatttataacttaacatatatataacttaacttatacgtttttaatatatataatatatttttaaactgataagaataataataatattaataaaaactttantattaatagttatcttattattttctagctactaaaaattttctaattttagggtatttggtcaacttcgagtaccccaaaatacctcagtatttttaaaatcaactcacctcaataatcccataatatttctaactaataccgttgtgatatttttggcctccaatcgagtctccaaggtcgcgaagatgaaaatatttttatttcacaaa

SEQ ID NO: 144695 - DNA, 561 bp, Cannabis sativa
aaagggagaagaaagaactagttggtgatcttgctccgggttgccacaattacttcctttgcctccttcttcagttctagagtttaatttctgcctcccttgcctctaaaacacgaagcccttatatagaaaataatgcagatatctttgaatggtgaaattacaaaactgcccaaaaatctcgtctttcgccgttggtcgcgactacataaagcctagtcgtgaccataggcaaattggaaagtccatgctctctacctagcctcctagtcgcgaccatggaaaatggtggtcgcgactactgaagcaaatttgacaacttcagcatctttcagtaaaatatgcataactttcacatacaaagatatctgtcttggcccgacactcacccggatggtgcttcttgcatttaagacactcgggatatgatcggaatgaggacccgcggctctgatggccacctttgtttccccgaaactttctgttaccccctgatgctccggaagtctccgccttccgtttgtgatcagggttgccactgtcggtccccttactgacatg

SEQ ID NO: 144696 - DNA, 1008 bp, Cannabis sativa
  modified_base (872)..(873): a, c, t, g, unknown or other
tagtgtatagtattaatggccttgtaaattttttttaaaaatgttttttaagaatttgtaattagttattttagggtaatgtgtattcatttttaagtgttgcaatatatatatatatatttatatataaattagttaaattttattttgtataattgtgtaataattattttttttttgaaatggtgtaataattattttagtgtaatattaattttaaaagtttgtatattactagtttattagctaattagatatgatagaacttagaaatttttaaaatattgaatgtgcagaaaatgcaaatataattttatttttcttgaaagaaaaggtaattgtgttgattaaactttaagttgtaatatatataaattttattattttgtgtaacataaaattaaaaagtttcgtttgggatatgtatattagtgattacaattataaaaaaagttttatttaaatagtttagatatatatattgtgttactaaaattttaattttataatatgtatgtggtatggtattatttttttttttttttggatatatttgataatatagtaaaacattaatattgtaggttgttgatttaattagcaaggattcattttacaaattgaagtgaagtttgtttggtggttcattaaaagaggtgtgtacaatcacttatttctttacttaacgacataatattgttcatcttaaaagagtttgaatatcttaaatattcatccatagtgaagtaggttttgagattaagtgtgtgttgcgatgataacggaaggttgacactttgtagtgaagtaggttctaggaaatttgtgtgctgcgaagatataaggaagaaacttattgtgtgatatttgtnntttgtagatataataggtacttatgaaaatgaaaaatgttatagatacagaggaaactctgcccaatttttaattatatttattgtgtgttgtttatcgtattttttatttgttgatataggtacttataaaatt

SEQ ID NO: 144697 - DNA, 919 bp, Cannabis sativa
aataagctttttggacaaaggtgcttaaaccttgttcaagcctttggtgatcccccatagcttacttgagttcttcttcatcctctatttttctatttgctttctactctcttctctctctttattttatatatactctatatctctactatatatcatatatatttattgtatatatatattctcttattgcttttacatttatgtgtatattttgctttgagctgtaatttttttttctcatcttttctttctctttatttgtattttgtgctttgggattgtaaaatttatttaatctatagtccttgtaatcttgttgcatagagttgtaattatcttcgtcatctctttattcatcgtattgttattcttctattgatatctcatattttcctaacaaatcaaaaagcttattattttcaatgacatgagaaacaatcaagatgatgaaccaagacttggtgagattggactattttgatggcaccaattttactaggtggcaagacaaggtgaggttcctcctaaccacactcaagattgcttacattcttgagtccaacttagagcccttacccgtgcctaccgacaaggataccgatgaggtcaaggcacaaaggaagaagaccaaagatgacaatcttctatgtagaggacacatcctcaactcattctcgaatatgttttatgacctatacaccgacactaaagatgccaaataaatttgggatcatcttgaaaataaattcaaggttgaggaggaaggtaccaagaaaattttaatttctcaatatttgatttaacatttcttgatgggaaacctcttttacctcaaattcatgagttgaaagtaattgttaataaattaaaagtgctcaaaattgaacttcctaaggcattccaagttggtgcaata

SEQ ID NO: 144698 - DNA, 756 bp, Cannabis sativa
ggtgtaaggacccaatggaggcttgaagcggggacgttacaggttgcaaatatactctagtacttactcaattaatgagtttttccataaaaagatacgacacagattcacattctctttatcttgacacgtgtcctccatccgaattttgagtataacattatgtaattaattttgtccagattcaatgaatataaatattcatttatcacaaaatcaattatttatttattgccttaaatagaaaatattctaataatatatgccaaataaacttattagtttattttgacatattgaaacaaaaataaaacctgatagtttctatcacactaagaatgaaaaaaacaaatgagctcgtcataaataaacaaagaagttatccatttgtataaaatttatacttttgattttcttaaactgaaaattaaatgatatataacatgcatattagctagaaatttttttatatttatgatgttaccttgaactcgattctcatattcaaaatatccctcctactcctaacatgcatatatattttggtaatctaaatttattgtagaaactaattagttatcatagtataatataatctaattaaataaattcttaaataaatgttaactaagattaagaaaaaataaaaaatggtaactaattagtatatgattagtaaggggtgttcactaagtatccgatccaatctaatccgcacgatccaattcaattcacaaaatgcagatatccgcactt

SEQ ID NO: 144699 - DNA, 1023 bp, Cannabis sativa
accaacatagatgcttatttcaccctggacatgtatgatggaagtgtggtaccattaacgagcgaggttcgatcgaatctgaatatttctcgtggcggtgtaggattttggttcgctatttgtcttcctcagtggttgttatgccttcaagataactctaaatctctttcttggtcttttatttcatatcgtcctgatcgtgtggctagacaatttggatttgacatgttcctcatgatcgtaaagcaaggagtctagagaaggcatcaaaatcatgtttgttaggttctcttcaagtttcaaaaccctcgtatgacttgttccaaatcccatgtaaggggaggcagggtggggtatcctcaaagtttgttgacttgtggatgcgccaaaataacatatggtcagtctgtcaaagtaagaatcgtgatcgcgaaaggggtatggactctaccttatttttttcttatcatgcatatccttttattacatatttatgtattaataatgtcggtcccttttttttatgccttcatcactttgtcaaatttacatttatatatgtgactatgcatatatcatgcatacccatatttatatatatattaatcattacctgatctttgataggtcctacagaaggagaggatcttaccaccgaaactggggcacatatcacttcacaagaaacacaacctgtagaccctcatagacatggcttggttggtgagcgtcatgttccttctaggtctataccggatgatatgatgtcgacatttttggagggtgaccaaaatgttttagatgatgcatgttggggtagtaatttatctgaaaaaggtgctaaaactcatacaaatcacaagctgcaatgtttgccttgttcaacaaatagcagccatgatggatcaattcagactgccattccagttgaaccaattcctacaattgcatcctttggggtacgaaagtacttaattctcctcttcattcttgctttatagtatattatgaataattttctta

SEQ ID NO: 144700 - DNA, 795 bp, Cannabis sativa
gtatgagcaacaagagccacatcttttgccttagcagtcattttcctacctgttgcaccacctgaggagttagacgatttaccctttgtagactgtcgtttaattaggtttctcaaataggtgttaagtttgtagcacttaggtctgatatgccctctcctgtagcaaaaatggcatacagggacaaatctttcttgagatggggcagatttcttccttctagatcttctattattgtcgacctttttcaaacacttgaggagttctctttctgactacttggcaagttctcagaggcagggacaaagttgagtttactttcctcttatgaggatgaggtaccattgatggacagatcctgcccttgtttatataacagtttgtaccccatggaagtgtgatccccatatggtttttgactgtgtagggcttgattcaaggctgcagttcctaggggcaagcatgagagggattgtttagttctgacaaattctacagttagcttatagatctcgctatcctttgagcacagtttcagagtgagtttttttaacttctcgtcaagatctgttttgctggcatccaattccttgttcagatcttgaagttccttgacccttttagccatataactccattgagcaaacatttcttcataggctctatttttttcagcaccatcagagtctgaatctgagacagtttcctctggttctgatgctacagaggagcattctttagccatgaaagcaatcatggacttatcatctttagagctatcacttggctcttctt

SEQ ID NO: 144701 - DNA, 746 bp, Cannabis sativa
  modified_base (144)..(159): a, c, t, g, unknown or other
accatatctccaacaaagaatttccgagccttcaattgtttgttgaaataccgagctactttttgttgatgggctatcaactttaagtttgctgtggttcgtttctctttgatttcattaagtgatttggcaaggagtacgtgnnnnnnnnnnnnnnnntacgtcaatcttctgtgggatggttgttcaagctctacaagcagcataacttcatatccatatgccatggaaaatggagtctgtccggttgcccttttttcagttgttcaataccaccatagaacttcagggagctcctccagcaagtttcctttagcatcctcgagtcttttctttaatgtatcctccagcaagtttcctttagcacagctggactaacctgttcggcattttggccgatctgagtcacatcagtatctttctgagcgcgaatttgagcacgggtttcgggttgcacgatcggcgcgtcaagctgatcatctactcctctcctcctatttagatcatttctgagatcatgagtagtccccaacctatcgaatacgaaagtgcttggttgtcttagtgattgttgggtatgacttcttccgatgaattgttagacaaggtctgcccacctactacttggctcacaggcgaaacctgtgactggagatttggtggctgaccatttatagtctaagaggtattcatcgttggatcttcgtctatttcacccaggggatgacatttgggggttgctgccc

SEQ ID NO: 144702 - DNA, 728 bp, Cannabis sativa
ttaatagggttggatcagggataaagtgatcgttgggatcacagagctatgaccctcagtttgactcgactactatattatcaactcagtgatggtttaggtggaaatttttgaagtaaacctccacttacactgataatggactaattacaaggacaaaatagtaaatacatgcaaatccctaatttggccttcggcctctataatccctaaaagaaattagttagaatggattaggttataatcctcacctaactaatttctataactaactatttacaggtataaatataaaccctagatctatatatacctgcattaatcacaaccaagaacagttgagtgatattcttcaagatccaggggttgaaaagcttgaagaagaaggagaagaagctctcacatgcacaagaaacaacagagagttagtatagttagagagagagggattaaacactaaatatgtattaaaacaagagattactagtctaaaaacatacttgtgacttggaatctcatccttgtaactttgaacatcattttcatagtggaatcgagctctcaatctgaggaggagctcaacggagacgtagccaatttatttggtgaacttcgggaaaaaatctggtgttttctaaccctatttctttctgtttcgtgtgtgtgtttgaggatagatcagatctagtcagatctgatctcgtgtttgtgtttgatttgggatttct

SEQ ID NO: 144703 - DNA, 567 bp, Cannabis sativa
ttccgatcttaatttcatatatatatatattaattaatataaaatacattttttccttaatttattctttttttttaaaaaaaaagaattaaaattttaaaataatgatatacaattaattaatatcatatatacgtacacatgtatgaattaactttaaaaaaaatttaaaacaaaaaaaatctaatataaattaaattcattatattatattaaataattaaattatttacatatatattcatattcgtactatatatattctcactaactatatacattttaaataatattatcgttaaatatataatttaaaaaaaaaaactaaaatatctatttatatacacaccacattatttaattctaattatttttttaaaaaacaaaaaaaaatctaaaataaattacaatgaatataaactaaattaattatattatattaaataattaaattatttacatatatattttcgtactatatattctcaataactagatacattttaaatagggcattttacaattttgtatacattattttaattaattacaaaatatgtgcaaaaa

SEQ ID NO: 144704 - DNA, 739 bp, Cannabis sativa
  modified_base (43)..(73): a, c, t, g, unknown or other
aaccatgcaacataaaatgttgtttctgatctttattaataannnnnnnnnnnnnnnnnnnnnnnnnnnnnnntagggcataaaacccaacaggggtcacctcaccgcccttggatttcttggccgggggagatgcgcttgagcttcctccaactctcttcttcagagccttgaccatcttctgagacatgtttgcacggaacaaaagcaacatggttagagaaaaaagacattagaagcataaagcataatagtcaagaagtttaagaacaagacatagtagcctgcaagatgattatccgagcaagactcgaaagtccatcgtcgcctgacaagtctcttatcttcgccatatcagttttcccttttcctagcacgggagaagatggtcgagcaggtgaactaggctccctaatttgaatggcatgttcaatgagcctgggctaggccgggggtttcttcgtccttttgagcggagtcacctggtcttcctcagcctcatcttcaggattcaagggctcttgagcatactgttttgcccttgcacctcaattccacttagcctcacgcttaagttggatgagttcattctccttatgagctcccttagcccgtccaacaccagatttcctctttctccccctcactggcttaggaatgaaatccttcggatagagctcgtacttcacaaagttgtcctcggaggtcaactgaatgattgtaacaccctaactaattt

SEQ ID NO: 144705 - DNA, 754 bp, Cannabis sativa
  modified_base (158)..(158): a, c, t, g, unknown or other
cagcataaattagaataattttttttctagttttattttattttaagttgaattttgaaaaatctattactttataatacattgattttgaattcaattagatatatatacatatttatagaaaattaaatttgagttgaaaattaattatttaattnattttggaccaacttaaataagtaattttcataatattcattggaaaattaatactaagaatgaaaaatcaatttttatttttcagatctcctagggtataattttataaatattaaattaaaatttatagttagattcatctaaattagtaattttaattaaataaatatatattaaattaaatagattaaaatatataccaaatgaaaatacagtcattaaaataatgagctttagttataaggatattcaatctccattattggttctacacagttcttgttttagtgagtaatcatccctaatggatgaacgttcattagcaatttaacattgtagaatcttaaaagataagtattattgtaagtgttttattcttagtaacgaccaccctaaagttgctgctaagagtaagacttacaaggtatgaaaaaatggtggaagctcataagatagaatggtcttgactctcgcctaaacaggacaacgccgaattctagtcttgattgaataaaaggttgctagaatggtatccattttagatgagataactactctattcaatgaatgatatctttgactctagcctaaacgg

SEQ ID NO: 144706 - DNA, 1415 bp, Cannabis sativa
  modified_base (748)..(750): a, c, t, g, unknown or other
  modified_base (980)..(985): a, c, t, g, unknown or other
  modified_base (1250)..(1251): a, c, t, g, unknown or other
  modified_base (1361)..(1367): a, c, t, g, unknown or other
ttccaagctcatcatgttcgggtatacaccgaccagccaatacgccaaatattgcaaaagctagatgcttctggacgactaatgaagtgggcggtagagttgggccagtatgaaatcactttccaaccccgaacaataatcaaaggccaagctttagcagactttgtggtagaatgcacgggcaagaaagaaagcataccagaaagcgactccgagccggtacaaacacctcagccaagtaacagtgaagataagctaacttggaaactacatgtagatgggtcagctacagattagttatgtggtgcaggaattgcccttgtcacacctagggggcaacacctgcatgctgcagtcaagtttggattcaaagcatctaacaaagaagctgagtatgaagctctaattgctaggctaaaactagcccgggagatgaaagccaaacacattgaaatctgcagtgattcacagctggtggtgaatcatgtatttggagaatatgaatctcgggcagaaaagatgatagcgtatcttagcaaaatacatgatcggcttgcataattcaaaagctacggtctcaaacaaattccaaggggagaaaacacaactgcagacgtgttaactcgattggaaagcaataatgtaagtgataaggagaacttgattcctattcagttcctcgaagagcctagcatcactggcacggaagaaatcgaaatgatcgatacttccccaaactggatgacannnatagcagcctacctcaactctgggaaattccttgataatcgaaatgaagctaaaaaaatgagaaggaaagttgcacggtacatcatagtagagggaattatgtacagaagaggattctcaatgccattgctcagatgtgttacccaagaagaagttgcacgactcctatttgaattacacgatgggttttgtggaaatcatgccgtcgggcaaagcttatctaagaaaannnnnnggcaaggttacttctggccaacaatgattgaagattcaaaaccctatgttacgaagtgcgacaaatgccagagattttcaaagatacctagagctccaccaaacgagttgactcagatgcaaagtccgtggcccttccccatttggggaattgacctgatcggaaaattacccaagggcaaaggaggagtgcagtacgcagtggtagcggttgattacttcaccaagtggacaaaagtcgaaccactcgcaaccattacatcaannaaagttcaagactttattgtgaaacataatctgtcagttcggactgccgtacaagataattttagataatgccaagcagttcgacagccaatcctttactgacttttgtnnnnnnnatggtatcatcaaaagtttctccatagtggcacatcctcaagaaaatg

SEQ ID NO: 144707 - DNA, 692 bp, Cannabis sativa
gtttgagttcgggtccgagtctttgtctgggttttatccaggtctggaccccgatatgggtctaggttcgggtctatgtccaagtttgggtcttgactgcgggtcctggcctaagttccagtctatgttccggtctgggtacacgattgtgtcctagcctatgttccagtctcattttgggtctgaggctgaggctaggtctgtgatcggttttagggctaggaccgagtcctgatcacggttctagtcttgttctagggtcctagttcagcgattcttattcaggttcgaatttcaggtctcaggtataggtcttggttcgagtttggttcttcgtctgggttctggtcctagtctgagtcctacatctagacaccgactactgctctgttcaaggccccgttacccgaatcccgagttaagatctcgatcactgtcacgggtctttgttttgttctggttcaggtcccaggtcccatttcagagtttgggttcgggatcgagactggggtgtagttctaggtcctgacccttgttctgtctccctagtctggtttcatgtttgggtttgagttgaggttcgggttcgggtcccgagtgcaggtttgggtttggatggtccatcccccaattcgggtctaggtctgatttggagtcctggtcctggtccggttacggttctagatctaggt

SEQ ID NO: 144708 - DNA, 1411 bp, Cannabis sativa
attattatttttttcacaagaaggctgatcttttgaacacaaaacgtctttgattgtattgtcaacaactttcataacataaggagacaaataatattgactataatcaacactgttctcatgaaacctacataacaaaaaaaaaaactagttatattaaaagggaaaaaaagattcaacatcacataaactggtttcaaaacatacaaaaaaatatggttaaaacatgtaccgcagacttaacactgtgaactgataattctagaccaccaacattatcagacaaatcccgataataagcctgtgaaaaattaaacaatttgattaaaagagaagaaaatcagtttcatacacaaaacaataagaaaaaaaataaatattttgactaaaagagaagaaaaccagcttcatacaaaaaacaataaggaaaaacacaagggtaaccatattaaaaaaatcatattaacttcaaaaagccatttcaacaacaacataaaaaaaataatggaacaaaaaataacctaaagaatggtgccaacatttaaaactagtttaatcaacaacaaattaaactaattcttcaattttttttttaaaaaagaacagtttctttaaacaacataaagaaaaaaatacaatgcaaagagaaaaattaatcaaaaactagtaacaacttaaaaaaaaaaatctgtttcaatgtgataatcaattatactaaagaataattacatataaaaattaaaagaaactaataatttcgttaatataaacaataataaacgatttacctctctatcaaaagcaccaaacaaattgattgtgtctatctttttatggtttttggagttcattttttcaatcatcccactcaacttagccaaatccctagaaaactcatctctcaagattgtcatctcattacaaatgcatatttgagaatctttaataaatgataaacttctgcaaatattctcaaacttctcctcaaaatcctacaaaggacaccaaaaatattaaaaaagagaatatgaaatgttagcaaaacaattagtaaacaaaatgtttaaaaactcgtttcttaccttctcatcatccacactcttaggaagatacacgggttgaaacttaaaattcttcaaaagacgattatgcctctcagcatcagtaagacgaatatcatctacaatgacctgttaaaaaaaccagtttcaatactataaagcaagccaaataaaaaaaatcaaatagcaataccagttacaaagactattttacgtcagggttattgaaaacctttcgagtaaagtcacaaaaccataaacctcgaaactttgccaattaagtattctacgaaactcagaaccttttcgcacacaatattcaggggacaagctaggaataatctcataaa

SEQ ID NO: 144709 - DNA, 795 bp, Cannabis sativa
gtgccattaatctgttcttagtttattaatcttgattgcttagtgtccatacttgattgaattttattgctggtttttggattgcattttcagttctggtttgtgtttaattgttctttgttgtgtgttcttgaatgaggtgaattgtgaattcatcacaaatggtatcagagctcggtggagaagagaattgagattcaagaactggttcaagactcaaagaactcaacctgaaagtgtcatcagcaagattcgaagtcgacaagtttacagggacaaacaacttcagtttatggagaatcaagatgaaagctttgcttgtacatcagggaatctcagaagcaatcgatcctactcaacttgcagaaattacagatgtaaagatcagaagggatacataatcaaaggctcacagtgccattttgctaagccttggagatgaagtcttgagagaagtatctgatgaaactactgcctctggtttgtggatcaagcttgcttctatctacttgaagaaatccttagccaacaaattgtacctgaagaaaaagctttatgcaatgagaatggatgaaagcaaggaattaagatgtcatcttgatgaattcaatagaatagttcttgatttgaacaacataggtgtcaagatcgaggaagaggaccaagcaatcatcttgctgagttctctacccaaaacctatgagcattttgtagatactattctctatggaaaggacacattgaccatgtcagaagtaaaggctgtgactcaactcaaaagaaatccaaaagaaa

SEQ ID NO: 144710 - DNA, 2550 bp, Cannabis sativa
  modified_base (1478)..(1479): a, c, t, g, unknown or other
tagttccattaagcacgtaattaaattaatttcatctatttacccttctcgggtcataattactaaaatacccctagctcaccaacggggttgtaatatataattaatgaaataaattctcatatattgaactatataataatataattccttaattattcataattatctaattagggttttgctaatccatttttttaattctagggtattacaagtggtgttgtaattgtccaaaccatgaccatgtttgggaggacaactacaaaaatttggagtaaagttttgacacttacactcaaggaccaaatgatgagaaatttggagatttttaagagttcaagatagaagaagagcctcatcaaattgctcaaccaagttcacttgaggtgttgatgatggagttcgtggcaaaaatgattccttaattcaaagccaagcctcatccttgaggaaatcggagaatcaaattgagcttttggtcaatgagttgtgtgataaaccccatgaaactttaggcattgatatggaaaattcaaaggaggaagaagaaaatgaaaatatcattttgagcagtggtgatgagttggagatgcttggggaaagttttgagaaattacaagagcccacttcaatccaaagtaatgaagaaaaggatgaggaagcaagcatttcaagtttgtcaaatgttgtctctgctcataatgctataacatttttgcaacaaaactgtccagtttttgaaaaaattcagcaagagcatatttgcattcctcaagtcaagagatcacggtcatggaagattatgtttatgaagatccttttttgccaccacctcatcctccaccattggcatggtaccttggcatccatcatgtgcattcatcgaaatcaagtcaagttgacaatttagcctattcaattccatatctcgccaagcttgagggtgtccatgacaaagacccatttgtgagggcatatgccactctctatgggcggaagccactctttgatgagtgcttctcaaaaagtcaagccgacgactttaaatcaagcgcttcttgggaggtaaccaaagctttctaaactttgtttttattttattttaaattcaataaaatgcaatgttaaatggttttgacaattgcattgtagttttttttctctctttcttttctttttctctcttgtaggtgcaagcataaagtcaaaggtaattgggcgcacttatggaggttaacactagcaagttttttttttttttttttttgaattaacactagcaagtttgtacatcattaactagggggagttcttctttaactcttctttatttatttttaaacttgctcaaatatatttgagaattttgtgcttaaacatgtttcgggaaactaaattttttctttttattttatttttcttgtttgaaaaaaaaatgagacgtatgtgctttggtttggtgatttttcacattnnaatacatgattgatagtgtgcatagcttgttgaataatgtgaatattttttgagattgtgattaattcttgtgttagtttcattttgattgagatatgtccaattttgagcacaagctctacggtaaatttaaaaagtgtgaattttggctatcccaagtgtcatttctcgaacacattgtcagttaggatgggatcatggttaatttgggaaagtttgaattcatcagagattggccaaggctaaagacagtcactgaagtaaggagttttctgggtttagctggttattatcgtcagtttgttgaggggttttctaagatctcaatgcccttaataaaactaactaaaaagaatcaacaatttatatggacatacacgcgtgaagcaagttttcaagatttgaagcatcgatttattacaactccggtattagcattaccatcagattaagagaagttcatgatttactgtgatgcatctagacaaggtttgaggtgtgttttgatgcaagctgatagggttattgcttatgtctcccgtaaattaaaggagtatgaatagcgatacgcaactcatgatctagaggttgctgcaatggtttttgctttgaagatctgacgacactatctctacagggaaaaatgtgagatttacactgatcacaagagcctcaagtatttcttttctcagaaagatttgaatatgagatagaggcagtggttggagctagtcaaggattatattgtgaattaatcctttatcatcccgagaaggctaatgtagtggcagataccctaagtaggaagggtctcgagcaagtatctaacatggttatgatttcaccccagctagcagatgacatgattagatcaggtattgagtttgttgtgggcaaacttaataatttgacgctataattagaattgttagacagaattatagctgcccagctagctgattcagagttagtaaagatctgagaagaggttttatgtaataccctagaattaagaaaatggattagcaaaactctaactagttaattgagtattattgtggaattatatta

SEQ ID NO: 144711 - DNA, 544 bp, Cannabis sativa
  modified_base (183)..(184): a, c, t, g, unknown or other
ccatcttttattatcttataaagtgagatgttcaccaccaaattgaaaaagaattcaaaactattctttattcacaaaatagatgataataatttttacatcaataataataaagaataatattattatattactatctattattataatactatataactcatatattaatataatatgtannttactaatcaatatctcatatgtaacatacacataatattaatattaaattcataaatacatatattatatatctcatataatatacatattgcaagagtatggtaggacttagcataagttccttattggtagggaagcttttttgaccattgattttagatcatatggttattataaggtgtatactcttacgataagactgcttgtatacgataaaaactttattcatattataataatatttaagaatatatttattttcaaaaataaataatattaatatattaaaaaaaattatttatttttcatttaaattattattttttttaaaagttaatttaatcatgttgttcaatct

SEQ ID NO: 144712 - DNA, 1015 bp, Cannabis sativa
  modified_base (172)..(184): a, c, t, g, unknown or other
  modified_base (949)..(953): a, c, t, g, unknown or other
aatggcgcaaatgactatattcctaatattctatccccaaatgatataaatcctcgatcttagaatctcctacttgtaaatgcttgctaaaggcacttaaacttagagttagattagtagtggtggtgcaagaaagaataattacttaagaaatatttggtataaatttaannnnnnnnnnnnnaattttagattccaaataaaaaattttaatttcagttttcggaatacattgatcaatacagtatgactttcacaagttttaatatctaattctgtcaatggatccaaactgtatgttaatgtataaattatgagttttgtattctatgaccagaacccacttggactattctaaaaactctttgttgtaactaaacctaagtcatcaaaagaacacaaccacagtttaatatatatctatggtatttgcatcttgttcatagtaattttgacaagatcattctctacaaagagtaaccatgcctatatccacttgaaagtaggatcatcaatattcgaacatatggatgtacattcagtgatggatatgagttatcgttaaattctttagacaatcactctagttttaccttacgcaaagaaatttgaaatgtttgagaaatatcatttctagcaatggtgaaaaatcattaaggtgagtggttaaagatcttgtgaactgataggggtgaagaaatatttggtagatatgcagttcaaagattattaagttgaattttaaattgtatccaaacttacctccctagaacttcagattgcatattgatgaaagtaaaaggtctatgattagttactagcaattacctaagtccttctagggaaataccctagtgataggaaaattttagaatgatggaatggttatgtacttagtgtataccatttctagattcagagatgttttgatcgtgaacttaagaaaagnnnnnactgttaactaaggtttgcatgttcgatagctattctaaagtgattaagggtggaccatcct

SEQ ID NO: 144713 - DNA, 1001 bp, Cannabis sativa
ggcaggggcatctgcccgaacaagtacagatggagcgtcgtcatccgaagagtcttcctgctcctccaggacgacttttccatttccctctacaagggtagatggctgagtaggcaggccaggctccctgatccggatagtatgttctatcagcctctgctccgttgggagggtattcttcttcttgggtggcctctcatgctttgaatattcttgagcctcctcctgctcagaatattcatgagcatattgcttggctccagcatcacctttcaacttggcctcacgcttaagttgaatgagctccttctcttgatcagctccctcagcccagacagacctggattccttttcctccccttcataggctggggtataaagttttccagataaagcttgtacttcacaaagttgttctatgaggtcaacaaagtgatattccgatcagcatccggcagctggagaattttctggaccctttccctaagtgttagtgtgaagggtggattgcaatacacagagatctgttgaaactgagtataggtggtctccatgccttccacgaagtgatacttgtcaacaaaacccccaatcttgctaaccatggtgtccacggtgctcgtcagccacttgtagtctggctgagagaaatagaagtaccctgacctgctctgcttaggggtagacttcaaatcaaaaaaccagttgatgtcatgtggggacggcacaccccatccttgagtggcgtagaggacgaacaacgcggataagtacttgatgcccttgggtgtgaactgggtgtgaactcggtcggataatccgcaaccctcttgaagtacgagtccaaaggcagcattgctccatgcatagtgtgggcaccctaccaggcatagtaccctttctttgggttagttgctcagtgatttggagaggggagataacactcaagtccgcccaagtacccagccttatccaaatccctcaaacgaccctcggttatg

SEQ ID NO: 144714 - DNA, 500 bp, Cannabis sativa
aaatgatggcagataatattagggtcgatccctatcatatcactgtggctccaggcgaattgatcctagttcaccttcaaataacttattagcttctatttgagctgcttgtccaggttcttccccatgtatacacaccttgtgggatttcttgggtatagaataatttcttccaattgctcgattggtttcaataggtttctctcatcttgaactagagggtcaagatcttcgtttttcttctcattctcttatgccaatatcgccatcaattgatgtctgactttcctatgttgtagctcaatgcgatagcaatcgcgagccagcatctagtcgccacgcacaactcccacaccttcccatgtttggaatttcaaggataggtgcttgatcgaactgactgcccctagtccaatcagtgcaggacgaccaaacaatatgttataagccgatggaatgtcgacaactaagaagtcttgcataatagtggcagatagggg

SEQ ID NO: 144715 - DNA, 625 bp, Cannabis sativa
  modified_base (30)..(45): a, c, t, g, unknown or other
  modified_base (87)..(103): a, c, t, g, unknown or other
  modified_base (236)..(237): a, c, t, g, unknown or other
tagagaattcatattaggatgttaaataannnnnnnnnnnnnnnntctagattctggtaaaataatttcaacaactggcctcagagnnnnnnnnnnnnnnnnntttcatgaaatatgaattaaaagatatttgtgttgattatgttggtttatgtgtttatatgatgaatgtatgtgatttacaaattttttccatgaaaatatttttttttctttctgaaaatattttatttggnntccttgtgaaaaattaagcaacttcggtttttacggaacttgattcagataaaaattgaaggagttatgaatttttgaaattggtgtcgagtatggtgctcaatcgcaccaggaactcggacaagccgaggtgatacgcgcgcgcatacttgggggaatcgtgtctaaagacccggctatgcacgcgttcagacacccaggaggctacgcatctgcccagccagaccctgcatcccgtcgagttttgccgcacatcacccatgctctcacccattccgcgcgcggatgaggttgcatgcaggggtgtttttcaccaaaaatccgattttcatgggatttttttccaaatttcggatttttcaattttcaaacccaaaattaaaataaa

SEQ ID NO: 144716 - DNA, 627 bp, Cannabis sativa
ttgctctcacacgtctatttatgtttacgtggcgtagacctacgtgttgctctcacacatctaaatacaataaggccttagagtggctcatctcagttatggttactgagtcaaacctgattatgccttgaacgcataacccttaaatctcaatataatcatacacttagcatggcatagcatttactcagcttatatcactagggtaataaccctaggctattaaccgctcatattagtgtggtaaccctaatcccggttacaattactcacatttatcatattcaacataagcgccatcgcacatactctacgtgcaaactactattttacctgttgtccagcaatagcagagattctgaatccccgggtgctcctgacaaggtgctgataatcctagtcacacaattcgagattttcacaaatagggttaacccctgattccatactcataaaacatattcatggtattgaaaactcagataatcacatagagctcggagcgagctttccaacgatatatagaactcccaaatcggagttcggatcacgtagatatgcattttcaaagtttacactcaaacttcccaaaaattcgagggcgggccgcggcatgcaaaagccatg

SEQ ID NO: 144717 - DNA, 1095 bp, Cannabis sativa
  modified_base (27)..(31): a, c, t, g, unknown or other
aaaatagattacattgaaatggagttnnnnntagggcataaaacctaacagacatctgatgtcaacctagacgatgtaaaagtgtagaaacgttcaagggaagtcctttgagatgcccaagtgatggtttgacactccttagtccttttatatgttttgaagctggtcacacattctcgaagatgttactgttttgtagaaacggaagacttgaaactttcgggttctaaatgagcaaaaattgaagttgtgaatttggttggtctgactttatggatcattgcacttgtgaaaaacttgatgaacggtcaaaacaacatcagatttaaataagcaaaacccaacgaaccaaaccaaatgttgacctgggcgttgaggcctttaaatcgagcttttgggattctgttttcgatacttttaagacttccaaggcttctgaacatgagtacagggtctcttcccttgtttttaaccatgcgggattcaatggttgcatcgaatttgacatttgagcaattgaaggtagcgtcctaggttgtcaacttgggtgctaggcccaacactaggtcaacttaggcactgggccctgtttccagggactcgagtttgtggttttatccccgggtttacttgaatcttcattattttttataatagcgaagatgcatggagcacttttttctgaactaaattggaaacaacccatgtcaacctgggcgtagggtccaaccccaagtgttaacctagtcgttggatccctcttctgccccttcaaaatttttgtttggtccctagaaagaggtgattctcaatatattctaaaacagagatgatgcttgaaataattatgagaaaactccattttttatggcccagcttgacaaattgtcaacctgagcgtagggccaaccccaagtgtcaacctgggtgctgactcctattttttctgcccaggatttgttgcttttcctctggaaggacctatttccccattttttatgaagatggattcaatgcaaaagttagatcttcaattggatgcttggaaggcactgttgggttttatgccctaaataaaactcaagatcggaagag

SEQ ID NO: 144718 - DNA, 743 bp, Cannabis sativa
aataattctcaataaatattatgaaaattaattgatttaagttggtctaaaattaatttaaattaattttcaactcaaattaaattttctaataaatatatgtcgcaaaatttgaaattaagtgtatttaacatttaatacatttaaaatctatataaataaaataaattctgaaaaattattctaatttatgctggtccaaaattaataaaaaattaattttcaacaaaaatataattttcccttttaattaaaatctaagaaaaatatcaaatatttacgtatcttgaataaaattaacttaaataataattttctatttaattaaatataactaaaaaaaatacaacaagtatacagaaaataactatctacgtattcattaatgaaaaatttacttgattgaagttagtctaaaattaatttcaacttgaatctatttttcaaaatttcaaaatatcagcatttaaataaataaatgcaattcaaaattaggtgggcaatgattaatataataaaataaaatatattttgaaaaattattcagattcatgttgttctgaaattaaaatttcaacttaaatataattttctatctaatgcaattttttgaagataactaatatttaattgtttagaataaaatcaacttaaatagttttctatttaaataaatgtattaaataaaagaaataaataattaattatcttgaataaactaaacttaattattaattttaatt

SEQ ID NO: 144719 - DNA, 662 bp, Cannabis sativa
cacatatctcttttgggcgttatttctctcccctgcaatatgcggccctcccgaaataatcaggatgtcctctctttcaacaggaagaggttgtaacccctggttgtttgggttgttaggcagactatcttggttgtgtccattgccttgtcttttcacatactgtttgaagtggcctcgagcgatgagactttctatctcatcttttaactggcggcattcttcggtcgtgtgcccaatatccttatggtatttacagtacctgttaggatctcttttgttccttgcatgcctcatgggctcaggcttgccgaaggtaaccttttgctcatgtacgaggtaaatattctcccaagtttcattaagctcggtataaatagtatacattggcacgtacttattgtgcttcttctgtttcgttttatcttttgacagttcctcagaactgtcctttctcttcgaactagaagcccccgagttatcaactctcgttgacacagtacttgtcgaaacatttttgggtttacctcctgagcctgttttcaacaaattcatttcttttcaggtttctcttttcgaacgaacacctgagccctttcgttgaactcagtgatgtttctcactggacgaccctataagtcgtcccacagctcgcccccagc

SEQ ID NO: 144720 - DNA, 773 bp, Cannabis sativa
atttttagtaaaattttaacacttttacattaaaatgtatatatatatttatatttttatattgttttttaaaaataatacgaaaataacataaagtaacagaacaataatatataaataacaaaaaataaaaacaacaaaacaacaataaaataataagaatacaacataaaaataatatgaaaacattaaatactaaattttctaaataaaattttaaaaaccgtaaaaatatttaaaattacgtgcaaccatattttaataatttttttgtttttatttgtttatgaaataatctctaaaaatatactatataaaatttttaggccttgagtttgggtgagtcataatcacggacctaacccaccttaactcaagattgggtcttactacaaaaagttttacttttagtcacaataaaatttatgattaaaaataaaaaaattgtgactaattaattatcattcctatgttgtgactaaaagtatcagtcataaaaattacaatttattgtgactaaatgtatttattgtgactaaaactaaattagtaacaacatgtagctgaatactatattttagttacaagtaagtttttattaaaaaaattatattgtgataaacacgttatcactaaaagtagtaattttttgtagtgcctaatgtcacgggctcaccttttcaggcagcggaatacccgtgcggcaccttgacttctctaagccaaggtcagccttccaaccatccgagtaacaatgggctcatttttcgcgc

SEQ ID NO: 144721 - DNA, 524 bp, Cannabis sativa
  modified_base (67)..(73): a, c, t, g, unknown or other
taaaaatccgtaccatggataacccaagggtcatcccaaatacttgtctctctcccatcggatattnnnnnnnacgccccttttcttaaaatctctttatatcgcaccacatttctccaaaatcaagaatcagagctcttaacctcacaatcaaaaaactgtttacccttaaggtacttagatttgagaactttacagtacagcgactgttcctcagtaagcagagcccaaccccacttggccagcaatgcctggtttatctccacagcctttctaaagccaagccccccacgggacttgggaaggcacaactgatcccaggctttaagacagattcctctattaccttgttcacagccccaccaaaagtccctcaccataaatcctagatgcaagctttttagaaagttttgtcatctgcatcgtgtagacaggcaaagcaagccccactgatttgatcaacgtagcacgaccagcctttgataacgattttaatttccacccacggagttttgacaccaagt

SEQ ID NO: 144722 - DNA, 965 bp, Cannabis sativa
gttttgaagaaacaaatgaggtcggtactagttttgtagcacgcggctgtgatggtcgaatcattgaggccttttcaactatttcttctgtcagctgccgacccgaagttgtagaaattttaagtgtcaaagaggcacttagttggataaaaaggaataacaagtcaaatgtcatttagaaacggattgcattttagttgttcaagctattcttagttcggtatctatgccatctatttttggtctttttgttcaagattgtcaatttattttatcttctttaagtaatgtttctattggtcatgttaaacagtctactaacaaagtcgcgcactgtatggcacgtggtcaggtcgtcgttttactgagagcgatgttccccttgctctttaatccattgtattagcggatgtttctgtctaataaagattattttctttcaaaaaaaaataattttttaaatatttaatttattgatagtcattaataatatttgccttttagattaatttgcatcttaaaatattattgtgtattgaaggacaattacaaatgtttttctaaatataagattttttttgtttttgtcaaatttagcataatatttatattttaggagatggtctaagtcctatccatacgataataaccaatcaaaattaaacaaacacatgtaattcaaaaatataataaaagaaaattaaatcaagcaaaattagtggtccaaataagttttcttgatgagaatgatgagtaatatatagtcttacaaatcaataatgctttcaaccacttattttcaatacaataacaagtcaagcagcctaaattattacgtagttgagaaaattcttcctaactacttaatacttataaattaggggtaagtttaaaaataccatttttattaatcaattaatcaaatttacatttaattttatatttaattgaaacatacctctttt

SEQ ID NO: 144723 - DNA, 602 bp, Cannabis sativa
gatttcaggaagctgtttcggattgccaccttattgatttggagcttcgaggataccaatatacgtgggaacgcagccgaggcactagcagagcagtggagattcgtcttgatagagccatggttactcaacaatggctggatatgtttaatgaggtatctctcactaacttggctttttcttcttctgatcattcccctattttcctagaacccgaaactataaccagtgggaattcagtgggtttatttcgttatgaaaattcctggaatagagagcctctttgtgctcaaattgttgctgatatatggcagtctagtcctcaactgcagctcacgggtaagctcgagctgtgtttaaatcagttggctaattgggggcgatccattactggtaacttcaagtcacgtctttctaagagtaagaagttacttgctaaactgaaaaactcttcctctgctactggtgtggaaagttatgtgcttgaaaaaaccaactattttgagattcttgctcaacaagaagtgtactggaagcagagatcaaagcaatattggcttcattcgggtgataaaaataataaatattttcatgccactgct

SEQ ID NO: 144724 - DNA, 537 bp, Cannabis sativa
tctcaatcttcaacttcgaagtcacccctcaaactcgtgctcctcaaaatgataagtgttggtagtatttatagatcagggataaggatcccaaatttggtggctgcaataactaagttgttaagtcagttatgactgaacaaactgaacaaactccttgtaaccatatctccatgtcagcttaagataaagctcttccggatgagaaccaaacttctggacaatcgacaaaagtgggtgttgaagggacttcccatataggaatagtgacaattagagtcgattatccagaactcccttccagaagggaacaactagtcatccagaactctttttcggatggacaagttagacttcaaggaacgcccttttggatgacatttaactttttgtaaatgaataacctttgaagacctatttatttagaggagctataccacaaattccacctagtttcttcaaattaaaatatgatggtgatgaagaaagaatgcagccatcatggttggtgttccatatatctcagtatactaactt

SEQ ID NO: 144725 - DNA, 586 bp, Cannabis sativa
atatattttattacatatattttattgagatgtaattattcttatatagatgtatattttgttaacaagggacttagaaaatgtataactaattacaatttagatgttattcttttttataattaacccaaattgggacttaatttttttttataataaattagaaattattcttaaataaaagttctactgtataaagaatcatgcttaacttactattagaatgcccaataccgacccactgggcctttccttttactgtatatatatacaatttacattgtaattaaaccctacacaccacatttctcacagccataatttcggctgcctataatggaaataagagaagtatttcctctctaaaatggcatcagctgctataaccttctacctcacaaaaccctaaccttatttcttctgtatggctccaagaactagaaattccaccattgccactgcctccatgagagaagctccttcccttccactaccatctcagaccgtcaaccatggccaagttccatcctcgacagctgccaccaactctgacgttgctccgcccgtcacttctcctcttgaaaac

SEQ ID NO: 144726 - DNA, 956 bp, Cannabis sativa
ccatgatgaatcattctccgagtctcctattctgaatgccaatatgaatatgtggttattagcatccattgttgatgctgtaaacaacgtccccccttatgttgttttcaagaatgtgccatctaccacaataaccggtctacaatgaatctatcctctaattgagtttggcagtgataggaacatgtacttgaaccggttcttcttgtctgttatcaattcggttactgtgcctagatttgctttttttagcatatgaaggtacattgggagttgctggtatgagtcttctggctttcctcttgaaaattctagagctttttctgttgttctccaagccttttgatatcccatcgagaccccaaactcatgtagcaagtccttcatgatgttattcggtgcatgcttcctgtttattgaatcgtacttcttctttactatttgagcaatagtattgtatgttgcttgcctgtgatcttccattgtgacatccaatgagcaagtgtggttgttgacatattttctaatcttgaacgtttgtgtttatttcaactttgaagcacgcagaaaccagttacaatttcgtcaacacatgtaaccttgtattccctcggttcagacctcttcgttctgatttgaaagttctttatcattgcatagaatccgattgtcgttttcagtgtgttcttgtcactgtatatttgtccttcttcgatctcaagcaccaagtaatctgtgattatctccatttcctcatcccttctcttttttgttgcttcatttgattgctctattataaaatctgcaacttgttcagccatggcaaacatgttgggggaaattgttaactgtaatcatgatttgaatcttgtccttcaatattagactgttggttgaatggttcgtcgtgtatttgtagaaccagttcctccactgtcttggtttgctcttgtatt

SEQ ID NO: 144727 - DNA, 620 bp, Cannabis sativa
ccttgatctctgcacatactctattctcctcatcatcagatcccatttcctaaagccgaggctcactggagagaggctcacacaatgatcttctggcacaggttagggccttgggtttgctggattctctgatagaaaccacgctaacttcctccccagatttacctaaaaccatgccaatcttcctttggaattcttcatcagcttgaggaggatctttgagatcgctcacaagacttataccctctgggagcacttgtgtggatcggccatggcaggtcacggggttccactggtttggattggtcgaaagctcctcagccctggaatccatcaattccggctccagttgaagtctgtaggaacgaatggaaatgggttggtgcatgtaggtattatgagtctgggaggataaacttctgaacttagaagagacatcttggcagaaagaaagtaatccattctaaaaatggatttcactaaagaaccagaaggtttgtaaaaatgacaagtatgagtcgcccttttacacacgaagtgcagtgacaagaaagccaaagattgagaaatctaacggctcggaatcgtgcagaatatgaataggcaattcataatgatct

SEQ ID NO: 144728 - DNA, 638 bp, Cannabis sativa
tattctttttgggcggctagttcgatctcgtgagtagccgctttttgccttaggaccagtaactcgatataactatcgtcgtcgtaagcatcgtacccctcaaggttttctttgtattcctcatcgtttgattcgtctcgttttttagagcccacatttactcgtgaggtcgcctcttcgtcctctggttttgaggatcctggggggacgaggttggcgcgtgtggtttcgagtttccaccattgcagcctagatctttgattgtcatttttcaaacaatgcttcctacagctctcaatgaaagcactaaaatgttgaccgaggttttcggcaaccaatttttattacatagataatatattggaacatcacttttgtattttagatttaaaattaatgcattttttattttattttattttaatctaacgaatatggattatggttttataagtttataacttatatgcttaatttaatatataaaaaaaaccacataaaatttgatttcttttttaaaaaaaattaatgagttgatcgcgtcaacccagccaacccgatcaaaccaaacctgtaaacccgcgaacccgaaccatttcacaggtcgggtccgagtacaatttttttaacctgaaacc

SEQ ID NO: 144729 - DNA, 669 bp, Cannabis sativa
cttattagatttctgatggtttctcagggccttttttcttatgaagtttttttcatcccctttttagtataacttgtctctatttataatttcatagtcaggcagttaattacagagttgactgtaatctttacaataattatcccctaaaattatggggtttggttacatatcacgtagaataaatgcggttaatatttgaatatcgcacagctgtgattaatctgcttttactgggccaaaatgatcgtgtattaaacacgttttaaatcataatgttttgggatgtctcgacaggaactcagtaccaatgaccttgatagcgagctggagctttttcccctatcttttcgaggttgatgatgtacgcctcgttgcctctttgcttgaaggcataatgcttcattttgacaatcagagttcttaataacaaagagtacttcagtagtcatcattcgaatgtcagcttctgttagagagaaatgattcgccagactaataatctcactaaaagatgtctgaagctgattggtgaaagtatcaagagcatgccttcctatagcgagacaagcgcctcactattaggtgggtggattcgcccgactgttatacttagtttgtatattatacgctaagtgttttcccagtcattatgcatcgcttacgtct

SEQ ID NO: 144730 - DNA, 540 bp, Cannabis sativa
ttcagccatcttatcttcttcttatggccaataactgggagtgtaattcgtcagttcctaaatagtttgagcttgaaaataaggtcttagtttcttggagactaccattgtagtattttgataagcctaatggtaaataattaggatttatatatattatgggctaataaggtaataagtggaattatgatcctactaatctacttcagcataaattttaattttgttataagtggataaataagcataatttattaattatggagatttatatagcgcgtgtgaatataatataagttattagtggaataaaaatattttaggtttgacgatcttggagactcgattggggccaaaaatatcataataggtttaattagtgactttgataggaatattatgataagttgatagtgtaagtattgggataagtagaagtatttgggatttgacctagtgtcctagaagtaaaaaattcttagtgattaagaaatggtgaaataacttttatcaataaagtttttatttattatataatat

SEQ ID NO: 144731 - DNA, 598 bp, Cannabis sativa
atcgacctataaatatccctaaagacataggaggtgggggatcggatccaagctttgacttcttctcctttaatccattcgaagggatattttacataaattattatattatgttatatagaatttaatacttaattatattaatataatgatatgacactttatctttaaaaaaaaaattacatttctcttttattaggtggcattttcgtatttctcccatttaccattaattgagttatgaacgttgcaagtacttaagttatctttgacataacaagaatttaatttgctttggagttacaaaacctcattatataatatttaatattaattattgtataagttagatttacgaggagtcttaattacaacttcttattataactttttagtcaattttacgtctgaaatcacatgttgattttttttcaatttttttccatagcgatattcgttatagtcaagtatcatccctataaatttttgaaaaaatttgaatagtttacataccaaaaataaagtttatgatatttcagtttactatgcgtgtttaaaaaacttcaaacgtatttttcggtattgtaaactattcaaa

SEQ ID NO: 144732 - DNA, 682 bp, Cannabis sativa
  modified_base (478)..(489): a, c, t, g, unknown or other
gctgaacctctataaaatccatgtgtcttattattgctttatcatatatctgttattatatatcatttatcgcttataaaatagactcattgtcgttggctataagcgaagtcaacagatagaattagagatatgtcttctgtttattcagatgcacttaatatgcaataaagaattcagtttccctaaaggagtaatgtatataaaaatgatgttccataatattttatgaacacaaaggaagtaatggtggagaaagtagttgcttaccacagccttacagttcctgtaatttgggtttagtcgtatacactacacttgatcttaatatcaagataatggattgattgaaatacacttcttgttttatattagtgcaagtgggagtttgttaggatttcatgccctaaataaaactcattttcaatataatttgatttgttatcaatagagaattagaagtcatttatgtttacannnnnnnnnnnngtttatggtttaatatatataatttctgttaaatctacaacatatagttttcacaattacagtgagtcaacacagtggaaggtaattgtgattatatgcttcaaaagataatgtcccatgattcatcagtgcagtggatttacactgacgtgatagtcagcaataaagattacttataccttggataagtgtt

SEQ ID NO: 144733 - DNA, 858 bp, Cannabis sativa
  modified_base (787)..(791): a, c, t, g, unknown or other
gttagtaggtggaatacatcaagcttgcggcatataataagagggagtctattaatgcacaagtcaattactttatattattaagaccgatctaatgaatcttatctctaggcgtggccccgtggactagtaacaatttgaaaggattgttgaaatcacatacaaaaaccttgtgtgtttttacttttctggactgtttgtttctctggtttcttttggacttacatagttattttttgtaactacagaaaaactgtttacagcaccagttctattattccacatttaattaaataattaaactgggaatattaaaatacaaaatttcaattggtatcagagcgggtcactaaattcttattgagatcttaagattattccgtttaatttattttgtgtgagatatatttgtttgcagaaggaagctctatctctcgaccacatctgttgaatgagtcgaattatccttattggaaggtcaggatgagagcattcaccaaatcacaagatgagaaagcatgtagagctatacttacaggctggtcacaacctactgaaagtgatgatgaaggtaatactaaggtaaaaccagaactcaattggactattaaagatgaaaaattgtctggttataataataaagctttacatgctatttttcaatggtgttggtgaaggttttcttaaattaatttcttcttgtgaatctgcaaaggaagcgtgggaaatctttcaaactcagtttgaaagtgccgctgatgtgaaaagatcacgttttaccatgttnnnnnctagatttgatgaattgagaatgtaaaaaactgaaactttgtttgatttttatgaaagattatttga

SEQ ID NO: 144734 - DNA, 902 bp, Cannabis sativa
  modified_base (267)..(269): a, c, t, g, unknown or other
aaattttctcgagttatggcaaaaaatttcatgaagcttagaataagcaagatgaaagacatgcattatgcagttcagaaagcaaacattatggaaggtgaaatcgcatgaaaccatgacaaagaagaatcgcagagtttctgaacctgcagtgcattcaaaaagtaaacatgcaaagcaaacataaaggaaatcgagaacttactcaagaatcagatgtctggattcagaccaagccaaatgagcagttttgatgaaggcacttcnnnaaacttgaagccaaaaacctctcttttcactctgaacttacttagcaaagaaggatggtgaaaatgagtttgggcacaaatgctcactggtatttataggcaaacaacaaaaaggggtaatcattttaaaggaacctcaaacgcctcggttctcccttaaaagcaaatttgggaaataaaaataatcaagtgtagccgtcaaccgtggtgagagaaaattggattttgaaatataaattgtcagagcggttaacagcccagtcagactcgcatcgagtcgcgaacagacgagcttgacacgtgtcacccatccaaatgcagaagcggcccagatgaagtctacacgcaacttcggaagtcccgtaagacttgggggcaaatgttatcccaatttgtgcactctaacgtggcatcacatgatggtgacatgtggactcaactccgagtatctgctcggagaatatagtccgagcaggatgcttcatatgcatgctcgaagcaaactgatcagcgatccgcgcagggcgaccaacacttagcgaattcagcctttgcatcgggagtcatcaacgaaatccctatcacttggggatcagattgcagagatatggaaagttgtccaaatcccacgat

SEQ ID NO: 144735 - DNA, 707 bp, Cannabis sativa
gaggaaagttgtaggtttcattgacaacttaattacaaaatagctcctcctagaatcataaatgcttataagtggattttatcatccatgtagcctaaccaatcgatatcaataaaaccaacttttatatgtcacagtattggtttttcgattgttaacaaatccttggtaccataagaatgatagctcaagtaccaatccagcatgcctgcaacatatatcccaataggaatgcatgtacttgagcgaaccctaggctgccttcaataggcatatatatgcatgggacaattctaatactaatctctcgttattactaatatacatggactttaggcctttcataacaaatcatactttatactatttataaattctcaatgaaatcaaaacattaatcacaacaatagttagtcaatgcaaactatgagacaatttagtttaatgttgatcttatcacgaagaatctaaaataattagaccatataaagttcatcaaggattcttcctctttcagagattatcaaataacagttcaatcgtctcctgaatagatcactatcataaaatataagcaatgtactatatcaagtaataatataagcatatcattactcccactgatctctcacatagtattgactaacgataatgctttgaattgaccattttgagaattacagtcatcactatcttgatgtccttcc

SEQ ID NO: 144736 - DNA, 1190 bp, Cannabis sativa
  modified_base (731)..(733): a, c, t, g, unknown or other
aaaatattaataaaatttagaaataatctagttaaagttttaaatttgctaacaatattagattttcaaaaaattttatttttaaaatatattttatgaaattaaattataagattagaaaaatgttagttttgatattttatcttattagatatttattttaattaaattttattttggtaaaataacatgaaattttgaaaagtttgtttattttggtttgaatagatattttagggtttctaaccataaaattttcaaacttaggatattttgttttatttaattattaaataaaattgataatatcctaaccattaaatatcttatttttcaaattttttatttttgttatatttaatttattaaattataagattagaaatataatgttagaaatatctaaattttaaattaaaatattatattatattattttattagatatttaagtaatttaaattatttaaataaactaaaaatttaaaaattagttggatatttgaatttaagttagaattttaaatatttaggagatttgttagtttttttaaatattctctaacaaattaaattttaaattctagttaaggtatattttaaatattttattttttaaatagagatatcttcacctactttccagatatttgttgcatgtttgtaatgtttgtttatttattcaattttttttaacaaacctatgatttatttgatctaaattgctatgnnnaacttgttgacagatccaatgacttgattttaatcatagtccaattgtcaatgaatcttataaataatttgtaacgggtaagttttgcaatttctttcatttgtgtaaacccaaaagcatgatagggcccatccaaattatttgacctctgtgagcctatatgtttgcttttgagcttagatgcatataagaagctcatttaagttttttattaattaaatagactaggttgctaaaataaaatatcacataagatagttttatttaggcccaattagtattgggcttattcattgaataacaattatttatttaatggttaaattcctctcctttaggcattgtgtgagagtaagggggtcattagtagtgggtacgacatactgaatccaaccctctctcacacgaactaccccaattgtgaagacccatctaccttatttaaatgattgtatta

SEQ ID NO: 144737 - DNA, 555 bp, Cannabis sativa
ctcccttcaacttagcttcgcgcttaagttgaatgagttcattctcttgatgagctcattcggtccggctagaacctgatttcctcttcttccctgccacagacttaggagtaaagtcctcgggatagagcctgtacctcacaaagttatcctcggaggtcaactggataatattctggtcttgccccggcaggcgggcaagttttcgagctctatccctaagagcaagagtgaggggagaacggtgatatgtcagaatctgctggaatcgagtccgagtaatgctcgttccatccaccatgaagtactcatcaataaaatgccctatcttgctgatggccttgtcgttcgtgccggtcaaccacttgaagcctggttgagagaagtaaaagtacccagacctgcctttcttggggtggacctcaaatcaaagaaccaggaaacttcgtgaggagagggagtaccccactcatgttaagcgtagaggatgaagagggcagataaatacttaatgcccttaggagtgaactggggcgggcagagaccgaagaagtc

SEQ ID NO: 144738 - DNA, 1230 bp, Cannabis sativa
  modified_base (381)..(385): a, c, t, g, unknown or other
tttttttttcacatatctagcaacaaaataaaacaaattatagttattttatgtcttcaagaacacattaaaacaaataagatagtaaataacaaatgaaagaaaaaaaattgtatgtataaagaaatatttaattttatattaaattgtatatagaaaaaaattatatataagaatagaatatacatttgatttattaaattttgaaatatacttgcattatatgtattatacttttaaattactatttttttacattaaaatattatttgtatataatttttttaattttttaaaaatataagtggattggattggatcggttatttttacacgcacaagtgcggattttgaattttctaatccaatccaatccgcacnnnnncggatatccgcattttgcggattggatttgatcgactattttatgaacacccctaataatattattacatatataaaataatcaaaaagtattccattttttatttagaaataattaacaactacttaatacatggatttctaaaattataaaataatcataaattaaattttatttttcaatgattataacaattggatgagacacaatatgtttataacaatctcgcgagtgctcaaccaacttcatacgatacttatcattttagttactacaaaacagtaaaacaaataaattatgaaaataattagtcatatgaatcatgatttcatttttatcattacaatttaaggtagaaatttcacatctacataatttattaaaattaatctccttattaaacatttcatatagaaaaattctatcactaatatttttttttatataaaaccctcacttttgagttttagaaaatatataatattgtgacagcctattttacagttgtcatcctacattcaattttgtggaaaaattattttgctaacaccacaaaacaaaatattaaaactttcataaatagtatgttaagaaaaaaatctaaataatattttaaaaataactacatcagttacaagtttagattattaaatttagagactgttatctttttttattattattttattataaaaacacatgtaatttctttattaattccactatttaatatttgttacaaatttgtcatctttttgtgtattataaaaataataaattatattaataatttcaatagtattactttatttataattgacacatcaaaatgttatattttagat

SEQ ID NO: 144739 - DNA, 594 bp, Cannabis sativa
  modified_base (29)..(30): a, c, t, g, unknown or other
aagaaatgtatttatagcctccatcttcnncacccacggacagaaccaccacaacaacacaagaacacctataaaataactattaattccagggaaatcggcatcaaataaataaaatgaaaacaacactaaaataaataaaaaaaaaaagaaaaaaatgattaaaaaattaactatcttgtgcacatcctcaatactaaatgcactatatttgtaacaaaattctggaaaattagaacaaaaaaaaacacactaactcttatattttccaaaaacgtaagtaagaatttcaaaaaaaaaaaaaaataagaaaagaaaagaagatgatgaagaagaagaagaactgaacaagaaaaaaaataaaaaatttatatgttgatggagaaaaatagagagaacttgaagaaatagagtgaaaaaaatgaagaagatgatgaatagtaagagagattaatggggaagtgagattaaagtgaaagaaatgagtattaaatatttaggataacaaatttttatcatcaattttaattaaaaaaaataaaaaaaaatatatatgtcactaaagtgacaacacaagtcacatcacacttttat

SEQ ID NO: 144740 - DNA, 1119 bp, Cannabis sativa
  modified_base (903)..(908): a, c, t, g, unknown or other
gggctccgggctgaacgatcgtcgtgacattttgatcgtctactcctctccttctgtttagatcattccttaggtcatgagtcgcccccaaccttttggatgcagaagcgcctggctgccttcgcgattgatttgcttggttgacgggtgggatggcaccattgatctggttggaaccatcaggtatgacctctccagatgaattactagacaatgtctacccgcctatcgcttagcccacaagcggaactggtgaccgaggattgggcggctgaccatttgcagtctgggaagtgttcatcgttggatcttcgtccatctcacctagtggaacgacattcggaggttgctgacctacagtttggtaggcttttcgtatcagcacggtagtttgtcgactactattttcaatctctgtatgatgagcccttaatacctccatctctctgtttctccactcagcaaacatatgcctttgttcttcgaactcgagatttacggcagcgcggagttcttcctaatcatgatgtagggtattgttatgaccctgcatgagtccaagagcgtcacggacattttgtaactcagtagcatctccaatggttgtttgaacgttggtgcggggcggaacgactgtgttatgaatgccctggttgggtgcagaactgttattcccagtctcttgcacaccaggtgcgatttcatctatagcagtcgttaaattgtgaccgacgtttgcccgctgtctaggattaatagctggaggaacccttttgtttcctgggttctgcgacgtaggatccaccgtctgtgaattggctggatccccttgacccctacgagtctgcaccaccattgtatttgttgaagagcgattcttgatccttctctcaatgaaagcannnnnntgttgacctcgcttttagccaatgacaatgagtcttatttagtaagcgataagtgatttatagaaatcgatatatagtaaaacaaatataaagacgcaagtattttatagaggtttagccccgagcagttcggtaatagcctaatccttgttatttgtattgactcaagaacaaggagaaagattcctttcactactacaaaaacaccctt

SEQ ID NO: 144741 - DNA, 944 bp, Cannabis sativa
  modified_base (27)..(28): a, c, t, g, unknown or other
attggtactacctatatcaacaaggtnnatcttgtttttcagtagcccatcaagagagaactccacagttaagcgtgcttgacgtgggataatttcagggtgtgtgacctcctcgaaagttttcctaggaagtgtgcgagtgaggacaaagcacgttgaaaacactcgtgttggtctgtaggttcagtcgtcattccgtgaagcagccagagtgacatactcatgtataagagccatcattctgtgggtgtaagggcccaatagaggtttgaagtgggggacgttacagtttctgttgtgtattattttgattagttattgtatagtctttttttggtaaaacttttataacaggatccccataacaaagttttagtgttgttataatgttcgttactaggattatgttttagtgaactttttaatattatcacatattttaataattaattaatttattattattaaactaatttataaaatcacacacgtgacgtttctacagaatatgacgttacagacttttgaagatctttctatttggaggaactataccatactgtgctttgaaaaatagcttattaaagaatttatgaagaatctacaactaaaagctaaagttggtataattcaacttttacaaaaaattattttgattaaaaagattataataattactaaaaaaatatatttacttatttattatttattataaaaaaaaaataaaacaaaacatattttaaataataagttataataaaataaataatatttttattattttttgtttcaaaaattttttatattttttatttttaaaattaacaaactaaattaacctaatttcttatatatttaagtttttttttttttttacatgttataagaataatttaaaaatactataaattatttttattaaattcatataaatttatatttga

SEQ ID NO: 144742 - DNA, 1413 bp, Cannabis sativa
  modified_base (38)..(40): a, c, t, g, unknown or other
attcctacttgctaagtgcttaataatttctgaatgtnnntgattttgtattaaaccttacttgatttttagttattgatatttgtagtaccaaatatgactatgaacaaccccatggtgtcactgttgactgacaacaagctctctggagctaactttgtcaaatggaaaaagaacattaatatttctctcataggtgaaaatgcccagtttgtgttgactaaagaggctcctgagcagccaggtgagaatgcaaccaaggcagtcgaggaaaagtttgagctttggcagaatgctaacaacaaagctcggtactttatgctgtttagcatggtcgacaccttagaaataaggtttgccaatactctcactgctgcaaatatcatgaaccaattgactaaactgttcgggatggcgtcaaatcaagctcgatttgaggcgaccaagaatttcatcaattcacggatgaaatcttatcaaaatgtgcgtgctcacctactctagatggcgagttatttcaaggaagctgagaatcatggagctattatagatcaggaaacttaagtgagtttgatcttaaatagctcaactccagctaatctgcccttcacctcaaactatgtcatgaacaagttgttacttccacgagttaatcagcaaccttccaaagtttgaaaatttgattggaggtccacagaataaaggaactaaagctcctagttcgtgcactactaattgtacggccaaggctaaggcaaacatttcctctactttgaaacctagcaaaaaagaagaagtggaagaatagcaagaagcctcttaaagctattaacacaaataagaataaaaaggctactgattcaaaggcaaagcaaaaagaaaaaagattttattgcaatgaaaagggccactagaaaccccagtgtcctaagtttttagcaaagaaacaaggtatttctattttgttataactcatgtgttttagagaattatgatccccttggattataaattctggatctactaaccatgtttgttttcttcttattacagctccagcttcttaaacttggattgctatcctagcgagttgactcagatcgttggacaggagggtgaagattgtccaattaaagatgaagctcgaaatcttctttaatttttgatttaatttttcagtttatgaacaatttagtttcaattatcagtttgggattttattccctctttcatattattgcagacaattcattatgacatttttgagataattaataaaattttctctataagagattttcattgtgaattgcttttatgaaattaagcttcgtatttacattaacttgtatgccaataccaattatatttatatgtttatcatgtttaatgtgtttgtgttttattattgat

SEQ ID NO: 144743 - DNA, 1332 bp, Cannabis sativa
  modified_base (695)..(702): a, c, t, g, unknown or other
gtgcatcacttttctattggacactttgagatataaactagttttcatgcactgacaatcattttaatcgaaatagtagtgaaaatcttaaattttttattgtggtacccttttgaaatgtgaccagaccccatctcaaaatatttttctcgactagtcacaatgaattcttactattaagacgtgaatatgaaaattggattcgcgttaaatttggttaaaatgaccccttaatttaaaaatttaaaatattcttctttttagggtgaattttaacaagttttttcgttactcttacacttgttagtgttatcttaaaatctcaccctacacatctcaaaaaatcaagaaattttacaaggatgaagccaagaccgttgtgcatcacttttctatgggacacgttgagagataatgtagttttcatgaactaacaatcattttaatcaaaatagtgaaaatctcacgttttttatagcggtaccccttttggaaatgtggcccagacccatctcggaatatttttgccactagtcacaatgaattcgcactactaagtcatgaatataaagattggattcgcattaaattttgttaaaatgtccccctaattaaaaaaattgaatatatccttcttttaaaagtttttctttactcttgcactcgttaggtttctcttaaaatctcaccctacnnnnnnnnaaaaatcatgaaatttcacaagcacaaagctaagaccatagtgcatcacttttctgttagttatattaagagaaagagtagttttcaggtagtaataatcattctaaatgaaatagttaaaattttacatttctaatagaggtacccctttgtgaaatgtggcccaaacttatctcgaaatattttttcccactagtcacaattaatttgtactactaacatgtgaatatgaagattggttaaaagataaattttgttaaaatgactcctatttcaaaaattgaaatattcttttgttgaggataaatttcaataagttttttccttcatcctacagtcgttagtgttctttcaaaatctcaccctagacatctgaaaaaattgtgaaatttcatagggacgaagccaagaccgttgtcaataacttttctattagtgtctgggtttggtgtttggggtttggggtttacaatttgaagttttggattcaatgtttgagggttttgggtttaggattcggggtttgtggtttgcggtttttgggtttgggggtttggggttaagttgttttacattaggtgtttggggtttgggtggggttttgagtttggggttttgggtttttaggtt

SEQ ID NO: 144744 - DNA, 835 bp, Cannabis sativa
tccatgttttgattctgtgagtcaccttgtcaactagcatacaacattcctttgaggagagtgtcttagggctaattgggattcccagataagtgaacggaactgcacctctctgaaaacccgatgcatcaattatacgttttacttcggaatctgccattccattgcagtaaatggttgacttgtttggattaggttgcaatcctgatgttttagagaacattttaagcccctgtagtagatagtaaatgcttttgtaatcacaattgcagaataggagaacatcatctgcaaaaatgaggtgattcagcttcaggtccttgcatctggtatgaaatctgaagtctggtttgtgtcctactttcttcattactctagtgaggtattccatgccaagaacaaaaattaatggagacactgggtcaccttgtctcagtcctctccttgcatcaaaatagccatgaagagatccattaatcataagtgaaaatttaggcgaggaaatgcataccataatcagtttaataaacgcatatggaaagttcaatccatgtagcatttcttcaatgaaatcccattctaccatgtcataagctttctgcaatccaacttgattatgcagctagcttttgtcagtttccttccataatgacaaacaagatcctgacaaaccattatattgtgggcaataaagcgtccttgtacaaatcccccttggttttgtgataccaagttaggcagaagacagttgagtcgtaagcataatagtttagtggctactttgtatattacattgcagcacgctatcagcctgtaatccttcactgtattgggg

SEQ ID NO: 144745 - DNA, 529 bp, Cannabis sativa
aagacctaggaaccagacacagatgggggacatagaccagggacccaggcctcgaaacccaaacctagatctaaatccgagattcgaacccgaaccaggacctggcttggacctaggaattcaaagtcagacccagacccagaacaaagacctgccctggacccaaatcatgacaagaacctggacacaaatccagactaggatcgaacccgaacctagacctgaacacaaaatcaaacccgaacccgggactcgaactcagacccaaacccaaaatgagacccaaacctagacatgcaccaagacctatactcgaacccagaccgggatcgaaacccaggacctagaccgggaactaaaccctgacttagattgagatcaaaacctgggactcggacccgaacttagacccaaacttaggaccccaacccacagccgtagcccgatccggacctgaacccaaactcggaccagcactcgaacgccgaaccgaactcgaaccgcgacccgaactctaacccaaactcga

SEQ ID NO: 144746 - DNA, 814 bp, Cannabis sativa
acctcttgagcttgttttcaacaagttcatttcctttcgggcttcttccttcggaacaaacacttgagccctctcattgaactcaatgatgtttcttaccgaacatccttgaaaatcatcccacaactcgccctcggcggttaatggatcagtggagatccccgcctgaagggctgtaagttgcgtgctgtcatccaagtttctaaccctagcgacagccgtgctaaaacggcttaagtacgccttaagtgtttcgttaggctgctgctttatattggttagcgaggccgctttgggtcgcctatccctagcggcttgaaattgcttcttgaaatccctagacagctgctcccaggaaattattgaatgacgagtgaacttgttaaaccagctactcactgctccgacaagcgaggtggggaacaaaatacagcgtaaattgttcatcacgttactctctcgcattatcgtgttaaagttattcaaatgcgagatcggatctgtagttccgtcataggacgagacatgcgagtttttgaatcccgaaggaaaatgggtattcataatatctgggtgatatggctcaagctcctcgtcagagtcgtatccagatgatttgcctaattctcccatttgatatctcctgaacttgtcctccagctcgtttatctgcaattggattgaatcctctttctttggaccaagctattggcgaatgtcagatttctttcgattcaagtgctctcgcagatctggttgggagtaattgctggcagatctcgtcttactcatagactgcgtcctactcatagac

SEQ ID NO: 144747 - DNA, 656 bp, Cannabis sativa
tagtcatcagtgtgatgtccagcgtgaacattgtgtatttcttgataatgtgtgaataacaaggttgggaaaggggtttcttgtatgttgtgtggtcttatgcttgtgtgcatttacttgataacgagtgtgtgttgttgagtgacgcttgccaaaactaaactgtgagtgtgtgtgcatactaacaggttgttgggttggctgactagattggggtgaatctaggccatcgcagggaaaatttgagtgtgaaaaattagccttgtgacaactggtaggtaaatcaattacttgcctccttaattcagcctatgcccgtggttgtaaacccgataagaagttgaacatcttgtcctcctcagacatgttctttatatcaagcaacaaagaactgtatctctttcacatactctctcgccaccgaaccagtgtgcttgagtttctttagagactcacaagcgatccatgtcgtgttgcatggaaggaactgatctttcaactccttcttcaacacatcccaagtctcaatattaggcctcctcgaagtgtatcttcttccatccgagtgcgccaccatcgtttggcatcaccctgaagatacatgcttgtgatggtcactctatccgcatctggaattcttgttgccttgaagtact

SEQ ID NO: 144748 - DNA, 652 bp, Cannabis sativa
  modified_base (619)..(627): a, c, t, g, unknown or other
aagtagtttaaataaaaaaaaaaggtttaatttctataaaaaaaaaacaacatctacagttgatatcattttatatttattttagtgttttatttaaaaaagaaaaagaaacacaaatttaaagttttttatgacattcttttttatataaaatgcctttttttttctacttttgtaagtttttttttttaaaaaaaataccatatttagtgtaattaaatttttatgccatatatatcaaatcttatcttttttttttctcatatttttgtaaatagcccttatttaaataaggtaaatgagccttcacaattgaggttgttcatgtgatggagggttgggttcagtatgtcgtacccactactattgactccctaactctcacacaaggcccaaaagagaggaatttaatatttcactaaataattgttattaattgaataagcctaatactaatagggcctaaatagaactatcgatggtgatattttatcataacaacctagtgggcttcctatatgcacataagtctaatagcaaacatataggccaacacaggcaaactgatttggataattaataaagatcagaaactacattttatgttgcatggttcacnnnnnnnnnttcatgattatgtttaatgtataaa

SEQ ID NO: 144749 - DNA, 746 bp, Cannabis sativa
atcgatctaatccaatgagaactgaccgatccaattacattcgaccaccgaacattagatatccaattgtgatcggatcagattggatgctatttttaaatatccaattggatcgaatcaaatgatagatggggcgtccgaaaatccaatacaaccaacattaccaagttggcttgaatttctttgaaaatcatatcactattaccaagttgattcctcgaggtttcctgaacattagttaacttttttaagaattagagtcttgcacaccaatttcacctttaccagcctgattcaagcctttgaaaccaacctagtccatttaaatatttagaaataaatgggcttcctatatgcatccaagcccaaaagcaaacatataggctcacacaggtcaaattgatttggatgggccctatcatgtttctaggtttacacagataaaagaaatacaaaatttacttgttacaaattatttataggatctattgacaattagactaatattaaaatcagatcattagatctgtcaacaagttaatcataaaaatttagatcaaataaataataggtttgttaaaaaataaattgaataagcaatttaaataaaacaaacataatatccatgtaacaaattgtgaagtaagatattaatttgttatataattaaattattatttaattaactaactaattttaaaaatttaaggttgttaaaacaacctcaaatatcttttcaaaattta

SEQ ID NO: 144750 - DNA, 1018 bp, Cannabis sativa
  modified_base (258)..(259): a, c, t, g, unknown or other
gctgctatgtatgacatgtggacgaaatagacacgtcacctggagacaggttaaaggtcgtatggaagaagcaataagtatggttcatgttgttagctcctcaacaagtgcaaaaggatcaccttctcctccaggagtcaagatataggaaggcacctccgggccagggggctctacttgaacagtcactttgcatttaatgcagcatggtgaaaacgtctcggaacgcccataagaggacatgtcagacattgtaannctgatttagggcgattacatgataatcaaaggggctagtgacggctccattatgaagaaccacatcaaccaaggaaggatgaaggctaatctcacctaacatctatgctgcctactacgtaggtaatgcatgccctattttgtatcttttggaaacttgtgcttatccatagttagctcccaaagacaagttccccttttttcgattattcccaccaatctctataaatacccctgagaaaatgaagaaggggatcaaaaaaaaaaaagagagaaaaaatacacaaagaacattctctgtaacaaatactctcattaatacagagactcgtggactacgtctcattaatgcacgaaccatgtaaaaattatttgcattaattaccccaaagctctcattattatcttatttaattgattgccgaaaatctcggtcaacattttggtactttcattgagagttgtgggaagcgttgttcgaaaaacgacaaaaaaaaaatctaagctacaatagtggaaactcggaaccacacacgccaaccttgtcccccccaggatcctcagaacccagagggtgaagaggaaacctcacgagtacatgtgggctttgaggaacaagatgagtcgaatgacgaggagtacaaagaaaatcccaaagggtatgatgcttatgatgacagtagctacactaagttactggtcctaaggcaaaaagagactgattacgaggccgaactagctgcccaaaaagaacaaaata

SEQ ID NO: 144751 - DNA, 617 bp, Cannabis sativa
gcactgccatacctattggaaatatacttgaggcaaccccatatggcctgaccacccatggaaaatcccatcacataaaatttggatccaagtcccaactgatcaacaagattttttacatctaaagccagactctttattgtgcggttaggatccgggtcactttctccatagcctggcctgtcaaatcccaccacataaatcttctattagtatatttaaatatgaactaattaagagagagaaaaccagagagagagcaaggaagagacggagatcggatttgaagtgtttttttatcataattctttttcttctccttctacttttactaaatattatgattttggcaatattggccttttctatttgcaatatatgtgatcatgaaacactgatttttgtcatggtgctgatcaaatatgctctggatttttggttcgttttggttttagaatgaatcaaggagattcggtgccaaatataactcaattttattcaaaggagaaatgtttctgaaagaggtaagataagattgatggagataagatgacgcggccatagagatagagaggtaaagcttatatatgatttctcttacatttatgtttatattt

SEQ ID NO: 144752 - DNA, 568 bp, Cannabis sativa
ggtcaattaaataataataaaacaaataaatatcagaccttaaatttaaaataagataaaataatcaaattttaaaaatgagatagttaattaagcaaagaaagatagattttatctgtttcaaattcaaataacactgatatcttaaattaatttttaaaaaatactaattaaatcgaagttaattccatgaaatacaaaactacacaaaaaatcagaagttaattccatgaaataggatgaaaaatcgaagaaaaacgaaaaaaattgcaagttgtacggatggtatgcaaagctttgcataccatcgaggcgcacaaacttgggggcaaggggctggtttcacgcacaaaaggtgctgccatcagcattccccacgcacaagggtgtgtcaccacccccgattttttcaaaatttcaaaaaatcataactaattaaaataatatcgaaattaagttctataacaaaatgaattacttaatttttcccaaactatccaacaaaaacaattccagaaacgaaaattctattatttttcataaaatttcacaagcatcaatcaaccat

SEQ ID NO: 144753 - DNA, 507 bp, Cannabis sativa
aaatgatttgcaaactatttgtttttcctttttggacaaagtgaaacaagcaggaggcaaatataatcgttcacctttcttctcaggtgcaaaatattgtcgtacacccatttcaacgagatctaaacaactatttagaccgtccttagtttttccaggaatatcaagtaaggtgcatgacatccaaacaacaagtaaacttttccaatatagaaaacgaaaaaagattgacattcttggacaaaaaccatttgttttttttttatttttttgcgtctttctataattaaaatctacaagttcaacttgttggagaatttgttcccctgacagttgcaaaggagccctatctccctcttcagtaccatcgaatgctttcttcttccgtctatcaggatgatttgtaggcaagtaccgtttgtaatgcatataacacatcttgtgtccatttgccaagcgacgagccgatgtgttagtgcaacaaatcggacaaccttcgtaaccttt

SEQ ID NO: 144754 - DNA, 778 bp, Cannabis sativa
agttgtgtacgtatacacgtgtaccgacaaaattaataaaaaacaaacggtatgctataattaaataaacagtctcaattatgatatttatttcaaaatttggtcactagcgtaaatttctcattaattaaagtcttctcaaaagccaaagcacaaatggctgaaatattccctcttgccacgtgttgataccctatgtatactgaacatcatctgtcggccccaccacctgcatgttgtcccatatgatttgaaacaacaacctacaaaagaataataattacactctagagcctcacctattgtattactttttcataaataatgtattatttttaattaaaatagctataagctgagtcataatgaaggacatgtgtatcaaagtcctattttctttttatataataaatttaaaaaattaaataatacacttttattatcactacttttgaaaagagagtcggcctcgggaagtatataagggagttgtagttgtatggtctcagaaggtatataaaagagttgttattgtataatttgcatgatacagagatgccttcttcaaatgcattatctgcaatgtatcagcagttacaaaataacactaatactataactaatggttcgtctagtgatagcaatgactcatttagcaactttgagaatcaacctcctgcatcccgagttcgaagtcgaagtcctgaagttcatagtcttccaaatggacaaagaagacgtttcgaagtacctataacttccccactgcctacagaca

SEQ ID NO: 144755 - DNA, 995 bp, Cannabis sativa
aaaaaaaaaaaaaagaaacacaaagtaataaatgtgataattcttcttaaaataaaatatgaacaatgaggtaggcacaaaaagaggaaagtgtaatctcttaccagtttttttgggataaaagtatggataattgtgggtgcttgtttggtatattttgcttatggtataatgtaacctaaatgacttctcatctatcctttttacctaagccacgatattgtaacgaaaaagacattttgattctgagcaagggttgttaacattagtggagagaggtatgtcattcaagcttattgaacataggttggcggagtgttgaaaagagtagaatggttgtgatatgagtgtcaaaagaggtgttttgtgtctatatgaatggattacttctaacttgtgcatccaagttaattcttagagcgattgagttgaaattctggttattcaattgcttgaagttgtgcaggtggtagtggtagttcaaccattggaaggttcagttatgtaatgcgttgttttagttttagttttagcttaactcgagggcgagtaaagattcagtttgggggaatttgttaggctacttttagcctatgttctggatcacaattatgttcgcttttcgttgttttaggacagaattacgcttgtttgctatgtttttcaagtttctcgaagctatggaagccccaggctacaaaagtgcaacaaaagacaagtagagccaagaaaaatgcaaagttatgctcggtgcactcttggccgcggcgagcctaaccatggccgcgaccataactcaagaacagagagacgagtttgtggcgagttagtagccgcggcgagagtttccaccgccgtggccacgtcatcactcgccgtggcggaggaagctatggccgcggtgagggcaatttcgtcttttgaaccctgaaaatgagaaataaaaagaaaactgcgattggaaatgaaaaaaagcgattttgagacctaaaacg

SEQ ID NO: 144756 - DNA, 709 bp, Cannabis sativa
tttttttgcctattttattaatttcatttaattttttgaagagttttttatctcctctttatcattctcagtagtagtgctcatccaatttattccacactatttttactcatagtgcatttgatctgtactaagtgcggatttcatattttggatctaatccaatctgtataataactaaaatcaaatccaatccaatttgcaaaagtacatattagatcagttattttaaattggttagttttaaatattgaattacttaatatttattatttttttcacataactaacgacaaaataaaaataaattagtattgttttatgtcgccaagaacaaattaaaagaaataaaacaaaaaacaacacacacaagaaaagaaaaagaattatatatataaaaatatgtttaattttattttactgcgtgcacgtacatagcaaataaattatcaatgtgtgcacttacatagaaaataaattttgcaacaataaactattacatttggattatatcaatgtattatcacacatcttataattatccaaagttgtcatagactattaaatttggatgagatcgacgataatcgagatcgttaagattctttttagtgcaaaagtttttatctatttactatgcagttttttatttgactaaatttattgttcaatttttcaattgattattattattgtatgtgttatttta

SEQ ID NO: 144757 - DNA, 553 bp, Cannabis sativa
tgttatttgattataggtttgttgggttttggtgttattatagttttttatcaatttgttgaaactagtttctgtattggatgtgtgattgtttgatttttgatagttagttgaaattggtttctgtattgggttgggttgagatacgtttttttcaatttcttgaaactggtttctggtttgggttttaggtatttgttgctgtgttattttctgtaggaaaccaatttctatatttatgtttaaaaactggttttcaattaatttattgttcaggaatactatcaggatatatgggatgatggtggtgggttacagttgtccgttcatactggtcaagctgaggtacaagatttttacatttatttttcgcttgttcgaattttattgtttgttctaactattttccttcaattttttaggaggaaaaggacacttcgaattttgaaaatatgtttattgatctgattttcttaagggtgtggttgatagcactgttaagagtgctttgaagacagatgatgtttcatttcatgatgatagtgataagttg

SEQ ID NO: 144758 - DNA, 726 bp, Cannabis sativa
gaaattcaaatcactactggcatcggccacgaataaacatcagtgtataaatatttggtaatacaaaactattataccaataatagacttcatattcatttaatcatataaattatatatatatgctacctcataatgtaactatcttcattacatcacgttgtctaatcaggcaagtcgatgctttaatctaataatcctgtattgcattgcctaatcaggtaagcccgtgccatagcttggctcccatatatcgcataactgcatcacttaatcaagtgagcccgtgccaaaaacctgtactcatatatcacataattgcatcacctaatcaggtgagcccgtgccacaacctgacacaaatatatcgcatcgtctaattagacgagcccgtacctacgcctagtattcatatatcattgacgctcgtacctacacctgatatgtcaccaagaagaaacctaacaatggtttcaatctatgtcataactaggcattttcatatcactaatgcctgtacctacacccgattcgtcgccaggaatattgcatcacctaatcaggtgagctcgtacctacgctcggtactcatcatatgtcactgacacccatacctacactcggtacgtcgccaagtatatcacatcacctaatcaagtgagcccatatatcacatgcataatatcatcacattatcaatactcaaccaatcaatcttttcattat

SEQ ID NO: 144759 - DNA, 593 bp, Cannabis sativa
tgtctatgacgatatgttctcaaacttactcaatcattgtagatcaagacttagcggcacacaatatacatccataaattatatcatgatcatttaattttttttagaatttttacttacatgcatggtttatgcatgtttatatgttcaatttaatctttttatatgttgctaatttttgttttgttttgttatgcatgtcttattttttggtttaattttgtttttttttttgtttaattttagaaatagtacatttttttttcttgtttagtttttgtatttctttgcatgagtgttttgtgttttattttatttacaagtggaagccattccctaaaagtacatgggggatggaattcttggcctaaaaagtaatatttataaacataatattagctttagtgtaatagttaaactagattacatatagtgttgtttttttctttttaatgttttttttgcccctgccttaaaagaaaaaaaattacgtcccctcactttaaattctgggttcaccactagtaagaacaaactaaaaaaaataataaatagaaaaatctatagcgcaaccctaataaacatatatttgt

SEQ ID NO: 144760 - DNA, 915 bp, Cannabis sativa
aatcaaatgaagtcaaatataatcaagagataaatttactgaaaaagaaagtagaataaataaatcaaattttgtctcaatttggtttggaaaaggtagaaattttctttgattttattttattgttataactagaaaaagaatatgtaatttttttattcttatttatttattatttattattattattattattgcaacaaaaagaaatacagaaattaaacaatgaaaaaaaaagaaaaaaaaaacaaagtctcatacttttcatgagtatactataaaagaaaaactgaaaaaatcacaatataattttttttaagaaaaaaatgtgtaccaaacactatttaactcaacaacatgttaataccatacaactatcacattcaactaatgaaaagttttaaaaaatgctcttacatatgagagcaaaagtaatgctctcacctaagaattttcctataaggatataactattgaaagtccaattttagtgaatatagaaaatatatatatatatatatatatggatgatttctcaatgggtaatatctattaatgggtactaaaaaaattgatgaagtcacaatttggtgacttgctatagcaggttaccaagaagtttttttaaaaaaaaaaattatattttttttaattatagaaaatgatgattcttagaaattaatttttttttttaaattcttatattatccttacattaaatatttaaatgtattagatgagagttattagtgatattaatttattatgttgttctttgtttcaccattgaagacattgagattggtatgaagaatacactggttttttacgtaggaaattaaatcaaacttttttaaccttttatttaactaattaattgggtctttgtgatgtgttgggttctatgcatattca

SEQ ID NO: 144761 - DNA, 548 bp, Cannabis sativa
aaaaaattatctggaataaactaaagatatacaccataacaaatgcacataaactaaaaataaacacataaaaataatagaaaaagaacaaaaagataaatacaaaataacgaaaaaaaaagaggtcgaccttgttgcaatatttaaatcattcataaaactctgaataaactaagatacaaaaattatttttattaatcatgtaaacgagagaaagaaatatgaggagtgctcctaatttttttgtaagagagagaaatagtgttaaaaaatatgagaaaatatgtgtaagtaaaaaaaaattattcagtaaaggttaaaagaaattaattaagatcattttataaaatgagattaattaaagaaaaataatatgaattagtttgagtgtgagtagtaagaaaatatgaaagagagaaaaaaatatagagagaaaaaaatatagactaagtgtgacagtcagtagtcctgtgatccgtaaggggaaataccgggtaagctgtgcaatcccacatcgcctgggaaaggtcaggtgggatgattctgag

SEQ ID NO: 144762 - DNA, 808 bp, Cannabis sativa
  modified_base (35)..(39): a, c, t, g, unknown or other
atgcaacataaaatgtgatttctgatctttattannnnntaaatttgattatattaaaatgggttttatttagggcacaaaactcaacaatatttatgtaactagtttaaaaagtagttaattaactaagataatatttttgtataatttattaaaactaatattaaataattagataattaataagtaaataaaatttgttgaaaataaataattaatatataaatatatttattaattaataaatttaataataaaaaatccttacaatgtgaagaaataatatttaataaagaataagtagttagataattaatttaatattcaattaaataaaattaatttaaataatttagtatttatttatttataaacatataaaaattttatgtaactaatttaataagatatagataattaactacgataattttttttaaatattttttagaaaataataataaataaataattttgtttagttagaaataaatagtgagtaattaaatatttaatttatttaataattagtaaatccttaccataaaaagaattaataattaataaatagttagaattaatacttgcagtttgtggcacagttgccaaataattcgcaagtattgatgaatatgatgacgcagtcgcctcagacgtctcatgtgtcacagccttagatgccacaaatattacaacaaaatgttcagatgatgtcacacaagggcagcaatatcagaacacatcgcaaacgatgcaggcacaaccatgacagcaatatcagaacacatcgcagacgatgccgacacaa

SEQ ID NO: 144763 - DNA, 722 bp, Cannabis sativa
aacatgaggaaactcatcaccgtttggggaaatagcccatgggcatcagaaggtcttcgatccacagtttagatggaccacccgctccaagaggactcaacctgagggtggccctagcacttataccacgtgttcctggaggaccgaaccagacgttggtcccggtacgaacaacacgctcgaggagaacttagagtgagaatggctaaaatcctagcactagagatgaggagcccattcgtggagatactcagcctatgggagaaggcacttatgaaacggaaaaccgccgccttagatgtcgcctagaggaggcacagcggcagaacactaagttagaacgtgatgcagctgcagctagggcggcgcaggggactaacactcaaaattaacctgaacttggagtgagaagactacgaggcagacctcatggctaatgaaccaagagacaagaaaattcccacgaagaacaacctagagaaaatgagattccccatgaaaattagaatgaccagccagaaccctctcacagaaacgagaatgggaggcaaccagaaactgatgaacgagaaattccccatgaagatgaggaagatcttgcgactcaactagaaaaatgcaggtcacctgcgagaaatcacaagcattctttctgaacccataaggagagggctcgtacaaactcaaatgggggaaatacgacaaacaacactcaaggggaa

SEQ ID NO: 144764 - DNA, 568 bp, Cannabis sativa
taaatattaaagaaattaacaaatttttaaaatctggccataatttaagaataaaataataaattttcaaatctaaacctcaaaatatcaaaaaataattataatctattaaaataattaaatattattaattttgaaaatttgataattagatttaaatattaaaaataatattttattaagatattataattttgaagagaaaaaattaaaattgggtgaaaaaatcacccaaaaatcgatgtttgggttaaaagttggtcgctgcccaagaaggctgcgtgcagcctcgggcacactcggagaaggcttcttgtagggtgtcacgccgagaaatcttggcacctacagtttggtgtccacgcacgttgcagcctccgtcgtgttcgaggtgccgagctgaccgagcattcagacaattcttgtctaattccgcgtgcatgagtcaccttgttcgagtgattggtgcatgcggtgctcgaccctcgacaccctttggacctccattttcaaacggccaaaactctctcattttttatcggaattgagttccgtaaaaataaaagtt

SEQ ID NO: 144765 - DNA, 987 bp, Cannabis sativa
tatcaaagggatatggcaagttgtccgaatccctcaatttatgtattctaaaaatgtaatgtatgttcttagccattatagatattgtaagcaaaagggaaaccttccttcatgcttttagtcctataaatagtgatccattctcactgtaaaaggggtcgaaagaattacttcagagagatctaagaaaaaatactcatagatttcattgtgagaggtttgagagaggaaacactgttttgttctcaagttaatacaatccaaggggagtaggctattaccgaactaaaggggtcgaacctctttaaaatcttgtgttctttattgcttactgatttttgctctatcttaattacatttcttatcgcttattaattgactcattgtcgttggctaaaagcgatatcaacattttggtgctttcattgagagcagaaatccaagtgtgctctttgtcttaagtttcatcagacacacaaaatggtggtgcaaactcgcagaggtgtggttgatcagagtgacccacagttagcagatcttacattgcagactcctgggaatacaagggtcccaccataatcatgaataaccaaacatgaagccaccaactgtgggccaaggtgtaacatcccctctagctgggatcatcacgattttctatttatcatcttgacctcttatgttttttttttccaggtttttgagaagttcttctaaaagaattttctaattgcatgctattatcttacaatttaaattaatttgcttacattatcatttattaatactctttattctctatatttagtatcattatttttttttataaattatcaattattatatgggaaatttgacaatctatacttaattaaccttaaaattatttttgtaaaactaaatactataaaattgcctatatatgacaacttttatattatgtccaaaatacccctttaattacttcaccccctccctctcacttct

SEQ ID NO: 144766 - DNA, 580 bp, Cannabis sativa
tttcaaagacccttccccccatgaagaccattgcttgatcacatacccattgctcactataaatcatgttgatggtgatggtgatggtgatgatgatgatgatgttgatgatgatgatgttactataatccatgatggtgatgatgatgatgaagatggtggtagtgattatgatgatgtcactataatccctgatgatgatggtgataatgatgatgatgatggtggtggtggtggtgatgatgatggtaagaaggatcattttacaattgtcacagcatatctcactataccacttttggatatgaatcgatgggatagaatatatcactgtaatggactccttttgctagtaaattatagttacaagaagactataactatggtgttatgtaatccagttttgaaagaatctatgattctcccaaaaccaaagaatgttacatttgtggctcatcatcatcactacataggatttgaacacgattctagaaacaacaaatacaaatgtgtttccctttggctcggtgatgaagaagaatgtaaagttgaggtatacacagtgggttctgattcttgg

SEQ ID NO: 144767 - DNA, 622 bp, Cannabis sativa
gccctcaagcttggcgagtgaaatttgcgagctccaatgttcaacttgactcttcttaaatgattcagcataatgaaagccaaggaatgacgctaatggaggtggattgggtggcaaatacggatcttcatatgtgtacttatccatgaccattttttcactatattgatatccaattacttgttgtatgagcgatggtggttgaattagcatttttcaatgctttgctcaaataatttctcaacaccttgggtagagatagaattcaacaaatttgaatttattattttctttcccttttcttcatcattttggattgaagtaggctccatttgatgctcaaaggtttcctcacacttctcaaaatcttcattgtttttccaagtgatttcttcatcatctagtcacacattttgcatatcacttggaaatacaccttgggaattattatgcaactcccaagataactcctcaactttcttctctagattatttcaggatgtggcattgctataaattaagtcatcatttttagccatatattcattcaccttctccatgtatgcattcaccttctccatgaatgcactcatcattgatattccatctcctaataaatcat

SEQ ID NO: 144768 - DNA, 731 bp, Cannabis sativa
ctcaatgagagaattttgagcactcgtccaatgatcaagataaccttgcgcagacattactatgctatccaaacccgactcttttttcttccaaaccatttcgtttcgcctatcccaaatggcccaacatagagcacacattagcaacctgttggccgtgttttccccagaaaaaatatgcacaaaccagtcataaaaactgttcatgtcgtcggttgagaggcttccattcaaagaaccattcctggtgccaatacccactcggttccacacaatctgcacctttggacatgtaaccaaagcatgaagaatggtttcttcctctccctggcagactggacaagaagaaaaaatattcactctttttgtgcgaagctgacaaagagtaggaaggcagtttctgcatgctctccaaaccagatttttaatcttggggggcagtttaaggcgccagaatgaagaccaaaacttcgcttctgcatctgggttgtcatgccatcttccatggtcaacttgttgcaagttgtacgcacttttgacagagtagatacctgaagattcatgctgctagacaagccgatcctccacagacgaaaataatggaattttgaggattaattctctgtcccgtgcgttaaacaaatcagccagcacttcttgatcccaactcccatcatttcccatgagattttgtaccaaagcattcccaagggccggatgtgatgaagtaa

SEQ ID NO: 144769 - DNA, 555 bp, Cannabis sativa
aaaccccgactcgaaccttagatttggatcccgtactcgtaactagccccatacttagacctgaactccagataccaagatcccaaagacccaaagacgtagaccctaaaatcccgacctcaagccttgacccaaacctcgacccagaccctagacctcgaacctcgacctaaaccccagacctgaatcccgaaccccgacctagatggatccggaccccagacctaaacctagacccgtaaaaaatagttataaaacacattttttatttttcaatgtaaaatttaaaaataaaagtagttatagaataaacttttattttttgcttttaaaattaaaaaaataaaaaataattatagaacatatttttgtttttcaaaataaaaaataaaaaacaaacaatcatgtcaagggtctgaaatatataaatgatgagttttttgcggttaaactctcacttaattttttagagcagctccaaagagactgcaaattgatagtttagtgtatataattgatccaaagaggcaccaaattgagcagcaaattgtagga

SEQ ID NO: 144770 - DNA, 688 bp, Cannabis sativa
aaattaccctttgaaaatagatattctccctctatttttgtgggttgttaaggtgttgtccgttgcttgacttgttgtccatgaatgagggctgcacatcaatctcctaccatggaaaagatggttggctatgcacctgcaggatgcagactggccgaccatacaatgtctacaggttgaggtctggctggccatgctcctgccagggtctggccggccatgtgcctgccagggtctgaccaaccatgtgcttgccaagatcgaaaccattgttgggtttcatcctggtgaagtatgaagtattgggcgtaggtactaggtactggcgtcagtgacatatgataagtaccaggcgtaggtatgggctcatctgattagacgatgcgatatattggtgccaagttgtggcacgggctcacctaattaagtgatgcaattatgtaccgagcgtaggtacgggctcgtctaattagatgatgcaatatattggtgcttggttgaggcacgggctcacctgatcaagtgatgtaattatgtaccgggcgtaggtacgggctcgtctaattaggtgatgcgacatattggtaccaggttatggcacgggctcacctaattaggtgatgcaattatatgatatataggtgcatgtttttggcatgggctcacctgattacatggtgcagttatg

SEQ ID NO: 144771 - DNA, 699 bp, Cannabis sativa
  modified_base (32)..(39): a, c, t, g, unknown or other
atctggttatatccagaatatgcatccataannnnnnnnagctcgtgcccagcagttgcatccactaactagtcaatcctggatagtgggaaacagtcttttggccacgccttattcagatcagaaaagtcactacaagttctccaagttccgggttttgggacgagaacaagattagctatccacgaggggtaaaacacctcgtgtataaagtcattgaccaataacttgtccacttcctgttttagcgcccattgcctctcggaatccaagggtctccttttctgcctctttggtgggtagtttggattgccatttaaatgatggcagataatattaaggtcaatccctatcatatctccatggctctaggcaaactgatcctgattcgcccttagtaaacttatcagctgctattttaattgcttgtctaggttcttccaattgtaaacacactttgtaggatttcatgggtcgagaacaacttcttccaattcttcaattggttttaataagttccttttgtcttgaacccgagggtcaagatcctcgtccttcttttcgctattctctaccaagactgccattaacttgtggccgacttttctatgttgtaactctatgtgatagcaatcgcgagctagcatctgatcgcctcgtaccactcccacaccttctgatgtttgaaacttcagggat

SEQ ID NO: 144772 - DNA, 566 bp, Cannabis sativa
tccttatattttttttgctcctcaaaagataaagtttctgaataataagttttcttaagaaaagctttccaatttttaagttccttaccacaagaccacataatccaattttttgcgaaaggaggaatatcaaatttttcctagaagttttatataatacattagtaatatgaatgtcaaaattacttcagctaatgatttaaaatgcgatattaaataaaagtaaaataataatttttacctgtataattttccacattctatctttatatttgtctggtaccttatgccaactcttatagttaattggagcattttttccatctcgtactaatgtcccaataaaatttgtaagtctgcttgcgtttttatcatgtggctgcccaaattcattacatgtgatttgtacctttttagcatcacgattaccccaaatatcacgcatttgtgtcgcacctctagtattctttttaccattattaactgtcaacaaatctgtaaataattctacacaatcttctgttgggttttatgccctaaataaatctctttacaatctgattagt

SEQ ID NO: 144773 - DNA, 651 bp, Cannabis sativa
agaataaaacatgtaaatacaatcgcataatacagttgtacgttttaacatacactctgtgcacagatgtccactctttttacctcagttgttgagaacacctttttgctacttcaagcacctcaatgaatttctttgttgagaacaagatcctaaacattcattaacacaacaatacattcaaaatacatttgagtatgaatctctgtactcatacagaaacctacgtaaaaatgcgtaatacataaatcaattccacttgcatgacacagcaaacacaatcatttatcactataattcacacaaacacattgcatgaacccatatgaatatttttaaagtaaaatataaattcatacaaatactttttacgtgatttactaaaatactatttattaataaaatatataattatgtagttatatatcaaaatcagaagctagcatatttcttaaccatttatacagatcataaaacatattcaatctgctcagaaatatgtgtgaaatactatctatgattatgtataaatttattgttaaaaataaagaaaatcttaaataattaaccaaaaatagcaaaacatctcaacatagtctcaaattaacttcagaaactataattatattttagcattatattgaaggttcc

SEQ ID NO: 144774 - DNA, 1149 bp, Cannabis sativa
tccttcaccggcttcccgaggggcagtgttttaaagatattgtgctcgagccacgtgatcccaagccttatcctcatctggaatgataacctactaccacgatgaatacttgggaaacttataatcacaagtatactccttgtcagcaagaaggcccaccgatctcagattggcctcgttcaaaaggaattcgcatgacctaaggccataaggaagagtcatcaggcacctgtgctgactaaccatctcgggggtagggatgggcctcgtcaagagagctgtaaaaagacaaacaaaatattggtcagaaagctaaaagacaaggactaatgtaactgagcaagaggaaaacaatcacttacgaagtctgcgaaaggtggttgtgtcgatggggtaaagactagatgtctagaataagttgtctttgaaagacattttgtttggcaagtccacaatgattttaagctcgctagaatgagtaccgaggtaatagaaacccgctgcagcattcttcctcactggaatagccttgatcaaatagagatactcgaattctactagtgtggggcattcccagttcaaaattttatacaaaaccttcaaactagcgagaatcctataagagataggattcagctagaatggggcaacccaaaggtgatttatgtaatctttgaagtagtcccgaagagggagtatggcccctacactaatatgctctaagcttcaggcgcccatgcttatcgagccactggtactattctcaccacttgtccctgggcgcccatgccctctctcactgacctaccttggcatgattgcccaagtttaattccacaggtctttagtatattacctgtgtaggctgagatagatcacacctttgattctatcaacttagctttgaaggtgactctgggatcctggggagtctttgatgtacgtggcttaggaggcattatttcaaaatccaagtcacctggttcaaaagcaatcgtgactttgggtaaaaacaaaggctttgccaaaggaataaaggacaccttgggaggttctggctacatctcgcaagaatcgaaatttgccttcagagatttcttgcaagaaacacctatagcaactaacattatcttcttggtgggttctcac

SEQ ID NO: 144775 - DNA, 573 bp, Cannabis sativa
ttttttaaattatttttctttttaaaaataaattatttttacaatttaattaatattccaatatttaaaataattaaattatgtggaccaataaaaaattgtcatgtgtacaagtgtgtaaacgtgggcagtccactgtggtatttaactgtgatttttggacggaggagtacagagcaaaacagaatgggagtttaggtagttttgcccccgaaaaatcaatttttgtggttaagtgttaaaaaatttaaagttcaagtcgtttagccgccattatccctaattggaaatattagtactatatgagaaaacaattttttttgcaaccgaagagataaatgtacaataaaaaagaaaatattctaaataaaataaaactaaggggttttacaaaaatattaaattttaagtaatggtttatatttatactgccacacagaaaaaattacatttttactgccttggcttttttttttcttttatactataaagaccaaaaataaaaaaagaggcatccatcttccacacccatagacagaaccaccatagcaacaccaaaacaaaataactatt

SEQ ID NO: 144776 - DNA, 653 bp, Cannabis sativa
tccaaatccttcagcagtaccttcacaaaatcaggtaaattcctcaaactcaccaatatcaagctttgactcacttgaccatggttctgtgtctcctgatagcacttcagtcagcatcagcagagacaatttcaccattcagcaggagcaccacagtgaagaaccaaataattcaagtcaagaagtcccagattctggtgcagaaatctcagtacatgagaatacaagtaatgctgcagttcctacacaccacatgatcactagggcaaaggctggtatttacaagcctaagacctatctcagtcaagctaagtgggtgtctgcatttgaagaaccaagaaatactactgaagcacttcaacacaagggttggaatggagctatgaatgatgaaatcatagctctcaagagaaacaaaacctggattttagttcccaggtcagatgcaaacaacttgatagggtgtaagtgggttcacagaatcaagagaaatgcagatggttcttttcagagcaaatcaagacttgttgctaagggttttcatcagagagcaggcttggattatggagaaaccttcagtcctgttgtaaaagcttccacagttagaattgtcttgagcattgctgtatcaaagagttgggacatcagacaac

SEQ ID NO: 144777 - DNA, 749 bp, Cannabis sativa
aataaactaaaaatacttgagaacaaagctaatttaatgcacaaaagagctaaataactctattttcatagagttatcattagcacaacgctgactgctcttttagaggctgctagatatatgtagagtggttctacatccttaggttttgctaagagcaaaggtgaggcgagatattccttaagttgtccaagtgcatcttcacattcctttgtccactcaaattccttcgtttttctcagtttggagaagaacaagtgacaacattcagaagattttgaaataaaatggctgagtgctgctatcctcctggaaaggcgttcaatgtccttgattaattttggtgattgaatgttttgtatggagcgtatatctaatttaccaatctttgatatgttgcactggcgttttttagtccaaaaggcatgaccttgtaacagaaggtcccttgttctatgatgaatgatgtcttctcttaattatctaactgcataaggatctaggtgtacccagaaaatgcattcatgaagctaaggagctcgtgcccatccatagcatcaacaagcatgtcaatgtgagggagcgagaatgaatctttggggcacgccttgttgaggtttgtgaaatcgatacaaatcctccactttccattctttttttggacgacaactacattggccagccattctggactgttgacttctctgactgatccaatgtcgatgagcttttgaatttcttcattgatc

SEQ ID NO: 144778 - DNA, 545 bp, Cannabis sativa
  modified_base (75)..(77): a, c, t, g, unknown or other
ggcaagattaggggcaacaatatcgttttagaagttcatatgtaggattttaaataacatacttgttagtaaatnnnagatcctggtaaaataattcctacacaaatatccaagctgattttttctccaattcatgatggagactagagcttccattaaaactttggaaacttaaatgggacagttaactgctcaaatgggaacccgtactcaagggaatgcacctagaactagtgaggtaaagggcaaagagcagtgtcaagcaatttccttgaggagtggaaagagttatgaggggccaagagtgagcatacaattgaagctacggatcaagatcaacaggcacaggctgaagttaataagaggcaagttgaagagaagaagactactgagggttttacagcaaaagaagcttcaccacgtataaatattgagcaccatataaaaattccttaccctcaaagactctgcaagaacaacctcgacaagcaattttcaaaatttcttgaaatattcaggatgctgcacattaacattccatttgc

SEQ ID NO: 144779 - DNA, 640 bp, Cannabis sativa
tgtgtttgggaatgcgatacaagctccatctggagtagaaggtaaactaagtgatctaatttctgattttgcacaagttctcggcaatgagatgcaagctccattaggatctgctgttataagtccaatggtaagaaaaagaatgctatttctattgttcgttactttaagtcatgacaatcgaagcttgagcttctgctttaataaattgcaggaatatagtcacaatgaagtgaatagtcagtttctctcaccattttccacctcgcccaacaatgaggtgcaaatttcatctggaacacatgttgaaccaagcgaaaggaccacatgtgatcttcaaaatccattagcatatggtgttattagttcaccagtaagaaaaagcaacacaactcttcctagtttctacaatattattattctattttgtataaagcatgggaagtgaagccaaacttatgcatctacttgttgtaattgttattgcagttacattgtgatgatgactatgctagttttcaaccggtctcacaaatatcctcatcatcatctgttgtaatcccggtggtaagaatttgcatttgctcttctctacatttgctaatatttaagtgttcctatcaatcataataagtgaatc

SEQ ID NO: 144780 - DNA, 813 bp, Cannabis sativa
ctgagctgactaaggatctcgagtcttctgaccgacttgaagagaccattgagactttatctgccgaagtgaacagccttcaagatgaaaggacatctcttcgagcggtcctttcgtatggtggaggaggagaagaagtctaaggaggaagatcttacggccgaggtaacgaggctgggagagaaagttcatgccttggagatagccggtcttgaactcttctatgacttttggaaggctaatcttcaagcaaactttgactgcttgggtgaagccaaggagatgtacctcaagttctgcgcttcccaagtggcttatggtgaaactgaggcggctgcttctacctccggccagaatgctgatgtacctcgcgttcaaacaacagatcctccagctcctaccagcctagaagacccgaaccaagagcctgagactccagctgtttaaatacttcttcttttatccttttatttttatattatcttattcggccataaggcctttttaaagacatcatgactaactaagtggcctttaaactgggaattatttttctttttacagacaacgggctgatcgggcagcctttaatcccgatattacttgcttttgttatctttaatgaatttcattctctctttataatcatcgtgcaattgtgactttttaatctttaccaaatgctttgtacaggtctgggtgccccccaagtggctgagcaaacctatgactcttggtcacttgtttcttacaagtatactttttatctgttcggtgctttgggtttgaccaaaccttttgtacgcactggat

SEQ ID NO: 144781 - DNA, 675 bp, Cannabis sativa
acacgggtcaaatttttggatttttgagtggttgggtttaggtttttgggtgtcaggtgtttaaaatgcctaaccgaacctagtttctcagtttttgagttcatgcgggtttcaggtcgggtgcaccagattctgcagggcgggttcagattttaatgggccagatccgattgaaggatttttggatccaaatgatattttgttttgaaaaatgccatttaatatcattccatcaggatttacctaaaattaaatgcacgaaaattaaagttgtgtgatcaaaatggaacatctaaagacctaccaaatcaaattggctcataataaaatgggaaaagcttgttaggaatagaccaccttgaaaataggtttcaaaccttcggtcatatacaatacatataaaatctttttttagaaggaaatttcattaaaacaatttgaaagaaacagagccttttacaaccatcaaagcagaaaatgaagagaagaagaactcgccaaactgagtcggtcgctgggatgagaagaactcgccaccaaaggagaggagacgagggtcgacgagggatacaattgggatttggaagaaacttagaaactgagaaacataagaaatagggatacgaaaggatttaggtttttaagtttttgcttttcaattttaactgactaagt

SEQ ID NO: 144782 - DNA, 662 bp, Cannabis sativa
tattgttaggtgtgtttttctaattaatttttcatgtttgttgttgaaaaatgaagaattaaattgatagaaaaagaaaaggaagcaaggaagaagtgggaatcaaagctgaaattggggcagaatgttgaagtaatgctgaaacgaattcagcattctggcattgatgtgggaacacgagatttagctgtccacatcagcaggagtgtatttgtcataaaaatgagaccagctggaagctttgtaaagggaggactaaacctagtgggccaaagggcaaaaagaatcgggcttctaattttagcgtgtgatttttttaccctagggacccaacaactaaaagaagaaaaaaaactaagtacaccatcttcttctctatcacgtaatgagctgcaatttttggaaggggaagtaaatgcagaaaaagtacagcagaggaggaagaaaaggggaccaagctttagtgtttgattttttttttttaccctctcttaatagttttctttctctttctcttttcttgttatttgtactcagttattaaaaacttgataagttgtaacaagggcagcagctatggaagatacaattttagattggattttagtttttgatttgaatatgagctagacttttgaggcttgaatggctataaacttcta

SEQ ID NO: 144783 - DNA, 539 bp, Cannabis sativa
tggataaattttgtattgtttatgttattttgtttgttctatattgttatatttgttttgtttgttactttaggcatttttaaaatttttgagaacgtccatttacagacattatgctgccaaaatttcagtagaattagaataaattttactaaaaaaacataaatattgaaggaaaaatacataacacaaataacttgttaattactcgctagttgtaagaaattaggtgacacaacatatttatataacttttcaattataaatgacaaaccaaacaaatgaatggattcactttaggaaaagtcattccaattctaccaacatttcaatcaactaaacactaccctagttagttaattacaacttatacaattgaatatcatgaaccaaactaaaacaagaattttagtaatatataaattaatatgaattaaacgtgagaaatttaattagctacattgtgtaagtagtaactagttataattagttattaaatattgatttttttttttgttaggatatttgttatggataaa

SEQ ID NO: 144784 - DNA, 544 bp, Cannabis sativa
atgtgtccatagacttcgagaggtttaaatctccatttcaaaatccgttaagtttcaattataaaaaaaaattggaaaagccttaaaaatcatgttctgtctttctccaagaaagagacaaagagccataattctgcaccataaacgcattattaaaaaactatttgaatcatcaaagtttagaattaaataactgaatttaaatacaaagaaaactattcacctagagaataaaaaaacttcaataatcctaaaagaaccatgagtagtttaccagctattgcaataatgaagacaaaagagatgacagaccaagcatgagtcggatcaaatggccgcgctggaaaaaatgaccaaatggcagaggactgagaaggaaagcttagataggggtggtgaggggattatttttcattttgttaaaaagaaattaaagtaattgaaccaatcaaataataatttaggatgggtatcagtgcaccccctataatctaagtttgattcaatacaccaaagcctataatattctctcttcatttctgac

SEQ ID NO: 144785 - DNA, 600 bp, Cannabis sativa
aaatctttatctgctcatccacttaattgtggatatgggacatgcctaagacatctaatggcaaattttataatctctgttggtttggtggggcttggaaagaagagcaagaaaattgcagagaaaaaaggaattggtatttgtttgaaccaataaagatgagtaggaagacaataccatgtgattgcacatgaactatagcctctcactagaccccatagcatacaatccacctagtttgctctatagtctcttcaccattcatttcaaagtgattcatatatctatgtcctacatatcctatcaagggtattattgattataaatacatacaagactaggatcactaccatcccaactcctcaaattcccaagtaacaagctgatttcctagcaagttttctaaaacatcttgctcgttgtttcttcttcattgttcctttagacactgcaattattacaatcatgggtttcagatttgctagcttaagttcatgccaagcaactcatccagaggcctttttcaagcacaaaagttattccgaaaggatatttagcagtgtatgttggtggtgaaagcagattgaatagatttgtgat

SEQ ID NO: 144786 - DNA, 937 bp, Cannabis sativa
agtaaataattcgcgcttcgcggcagatgagaaaattttaaattatatatatgaaatatattaataataattgagtaataaattaaaataatttttaattttttttaataatataataagctttttttatttgaaagatacttgtgatatgttaagtataggattatatatattacgtattcaatttgatatttggtgctaaattatgtagatacaaattgttcgtacggtataagtaataaaaaaataagatccctaaaaaaaaataacataaattatttgtttaaatttaaatctatattgagtatatataaatcacttagatatatttaattcatatttacttttaaaaaatgtctaactaacaaaaacaaagagtcataattcttaaattagtctattggaaatgtgttaaacatcacaaatcacaaaattcatattatatgatttaaaaagatagaatataattaaagcaaaaaatatataaattaaaagataaaataaagtctaaaatcgttattattactgtatctcacttgtagttgtaaaagtaattaattatagatattttaatggatcaaagaaagttatgatagtttttgttttaaaagagaaaatatttattttttctttaattgaactaattagtttttttttttaatacaattcccttattctttttactatctaacaaattagatacttggaattttttttttctttttgtagtagactactacaaaattgggctttagaggcggtttttaagggctttcagcgtcggtattagcgaaattcgctaccgacgatgttccgggtgacgctaaagggttaaaaacaaccgacgccatatgacccctatggcgtcggttatttcataataaccaacgccataggaagacgccataggggtcatatggcgtcggttattatgaaa

SEQ ID NO: 144787 - DNA, 653 bp, Cannabis sativa
tgataccacttgttgggaaaacctattgtaattaaccacaatattttccctctttgtatgtcaaaaataggatacttatcaaacgccccaataagtaattatcaaatatcaattaaaacaccacaaacaatataaaatacacaaatcaagcataaaagtgagacaccaagatttttacgtggaaacccaatgcaggaaaaaccacgggattgtagtccgctcaaatcatccactatcaccaaagtttaataaggagattacaaatttcttctttagtaaaactagagggtcataacaacatcaagattaaataatcttggatcaccaatacaatcatcatcatctcaaaagatggatacacaaatagaaaaagtttgggtctcaccaagtgggtattatagaatagcaccttagaaaggacaatcgccaaattgaaacttgtaggtttgaagagcaccttgcaaggattcaccacccaaaattagagttaaaatagatgagaatcaaccacttgatcttcaaagcaaaatggcaaaactcatttctctctctagctttctttctcttctttccctttctttttctttctttctattggctgctcacgataccttcagtccctttttttctcttttttgttttttttttctttt

SEQ ID NO: 144788 - DNA, 663 bp, Cannabis sativa
taatttctcataatgtggctaggtgggcttatgctaacttaattttcggtatggtatatctttcttcaataccgactactatcctttgtaatgaccatgaggtctaactttttttctatcgatctataaaacactatttttcaaaaaaaaaaaaaatctatttattcggtgactacataactgtggggatattattgttcttttatattgatgagtggtcctgattttgttactaatattttcttatcgatataggagttaatccattatttttaaaaagtactttgtgatataaattaaagaatcatttataagcattatcttcctacaagggtcgaagtgtgacttttgaccacccaaattatagatattacaaatctatcacggcctagggctcgggttgtgacgaccaatctcaggagaccaggcctgtcgagtgaggtgtcccaaggtgctataaattaggacaaatattcttatcaccacgccttgattacataaccaataatgacgggcctagaccgccgaaattgccaacaataacgacaccaatcttggtattgaaatgaggaaattacactctatacccttttcatattgtcctctttcatttttacccttttttttaaagtgtatcatttttacctatttttttaaacattg

SEQ ID NO: 144789 - DNA, 1063 bp, Cannabis sativa
gaagtttcattatcatctacatatttatataaagtgaaatatagggtggtgacatatcactttctatgaattatattttaatttttttttttaatttttttatatttttatttacgtactttttaaaattttattaatttcactctttagtgagttatttaaaaaaaaaaaaaaaatctcacattgtttagaaatgaatgtgatatagcacttagaaattatttataaatcattatttcttttattttacttgtgtaaaattaatattacataatttttgtatgtataattaagattcttgcttaattagttaaaatatttttagataataaatgcaacatatctaaaaaaaatcatttttaaaattatattttttttatttaataaatatcttcaatttttaatgatgtttaaaatatatgcacaatatttttctctttcttaacttggaggccttccacttggttggcttgaaggagaatggtacggaccacagtgtcagagtgaggtttcacatctataatttctctggttgagagcatggagatagttgatcatatttattgattgcattccatcttcaactaatttggaaatttctttgttttctattccaagaaccttttctagctatttgggagattatacttttggaaaagctttgccaattctaatgaataaatttccaaaatttccctgcacatttatgtatgtgtgttataataataataataataataattggatatatatctagcacagtaaaaccattttaaggtacaaaatttgtattaaaaaaataaaatatcattaataataattaataaattaaatattttaaaaaatattaattaaaaaattatatattaaatatattattaataattaatgataaaattgaaattattttatatagtatttattgttatcaacacttatactagaaagaaaaaagccactatagtttttattattattattattggatatgatagctatattcatctcttaaataatttcatattaaaacatttatcattaattggtaataaaagtaatatat

SEQ ID NO: 144790 - DNA, 962 bp, Cannabis sativa
  modified_base (27)..(43): a, c, t, g, unknown or other
aattttccataattaaacataattaannnnnnnnnnnnnnnnnaaactaagcggtctttacatatcacgtagtataaatgcaatttatgatttgaaatcacatagctgtaattttcccccttttactgggtcaaaatgatcatgtttcaaatcacgtcttcaattattgtttctggagttgtctcgacagaagcttggttctagtgatctcaatagcgagctggggccatttttccttgcgaggtcgacaatgcatgtctgatgtcgatcgtggttcttatgtacaatgaattcttcggagctcatttgaatgttagcttctgacttgccagggttgtgagcctcattgacactaacgggatgaagttatatgaggtcttcccataacgagacaggcaactcgcttacttagtctttcgccgatcagtctgtaacacttagtttgtacactaaggactttcgcaattgatatatgtcactttcgttttccaatgtgtattgtccttgatgcctcgcaattcgcattcagtgtcgtatgatttctcgccaatatgctaagtaccagtttgatattagttcctcgcctaagaccttacagcctacgggttacaaatatactctgatactcatgtaattaatgagttattccatatagagcgatcacatcaatccatattccccttatcgtgacacgtgtcctctactgagatggtagccgaatttcgggtataacaatttccccttaaaaagtttttttcttagtaaaaagtactttttaataattatagatggcatttttgtcagaatcccttcttggaaaaaatgtatcctttgcttctggcggttgtacagttgtgagggtcattatgaatcgtcccttcatgttctgccttccaaccgttggatttctcaatccttagctttcttgtcactggactttgtgtataaaagggcggctcaag

SEQ ID NO: 144791 - DNA, 638 bp, Cannabis sativa
tagagtatgcgcggtggtgcttatattggatgtgatatatgtgggtaattaaaaaccgagattagggttattagcttaaagtgagcggtttattggcctaggattaataccctagtgaattgttaatgtgtaattattatgccatgatatatatttgtatattgagattaagagttatgcattcaaggcatgatcagattggaatcggtaattaaaaccgagatgaaccgttctaagaccttattgtatttaaatgtgtggcattattgtatatgtgatatgttaattacgtttattgatatttatactatcttgctgggtttggctcacgggtgctctactgtgcaagaaaggataaatctgtctttgatcagccatgagtgcgagagcttggcggtgcttgtacatgttcagtccacactagaccaagcgagttggggtctaccagcgatgtaattttgtaactctgattttgctgctgaggtcggctagtaaaaagacttgtaatattttgtaaaatatttttagaatctcgaattatgtcacttttgattgtaaagtttaaagttattacaagttttattttcattctgctttagataaaagtttaaatttcctgcacttatctttctagtaat

SEQ ID NO: 144792 - DNA, 549 bp, Cannabis sativa
  modified_base (443)..(467): a, c, t, g, unknown or other
tgttccttaatttgttacgtttaagtattttaatatttttttgactgattttttagtcactacggcttgactaacaaataaataattatgtatatgtggatttgaatggtttatatatttatatatatatatatatatactagattaatgttacgtggcacgtaaaattaattttctttttaattagatttaatttggttatattaaatgcaatacatgtatgtaattttttttaattaggcatgtatttttgaaatggagtttaaaattttgatctttaaatttttttttttaactattgctacattggtgtgtcatttgaatgtaattatatatatgctcaaatattggtgaaagacatgtttaagttagggcataaaaaagtttgtcatatatatagtcactaccaaaattaaatttttacttttagtgacaattttttnnnnnnnnnnnnnnnnnnnnnnnnntaaatgtgacttttagtcacaactaaatgttacttgcgactaaaacaaagtatttagttacaatttgtcactaatttagttt

SEQ ID NO: 144793 - DNA, 561 bp, Cannabis sativa
  modified_base (67)..(90): a, c, t, g, unknown or other
  modified_base (383)..(388): a, c, t, g, unknown or other
atatttaattatatagaaaactatatttaagttgaaaattttaatttcagaacaacttaaattagannnnnnnnnnnnnnnnnnnnnnnnttattttattaatcattttttccacctaattcgaaattgtattatttaatggagataattttgaaatttttttaaaaaatagattaaatttgaaaattaattttttttaaataatattaaatcaagtaaatttttcattaatgatttattaaaataaatagattaaaatatattacattttaattagaaaataagtagttagttagtgaaatagctagataattattttctgtatgcttgaagtattttgctagttatatttaattaaatagaaattaatatttaagttgatnnnnnncaagatacttaaatatttgataattttcttagaaatttaattaaatagaaaaaatatatttgtgttgaaaattaatttatttatttagttgtgaccaacatagattagaataatttttaagatttattttattttattttaggctaatttcaaaaatgtatttattttaaata

SEQ ID NO: 144794 - DNA, 589 bp, Cannabis sativa
ctctcatggacattccagctttcaatggaaatctgaatatacgtgtcttttaaataggaatctggtctcaagtttctaggtgagagaaatctcactataacaatagtatatacataggagtatttataggagaacaagagaacaatataaaactcaaaaaaaaaaaagaagaacaaacacccaaagtggagatggagatcaccaaaagccatagaacacttagggctttgtggaaatacttctagaaattatgaagccatagaactctctagctttgtgtttgaaagatagaagagaagagtgtgtctcaaagggtgaaccaagacctctatttatagtgtttaggataacaaactttaaaattaaaatatcccacacccaatggctattaccatttcttaatggggtgtaaatgggattaaatgggtaatttgaaagttatgggagttgttaaaagccatcccaatagttaaaaacgttttacttttaatgttgaaaaaaaatagtaactagttactagttaccaaatttttcagcttttgcaaataacactccaacctatttcaaaccattcccactttattttata

SEQ ID NO: 144795 - DNA, 755 bp, Cannabis sativa
gagcttccatgatcggagaagcttccatgatcgaaggagcctccatgatcgaaggagcttccatgattggagaagcttccatgatcggaagagcttctagaatgggactttaccaaagaaattagtttttgtattttggcaataacttttcacttggatgtccgttttggacgttatgcaatactattttaaagcttgtgacaagctctaccatatggaatataagctagagccaaactacgtatttttataagggtgttttcactttatagtttggtagaaaaccccaaggttctattcgggcatagagaagtgttctagagtaaacacttatctattttatattgtgacaaagggtcacatgtgaatttccatttagattgaccgacacacttgaatcaggaaacaaggtaaggctagcatagaatgtatatgtatatgtgtatgtgtattatatgcatgttgtttataagattcatatcctatcaacactagtatggtagcagtgcattgatacaacatattatgtttaagagtacaatttggtgttaccaacactagtacaattaggtatgcggtgcatgtggtacaacacttagtggtacttggggtaggagtcaaactctaccaacactagtacagtagcggtacgtagtgaatgtggtatagaggtcgtacctttgttaagaacgttctaaattatctgttaagccttgtaaataggtgtatgagtgcctagatacaagttgataata

SEQ ID NO: 144796 - DNA, 858 bp, Cannabis sativa
cagggtgtgcagatccataatagattattccttgcactcaagagcctgttcttgactttccaacttcaattaataaaacacaaggggagtaggctattatcgatatttagggccaaacctctttgattatcagtatcattatttacatttattgtttaaattttggtttaaatctcatttgatatgactcgatgtcagttggttaaaaatctagtgaatatatatatatatctattttataaaaaatgtagctatgtatcttggtttaacagtattttttaattttttacgttaactttaacagaatatactattatatggaggaggtttcaatggttacatcaaatatgtaataattatggttacatttatttttagtctttagattactattgaatggttgtgattaatttagaaattaaaataaataaataaattgtaactttatagtaacttgatactttatttccttataaaatctgaattaaaattaaattactaatagttattaattaattttttgcaatttgttactaaataagaatcttttagaaattaatttgtttcacttaaattattcaattatttgtaataaaacttctaataattcaaaattattacacccataactttaattaataaaaaaaaatagtaagaatgacttctaattaaatgtaattctacagtcaatcttattataaatactttaagtgctagtgtaatgatcgctttagtaatttagattagtaaaggcaattagcacaaatttctaacatttttataattatttatgaatttaattatctgtggtctccattattataaatgggcattagagttataatttctcaatttcgg

SEQ ID NO: 144797 - DNA, 788 bp, Cannabis sativa
taataataataaattataatgtcttttaatatatcgtgtcgtgcttttcggacttgttgtgtgttgcgctcttcgggctagtctattcgtgtttacgtgttgtacctttcgtgattctcgtactgtgtcgtgcttaaggacatattttttgtgtcttatcatgccaatttgtagcagcgtatcgtgtcgtgcttaaacccgtattttttatgcctagttgtgctcgtgccttttgagctcgtaccgatttcgtgtagtgtcaaaaagtctggtatgtatttacagcactaatatacactattattatatttactataatttattacaaataaattatattttttttgttgaaaacacatcatataaattaaaataatataataatttaccggcgtaaatacttaaatttaactccacattctagataaatacctaactaattttttacgataataatacattattatatttttagaatttccgtaggtacgtactcgtccctgattgatacatattattaaaattttatttttatttaaaaattaataattcaggccaataagaaaataataagtaaatattgacttagcacttaacggttacatatatatctacgaaagttctagaaatataacataagtattattattgttgaacattaaacttaagtatttatatgtaattgggagttaaatttaaatatttataaaacaaattattctataaattagtgccgtttggtaacactttttaatttttctgtttttaaaattgaaaaagtgaaaata

SEQ ID NO: 144798 - DNA, 616 bp, Cannabis sativa
ccacttggatccactgggatgctcatgccaggttggccaactgtggtggccagacttgttgggcttgttgtggtgacgggattcactacatctgttgtatttatggggattccaagggtgactggaacctgagtgtctggatcagtaatctgtaggtcttgagggagacccaaagatggagattgtgcgactggggttcttcttgtgttcaccatggcattagatcaaatcgcgatatccacgctctcaatgaaagcaccaaactattaaccttgaaaagtgatcaaccgacggtggggttgtgcagatccaatgcttgccacgtgtgtgcacaaataagaatgaaacgtaatagacaataggatttgttatagaggtttggcccccttgtgatagcgattaatgacctactccccttttagttgtattataccgagggaattactatccaaatcgctttaggtggtatttgctatagtgcccttaggattacattcaatgaatcaatgcctgactaaactcgagtgttggacagcctagaatgttggatagccttaaggtggcatgtgggagagaatgaggaagagagagagtttatcaaacactcgagatcagg

SEQ ID NO: 144799 - DNA, 994 bp, Cannabis sativa
  modified_base (650)..(653): a, c, t, g, unknown or other
gccaaaaagtgaaatttcccttttctttttgtacaagattaagttcacttttgaagctctctttaatactactatatatacaattcatacactttttcttatttataaataaattttagtttagccaaatgttataaattgcacctcctaatacattattttgaacataatatgatttttatgacacattctaatatatttttaattcatttttataaaattatgtgtttttttaaacatattttttttttcaataacaaaaaaaattaaaataacaaaactcattaacttaaagctaaaaaaaaagttcattcatgtatacatgaacaacacttatatttctcacattctgttttttttttttaacaattttttataaagtagatttatttttttaaccaacaaaaaaaaaatcacatgtgtacgtactcattaccataccatgtataacactctaatctatagggacactacgtgtgtgattttataaactagtttatagtaataacaaattaattaattattaaaatctgtgataatattaaaaattttactaaaacaaaacactagtagcggacattataacgatactaagactttgttccggaaattcctgttataaaagttttaccaaaaaggactatatacannnnctaatcaaaatacacaacagataacagtatgtttatttatttatttattcttaaataaaagtatgtttatttattaccggtacgagttaatactatcgtgtttattaatttttttgtaaaaaaataaaaataatttataattaaaatgtttctcactccctcccctaaaaaacataataagtaaacaattttgagaatttttaaacctatccaatttagtttgttatttttttttttgttggttgatcgtgttttttagttttattgattatttttattttaaaaaatattatttatcatatgatattgtgagcttttgtggttgtttttttttttttttt

SEQ ID NO: 144800 - DNA, 689 bp, Cannabis sativa
  modified_base (630)..(637): a, c, t, g, unknown or other
tttttaacggccaaaaaagttcagtgggcacgatttagtacatgtcaaagttcaagaaaaaaattactaattagccttaaatatatatatatatatatatatacagtaaatctatagtaggagttagtagttttacccaatattacaggaaagtaaattgaagctatgagaatttaaataaaagaaactgtatagagttataattatggaatataataggttttattaaggtagtgtttagttagaaataatgaaagcataggaatgaaaatgagaataaaaataagaataaaatgaaataaaataaaaaacgtataaaaaattttgataaaaaattattaaatttttatatttgttcatgttacattaaagggtctttccttttattctaaaatggaatagttattccacgaaaatagagtaaaagcatttcattataatgacatttcaatactttaaagaatggaataaaaattattttattttcattctattccattttattactttcaacaaaacgcaacttaaacttttttaggcaaagcttgaactctttgaaaaaaaaattaaaaaagtaattcgataatatttagtagtttggcacataatatgtgacagtcagtagtcccnnnnnnnntaaggggaaataccgggtaagctatgcaatcccacatcgcctggggaaggtc

SEQ ID NO: 144801 - DNA, 708 bp, Cannabis sativa
tcaagaaattgattccatgcgcacaaccaaagtcttggaatataaaaccccacttgaggatattacgccctgtaagtaaattttcaagaagaagagaaatgctaaagtgaaggtaaagacccttaaagctaggcttgtagccaaaggctacacacagtgagaaggcgtcgactatgacgaaaccttctttcttatgacaatgcttaaatctattcacattcttctatccattgctatcgcttatgattatgagatatgataaactgatgtcaagactgctttttctaaatggtgatcttgatgaaactatttatatggaataactagaagggtatgtcctaccaggaaaagatcacaagttatgcaaattgcttaaatccatttatggattgaatcaagcctctagatcttagaatatcacctttaattagactattaaagagtatgactttcaacaaaacaaagacgaagcatgtgtatacaaatacaataaaggtaatgtagtggtattcttagttctttgtgttgatgatattctacttattggaaataatgtagaaaggttatcagacgtaaataagtggttggctaaaaaattctaaatgaaggattttggagaagcacactatgttctcgacattaaaatctatagagatataaagcgaagaacattaacactttctcaagcaacttatatcgataaggtgc

SEQ ID NO: 144802 - DNA, 3250 bp, Cannabis sativa
attttcactctcatctctctctctctcttttcgaacccctagaacctactagggttctgttttcttcttcaaattctagcaatttccatcaagatcatagtgtatccaagccaaggtaagctcctagcaactccctttttagttttcttgagtttcaagtttaggattttacatgaagttatgagtttagctactgttgttgttgttgatgtttgaattttatttttgaagtcaaaatatgtttagatatgttgaattaagctttttttatgggttgttattaggtttgagcaagctttgagttttagaactcaagcttagctctttaatggtgatttttgattttcagcttgggtagttattttgttgcttggaatatgtctattagggtataatatgaaggtctagaaggtttggtaaggattggaatcgatttggttagatttttgaattttttcgggtttttttggtgtaaaccagttaaccggttttaaaggacctataaaaccgattacccggatttgctgctgggttccccaaaaaatttgtgttgtcgattcgtgttagtttcagagctttggttggttaattccctgctagtttaggatatttctatgttaagttatagtagataggtttttggtttaaaacctaagtccccggttgtgatttagcgtgtcacttatccatgttgtgatcgatgtgatttaggggcctgtaattcgccgagcagttgttccacttacgttggtcagcacacctaaattcgaaataaaggtaagattagtataatgttctgcatatgttattacatgtttagcatacatgttgtttatgtctgttagagtacattgataccagtaataatatacgtagagttgtattgattactgataaatgcgtgttggctgaaatactgatcgatgctgtcacatcagtatagtatgactggcatattgagtataagctgacattatggttgatagtattgtcgtatgaacgttctagactcagtaccatgtgggacacagggatatggttatgattgggtgtatgggtgcctgattataacctgagatattgttatgttttattgttacgcttttcttactgagtctgtcgactcacaatgttatttctatttgtaggtaagggcaaggctaaggctgaggagccgtgagagcgagcagatgaagattgtacatgtgagggaagttaggcctagagtgtacgatctttaagacatcagggcttttgctgtatagtcactgggcaacaaacttttgtatacaaatagttaaacttttataaacgagatcccagaattttataattatattactttatgtttctaattaaattagcaaattttttattagggtgttacagaaagggtctgattcattactccaagaatgtatttgcaagaggattggggatgggaggtctacatgcatctagcttgattcttgggtgccgactggggtccataatccccgccctattaaggatgccgcacaaggggcaagcgtagtgaactacttcttaaatgataatctcacttggaatgaaatcagagtcaggaaatggtttaatgaggttgataccaaacatattctaattattggactccctgcacatcaacaaaaggattcttgactttggcttggtgaggacaggggagtcttcatggtaaaatctgcctatcatttggtcaagaagcattccgtttctgaccatcctaactggttttggaaagttcagtggaattgccccctccatgtgcggttaaagatgttgtggtggcaaatctcaaacacacactacccacaagagagaagattgttgcggccatacccatcccaacttgcacttgcgctgtttgtgacgggggtgaggaatcctctttccatattttttgggaatgttcctatgctaaagttatctggtttggtaatctgtggggaatgagaacggaactcattcaatgcattaattggctggaatggatgatttggtttcggtgccaaagcaacaggccctagaatctcacgtttgaggaaatcatgacgggggcgctgtgtacttttgaagtgatatggagagctcggaataatgttgttcatggctctagtctgcttcctttggttgaggccttcaagttagttaggcgcctttttcaggactatctctctcgctggaagacaaacttgggtgtaggattgatcaagaccactcttgaggccagttggttggcctgttataccgatgtcttaattcacttgaatcattcattcggtgtggcagtattcagggatagcaatgatagagttcatacaatcttttcagagcgctttgctgcaacggatccaacactagtggaagcctcgatgctggtaagtgctgcaaactttactgggaagaacttctttgggaaagtagctttccattacgacaatgaagttgtggtttcgaacttcaccaacgccatcgacttgaagagacacttaaattttattggcaccttggatcgatttaagagtgtcgtccgatctcttgaagatttgaagctaatgaaaattgacaggaagcattatttcttggctcacaactctgcaaagtgggctgagttcaactcagtggtaggggaatttgatctgagtactgtggaggaggatgtttttctgattttgttgaatggtttccttatcgggattgagacctttagttcgtgttcctagggtgtttccttgtggccttccccagggagtttctatcttttctactttgtttgttttctggttgttgcattttattatgtattgtttcctttgtactgttttggctatttggcctttgttaatgaatgtgtgctttccacctccccttcaccaaaaatagaaaaacactcaaacagattaatgcatgcaagttattaatctgccacatgtaaaattaaacgacagggtctaatatttacttttattggttttgacaaatactactaagactatttttgtaaaaaagaattaattttataaaaatgtgcacaaaaaatatattttatttaaattgagataaaatgtggtgtcaagacttttttttttttaataaaaaagaatggtattcagtaagactttaatctagtaaataatttttattttataacatacaaaaaataatattatattcaattttgtttggtgaattagattgtaattactttgtatgggatatgattttgtcccgt

SEQ ID NO: 144803 - DNA, 1460 bp, Cannabis sativa
tcaaaagttatgacaaaaatacgatttctgatctcttaagaatttctaagaactataaaactcgaaaaattgatccaccacacattaagaatagtgtaggctattaggataaagtataactttttttcttgttgagttctcaacatataagcaagaaaaattgggagaaaaataatttccttttctctcctttattttgaaaataatggtgttcaggaagtgagaagtgtgtcctgatttttcaaattaggcttctatttatagtagttaaatctttttaattaaattatcatttaattatttaaataaataaatatctattagcaaattcgattactaatatttatgaggaaatctttcaaccacttgagagaatatctcaataatcttgaaatatttataaccactttttaaattatatatttacctaattgaattaattaaataattaattaacctaaaaagtcaaactccatagggatagcataatgctataggcatctaccattgtctatttaggacaaggttggtgtctttgtcctgctaacttttgttttaataaatcttgtcttgacaaatttttgtcttaacaatttttatcttttccctatttaattaatttgaaaaaattatttatttatttattacaaaaattaataattactattttgccaattcaaaatagatttttccgaacatctttatacaactatttatccctactattgatagtgtttcaaggtggcgatttgaggaccatggacctataattctaagctctaatagactaaattatttattgagtctcatcaaccaaataatcccttgtttattaatttcatgattactccactataaatatggaattgaactcttagtaattatataattatatttactgattttaattgcagtgtccattgatataattaattttaaagattagccctccatgaggttgtttgtaattagttttgatcaaaatattactttacccttctaattacttctttatcattcagtactattaattcactaatggtagtataatttaaaatcccatttaaatttgtgcacaacattccagttttggaattaacacttaaagggagccaacattcgatctgttaggaaagtcaattccataattgtacaccttgttcccagccatccatattattagattccaaaaatagaagttgtaagaatcattttctctgagaaactttaacgattcaatcaaagaaactaataacatgaacaggagttcatgataattcaagatttatgacgatctactattgatcatcattatgatatgaattaggtctttatgataaatgacatgttaataaaggcaacttcattcaaatcattccatgtcatatataatctttattatatgtaacaccttcacttagatgtctcactacatcaataatccaaaccaagattacttg

SEQ ID NO: 144804 - DNA, 897 bp, Cannabis sativa
cgatgtacactcgcagtagtgaaactatcactgtagtttttaggggtcccctgacacaaagtatgtaatcaagttaaatgtggggtatcggtgtcactagtttcgtaaaaaataactaatcaacaccgaaatagtgttctacttagtggtgctaatgtaaagaaatctctaaccgatacaaaaattggattctacttagttgtgccgatgtatactcgtagtagtgaaactatcaatttagatgtttaggggtcctttgacaaaaagtatgtaatcaaattaggtgtatagtattggagtcaccagttttgtaacaaaatcactaatcgataccaaaatagggttctacttattggcgccgatgtacacttgccgtagtcacacaatcactgtagatgtttagaggactcgtgacacagagtaagtaatcaagttaggtgtagtgtataagagtcaccagttttgtaaaacaatcactaattgataaagaaatagggttcgagatagcggtgtcgatgtacactcacaacatggacactatcactgtagatgattaggggtcctgtgactaaaagtatgtaatcaagttaggtctagtgtatcagagtaaccaatttcataaggaaatcacaaaccgaaactgaaacaggtttatacttagtgttgccgatgtacactcgcaatagtgacactatcactgtagatgattaggggtcccatgacacaaagtatgtaatcatgttaggtgtagtgtatcggaggcaccagtatcgtaacgaaataactaagcgataccaaaatcggcttccacttagcgttgtcgatgtacactcgcagtagtgacactatcactgtagatgtttaggggtcccatgacacaaagtatgtaatcaagtt

SEQ ID NO: 144805 - DNA, 583 bp, Cannabis sativa
cggtgagctattgtttgacaatgggaatgtcgggattagtcgggaatttagaatttcccaaaataccccttagtacccttttatgttattttgtgtggaggggcgaaattgtcattttgctccatttgtatttttgtcctttagtggacttagaaatattttattcagcatttattattaatttgtgcctgagataattaattaaatactatgttgttcattttatcaaagtttaaagaaaaaggaaattttcaaaaccacaattttctctcaaactctctccctctttcggcctccttgagcagcaaggaatcttaggatttttctttgtgtttcaagctaattttcaagattgtagtaagctcaaactcttggtaagatttttggtaacttgtcttgatgttttcttgaaattttgaggaaaaatggatagttgcatgcttggtttttgttgttgttgctgctgggtctatgggatgtttgctgtggtttttatatgtttaaattgattagatcaaagtaggtttgatgcatgctagatggattaatcgagtttgaatctttttaactcaaaaactatgat

SEQ ID NO: 144806 - DNA, 518 bp, Cannabis sativa
acttggatcaggatcaaggacccccaaatcatgacctatcatgacctaggacacctaggacccacctcgggacttgggatccaggactcgatgattggacctgacccgtagtcagtgtttgaatctgggaattagaacagaacccgaacccaaactccaactcaaaccaagacccgaacacatacccagacccagacccacactcgggaaccaaaattgaaacttgaactagaaccggactgggatctttgaaggggactggggcttcgacgcagatcagaaccgaaaaccgtacccaacctcagaccctaaccgagaccgaaatatggacctgaacctccccccgaacccaaatcaagactcgaacctagacttagacccaaactcgacccgaacttgtaccctgtgacttgaaactggaactgaaccagaagccccaaacccagaccctgaccaaaattcgggacccaaaactagaaactaaaaaagaactgcaagactaggacccggacccaaac

SEQ ID NO: 144807 - DNA, 613 bp, Cannabis sativa
actacaaagtggaaagaatccccagagaaaagaatgcccacgcagactgtttggctaagttagcatcagacagcgagattgagaaactgaaggtggtacacgttgaacgcctcacagaaccaagcattaaaaccgaaaatattgtggcagcagttgaacaagagctcaactggatgatccccatcattgaatatataaccaaaggcgggttgccccaagagaggacactgtccagaaggatacagtatcaagcgcaccattatgtgatgatggataacattctctaccgaagaggactcagcataccgtacctaaggtgtgtatcagaccctgaagctaagtaaattaagctagaggtctatgaggggttctgcggagatcatacaggaggcccgagtcttgcaaagaagatattgagacaagggtacttctggccaaccatgaaaaaagactatatagactatgtccaaaaatgtgattcgtgccaaagattcgtgaacataccaagagccccctgaacgagattaccctgatgactagtccttggcccttcgcggtctgggggatagatcttattgggtccctaccaatgggaaagggaggggtaaagtat

SEQ ID NO: 144808 - DNA, 563 bp, Cannabis sativa
  modified_base (528)..(528): a, c, t, g, unknown or other
cgcattattatgcctcgcatgatgtaagaccaagaaggaaatgttcaagtcttgcatataccaatatatatgcgatgtctatgaagacttctcctgcgaagtaaagattgactctttacttagcgagttggtccgaatgacctaacgtgctcgatgacccgactcgccacgtcttgagttgtcgacgctaataaaggtatctgtatacgcgactcgattaggacgtagataccttaacacaagactcattagtcttgtgttaacaggaacacaacctaagcctgcgagcttatgctagtatatgaatagacaactcgcactatgaagattgcgtacgttgttgtatttagtaaaacaaattaaaattgttttgtatttattccattcacgttttcttatatttaatgttgatattcaatgtaaaatggttcaataattaagttttgtataatcaaaaggacacttgctttgtatataaaggagtgatccagtatgaataagaacaagacagaaatccttgcaacagtngactaagcagaccatgatctgactaaaccactata

SEQ ID NO: 144809 - DNA, 615 bp, Cannabis sativa
ccaaaccttttccacaaagtcaataatggtggcttcatttactaccatcggggccaccactttcccaagcagacaaaaggaatgtaaagcctgagaagattcacaaggaatgagtttgaccgaagcttcctcacacgtgaagcacttaccatgattggaggagtaggtagcatttactagtgccattgaatataaaaataaggggaaagcagccaaaacagaataatactacgcaaagaccaaaaaccacaaacaaacactaccaacacagagacaaaccccacgagaagcccaaacctttactacactcaaccccacaaactaagaccccacccagagacaaacacgactgaaaacaagaagttttgaatccaagaagaccaaaccaagtccaaacaccaaagagaaagatgatagctcaaagacacagccacacacccacagacaaaaacactaaacacctaaaagaaatgagatgaaataggacaggaaaaggaatgaaatgaaggaaatgagaacaaagactcagaaggaaagagagagtggtagatgaccattctgatggtttttgttcattaagaagacatatacattgatttttagaaattttgaggg

SEQ ID NO: 144810 - DNA, 690 bp, Cannabis sativa
  modified_base (294)..(295): a, c, t, g, unknown or other
aaaaaaagaggtatatttaaattaaattttatttggaggtaaatttagttaatgtatataaaaaaaatgtattcttcaacttctcccaactatatatatgataaaaataaataataaacatataaaaaataaattttaaagatacatatgttttatttatgaatctgtatttaaattttaataaacacattatatcaacatatcatcgcaaatttagtcaaaaaaacatatcatcacaaacattatcataacaaatatgttagattaataattaataaacattatcaataatannataaacatagtgtttatacataaagtcacatttaattacatttatttatttattaagcacatttttcaataactaataagtataagtgttacattttaaaattatttatgaccttttaataaataaataaaaaatgtttattcaattaagtaaattaatttaagtattttatttttaaaattattatctttttaataaataaatgatatttattatcataataaacatactagattaataataatattataatattaatcaaatataatttaataaacatatatatgtacagtactgtttataaaatataacaaaatttgtaaatgtgtttgtatattttttttttaattttatattaaaatttagtaaacatattcttttaagatcggaagagc

SEQ ID NO: 144811 - DNA, 623 bp, Cannabis sativa
  modified_base (56)..(58): a, c, t, g, unknown or other
atgtttagttttttgtatttttgcaaacatatctgattacttgttattttctgaannngtgtatgaatttattgaaccaaatgatttacttctgtttattgataattatagagtcaaaaatgtacaacccacatcccaacactcatctagaatgtgcctttaggaatgaactcgcaggtgtgaagaaggtgtgaagaaggctcctggtcagagtaatacttcacacttgctcatgatgaatataaaattgcagaaagcagctaagcaaggaattgttcaatctgaagtgcaaagagttcatagcttcgataatcctactacttcaagctcagttgagaagaatagagaaagtgattccacttcctcagattatacttcccaacagattgaaccagcaataagaacaatccaaaaacggttaagcaaggatgctttagtttttgaatcatgtgttttagagaatgataaatccatatggattcttgattctggatctacaaaccatgtcagttgttcattgcaattgcttgaaaactgaacttatttgaaaactagacagttgaaacttaaagttggtaatggcgaaatggttttggttagagctagaggaaaagccaaactca

SEQ ID NO: 144812 - DNA, 600 bp, Cannabis sativa
tcatatttagggtgttaaacaacagatttgtgagtagatctaagatcctggtaaaataaattccaacagttaacatttagccatgaccccagcacccaagttacacctagcgttgggcccagcgcttaggttgaaatattatcaaccttggatatttccaatcaacctctcaaaaagttgtatgggaattttttctatcatcaaaaataatgaagattcaagcgaacacagtgagaaaaaccacaaacccaagggccacaaagttgagcacagtgctcaggttgacttgatgctgggcactgcgccaaggttgacctagtgctgggcctagggcccaggtttacaatcaacctagtgcgctgttttccattattcaaatgtaaaatttgattcgaacattctcttcagaatggtcaaaattaaggtaagagagcacatccttaagcttaagatatttgttctatggtactaaattaggtacacaggggaagatttttgtatgatctgattattattgtaccatataccaatggatctccacatgtgtgtacattaaatcaaaataataagtaataagtttatgttggaaatattttacca

SEQ ID NO: 144813 - DNA, 599 bp, Cannabis sativa
aaaaaaaaaaaaaaaaactttgtcccctcatgattttttttttctttcgaatacagtcttatgaattggaaagggaaattttactattacaaagtggggaattggcgggggagtgttttctctgtctcaagttatgcattgtgtaatatataaacgcttaaattcaaaaaaaaaaattaatctttatttttttaacaaatttataaaaatattagaatttaggttaacttttagaaaaatactgttacatataaattttttcaaaaatactatatttataaaaaaaaaataacaaaatagaacaactaaaaaaaatagtgaaacaactaaaaaacaattgtagaacaactgtgaaaacttaacatagtacataatataaaacttacacagtatttttgaaaaaattccgccccacagtaaaaaagtaaaaaagttaaaaagttaaaaatttcagtatgtgatgtaaataatcctattttttattggaaatagggtggagaatcccctaatggaggcgaagacggggcgaaaaatcttctaataaaaaaataaaaatttacaataaaaatttaaatatataaaaatattaaactacataa

SEQ ID NO: 144814 - DNA, 543 bp, Cannabis sativa
cttaaagttctactaatcactttttgataagatatctctctgtggacacgaccgcccatgctacactacaacaaccgctttgtgaagacaagtttgggcgtaatcaaatgctatggttcgataatctttggtgtaagcagggccttctttcttagggatgagcacaaaggatgtgtcattcataaagtgaggcagagaaccatggttgaagaagtatgtcaccatctcaatcaggtcttctttcacggtgtcccagtgatgagagtcgaagctagggggaagaccattcgggcctggagccttatccctgcccatctcattcaacgcagcagcaatctcttcagccgaggggattgtggtgagatcgcagcactcctgtgttgaaatacaggggttaaaaattctgctagatgggggcattccagaaggggcatttcgggtgaacagctgggaaaagttctcaataaacactttggcaatttccttaggctctcttatccaaatcccatcatcactccttttaatgcattggatatagttcct

SEQ ID NO: 144815 - DNA, 545 bp, Cannabis sativa
tgattatatgaaatgagttttatttagggcacaaaacccaacagtcatcaccgtggaatgtaggggctccccctgacaataagtgctagctctatcgtcccctgtggttgaatcgagtctctggtgaacccatatatcggtgatgcgtagggtttgagatccccaaggcccaaccccatattcctcaaggcagtgaagtataggatatctactagactcccattatcaaccaatgtctggtgtaccctggtgttagccatttaaactgtaagcactagtggatcattgtgtgggaaatgtatccctcttgtgtcttcctctataaaggtgacaggggtgttttcccctttgaagttcttcacaggtctttgcttcaagctctaggagtgaggttctcaccttacctctcgagcgtacttgtctctccctctttgagttttgcctcctacgcaaggccctcctatgattgttctgatgtcttccaccgctttggggactttgtctgtaacgccctaaataattaggcacgctacccaaaatgctta

SEQ ID NO: 144816 - DNA, 980 bp, Cannabis sativa
  modified_base (252)..(255): a, c, t, g, unknown or other
gagagacctgccggtgctggcgatggcagctatgggcgaatgggaagaggccacgtggctgccttatctgttgggagagagggatttgggccaattgggtcttatttcttggattgttttggctcttcaaaaatgccaattttcatagttttggacttttatttctgccattttttttttcttttcttttcttttaataatgctatttttttttatccaaacaacaaacaaaattaaatccaaacaaaatannnncaacataaaatatatcacaataattttaaagaaaatatttatttaaaacctaattagtttgtatatctttagataaaaacaatgcatttccttaactttttatttctttttctctatcatgtcataaatactaactattatttataaacaaagataaaattaaatctaaataaaatattttcaacataataatatattgcattaatttcttgaaaatattattaaaaaattaatttttttttttttgtatttttgtcatataaaatatgtaatattttggcatttaacagtagacccaaaatcaacaatctaaatgaatttatcattctctgaaacacatgattcaaaatttaaagcattaccattgttcttagtgttgagaagtctgggacaatttgatttaaaatgtcccttctgttcacaattagaatattgaataatatgtctgcttgactgttcttggattattcttattgatggttcaatctgttgtgaatgataatctgaggaagtggaatcactttctctatttttctcaattgagcctgaactagtaggattgtcggaggaatcattctcaatatcttcagctttctgtttgcctttatctgtattactggagaaggacatccatgcaagtgacaatgtccgttcataagcacgcaattcagcgtccaacttgtctatgtcgaacgagttccaattgttaatcacaagttggttaa

SEQ ID NO: 144817 - DNA, 889 bp, Cannabis sativa
ggtttctcgttaatacactaagtagcagttcgtacattgattcctcgcctaagaccttacggtcagcgggttacaaatatactctagtacttacgcaattaatgagtttaaccataaaaaagatctggatttcatccctttatcttaacacgtgtcctccagccgaatttcgggtataacacatattataagtgtaaatatttaaaattaaatatttaagaaaagtataaatattaatattaattataattaataatatataaattttattatacataattataataatattttactgtaatatatataacaatatataataataataataaacttataaataataataatttacaaaaagttttttattgtttctttttaaagtaacgtcaattatatttttatttaaatatatataataattattacttttataataatatgtaatatatatagttgtaatattataataactagaaataataaaattataaaatataactactagaagaattgtactaacttggattaaagtagtttttcttattggagttcctcgacaatggcgccaaaaacttgttgtgataaaaaatattatgttttacatttattaactcgcaagcgcacgaatctttattgtagtatagaaattgtgaaggacgaggttgaacccatgaaaattgcgtgagatcaaaaaaaattacttatttaatttaaacagttaaaactctaatctaatttcaaaaatggtgaggtttttggtaataaaataaaagaaagtattttaacgataaaaatgacagtaacagatatttttaatcatatttagggatattattaagggttcagaatccacttaagtgtatataaaatatttatgtttatattg

SEQ ID NO: 144818 - DNA, 756 bp, Cannabis sativa
gaataattagaacagttttctcttccataatgctatttgacagaccaacacaagacaagaaagcatacaagaaggagaacgtgttcgcgaagagaactttctcgacacgactgaaattcctagtggagagttcaacggctgggccgaaagatctagagatgtgaagaagcttcaatggaagtttggaggaaatgatagtgtggtgttttgggatgtcatcggagcaaccaagaacagcaagtattccacacattttgaattgaaattttttggttatggaaatagaagaagacaaaggtggcaggagtggaaataagggagaagagcaacacataaaccattttcaaattaacccataatgtcggtttaacacaacaacaaacactataaaaaaacaaaaaaaaaaaaaaaactccatgaacaaccaaaaaaacttcataaaacacataaatgaaaatggaaaaaaaaaacctaacatctgaaaattaataaaatggaaagatagaagcaataccttgaggaaccaaaatcccaaatcgcaatgtggctgatttcgtcccaaaatcggtagccaaaaagcaaaaaaaaaacatgaataacaagaaataagaagaaggaagccgaacagaggagagagggaaaatgagagtgatataatgggcgatttatgaggtttataggtgttacttgaaaactgaaaaaggaagttaaaatggggaagcaaccatcacgtcaccatgattacatgcaaaaacc

SEQ ID NO: 144819 - DNA, 923 bp, Cannabis sativa
ttcagggccggccctgatgatggttgatgtagtggtgatttgaacatacatgaagtgatcagccttggaagagacaaagccaaagttgaaaatttatataaaaaaaaaacataacatcatacgtatatgttatttagagtagatattttagggttttttttaagcaaaaatagaataaaaagagaagagataaatagatattattagatgattagctttgtcttaattgtgttgtaaagttagttacacattctgttagcattctgttagttgttaagtctgttatcttcactgactctacttgtttgggtatatataccctcagctcttgtaaaaaggattttattcagtgaataaaggaacaataagactctgtctttttcattccaagactctgtttcttatatggtatcagaagaaaatgcctccatggccagaccatccacaagatctcaagatggtgttcccccatcaacaaacgacaacaactctgatattcctcctgatgttacctcagctcctcttgcccaaccagtacccacaatcgtcgaaaagctactgctcgatccagatctcagcttcatgatgaaatcgaaactcaatctccaagaattgaaacccagcttccagctcaagaacagagaaccagtaatcaccatatcaacgatgatgtctccagccctttcttcctcagctccggtgaccatcccggtcttgttctcgtgtctactgtcctcaatggtagcaattaccaatcgtggaaacgtggaattatgatggccctagctgcgaagaacaagcttcacttcatcgacgattctcttcctcggcctgaacctggtaacaatctcctaaactcttggcttcgctgtaacaatatggtgatgtcttggctagtaaatttttcggtgcacaaaattcat

SEQ ID NO: 144820 - DNA, 586 bp, Cannabis sativa
atacttgtgagtagatctaagagcctggtaaaataatttccaacacctaggttcaagtttgggtctgggtcgggtactaggtctcggtcgtagttcgttgtcagcatcggcgagctgctcacgtacctcaggaaccaatcggttcatgtaatgggcgagcatcttcttgcctttcttggcctctggttgcactggaaagggttgagtaggagcccgcatttgctcagatttgctcttggccagctcggatcaaccctttgattactcaggcttgttcgagcttcctcctcgagaatctttggtcttagtaacttctggagtaaaagggttcgtagcagttagctcttcggaaaggtcaataacctccccggcgggtgccttttccttgggaggggtcgcctcaccgcccttggatttcttggccggaggagatgagcttgagcttcatccaactctcttcttcagagcatcgagcatcttttgaggcatatctgcacgaaacaaaaacaacatggttagaggaaaaagacatcagaagcataaagcatagagctactttttgttgatgggctatcaactttaagtt

SEQ ID NO: 144821 - DNA, 538 bp, Cannabis sativa
ttttttgaatggaaaataaattttattaaccaacaaaatctgttaccaaacaatgtaacaactcggtaggaacagactccataccgaaggtacaaccaggaaataacacagaagctcttgcaaagttatgagctaccgcattagctgatcgtttaataaaataaatagaaacatgttttaactccaacatgagttgcttacattcaagaatgatttgtccaaacaacgaaagcatttttgttgaacttcgtattgcttgaacaaccactaaacaatctgtctcaatcgacgcatgttgccagtttttccttttaatccaactcagagcctcgcggactccgattgcttcagcaatttctggtgtagcagcccccgagaagaagtccattcggccttcaaccaagaagccgtggtgatcacgagctgccattcctaatccatagctggttcccccttcaaaaagagcagcgtcaacattgatcttgattctattttcacttggagcggaccatttctcaaccccatcacccgtctgaag

SEQ ID NO: 144822 - DNA, 1001 bp, Cannabis sativa
agtggctcccacattctccttcataaacctctgctaagattagtttaccctcctgcttcgttatgcactttaagtacggcccgtggtaagatcttctatataattggttctgaagtatagtgtatcttgacgccctcactacaatttttctcgcctgcttggggtccgatggcaacttatcatccttcaagtattcgaggattagctgtctccagtcttcaaatgtgtccgccgaaatttcagcgcacttaacttcttcctccgctgaaatactaggttccgagataaattcgaatggtattgtccttgtaatgtggaggggaaagaggaccccaagccggccaaggcgtcggcatgcatattttcttcacgagggatttggctaatttggaagtactcaaaagtcgtaatcaacttttttacttctactaaatacctagccatttttagttctttagcctcgaaatctcctttaacttgttgaactatcaactgagagtccgactggactaataccctttcagctcccatttccttaaccaattttatcccgtggatcagagcctcgtactcagcatcgttgttggtggctcaaaaacctaactttatagattgctctatcatttctccgtcaggcgatagcagtactatccccactctgctccctctgacatttgaggatccgtctaccttcccaatgccctcaatcgacgggagaagaaaccgaacagcagccaatcccttccggcggattctttctcagacgggacaggctctggagttatctcgaccaggaaatctgctaacgcctgtcccttaatagctgtccgaggtaggtattgtatgtcaaacgcgctcaattctaccgcccacttcatcagccttccggataccttaggtttgtacaagacccgttttagtgggaatgatgtcatgactgagattatgtggcattggaagtacggccgaagttttcttgctgatgtgactaaggcccatgc

SEQ ID NO: 144823 - DNA, 872 bp, Cannabis sativa
aaaaaaaaaaaaacaaaattccattttgtttgatgggatgagtgtgatgactaagaatggaaatggaggaacgaggaaggacttatttccatcgtcatcctcatattcgcattagccattttaatcctccttcctaccttatctcttcatatccctcatcaacggtggacttgtgaatcttcataaagaacttatttatttacaataataataattataaataaaatagtaaattacataaatttaaaatatcaactatctttttttttttttaggaaattgtctaattttattaatagtaatctgcaacctaattgagacatctctttcgttggaaatacaattaagattagaataaaaaaaaagtgtaaactatatctaattcttatatcttttaacaaaaaattaatttaaaaataaagtcagatgaaaaaattacaacatcataattaatcttattataagaacaactatattcaatttactttactgctcagaagacacaacaatagatttattgtagaaatttcattaaacttcttaacttgagcattcaattattgtactaagtacgtaaccgaactactagtaaacctttcagccgcaaataacttattgcatagataaaaaaaaaaaaaaatccacatagataacattaatcgctataacttaaacaactaacaaaacaatattttaaagacaaaactaatagctagcaagcaaaattataaacgcttaccaagcaacgtctaaactcaaagagggccaacgaatctggctaaaggatttaagagaaaaaatctaacatacaatgttataaaataatatagaatagatgagaagaaagaagaagaagatgaagagagaaagag

SEQ ID NO: 144824 - DNA, 1021 bp, Cannabis sativa
  modified_base (969)..(975): a, c, t, g, unknown or other
aatttgttgttgatattttgttatctgtatgttatttttatgaaaaatcgtaaaaatgtaaaaaaaaattatttaaatataaaaatgtaatttttttacaaaaaatgatatattatgtaattatcccatttaaattttattattattattattattatttttgagaaaaaggctattatattaattttagaaaaagtacataacagtcataagtggaggtggaaattcctctaacaaagaacaatcagtatccaccgtaagagcaaacttagccaaaacatgggcataagtattagcagatcgtttaacatgagtgacctgtactcgtgggaaaaaggataccaaatagttaacatcttttaatatagtatgaaaggtagaattacaaacatgagcagcttttaaaccttgaaccactaataaggaatctgtttcaattaaatcatcagataagccatggctgatgagccatttcagagtaagagcaagagctgtagcttccatctcttttggtttgaaacaccccttgatagattttaagaaagcagccctgatgtatccactaaagtctcacaaaacaacaccaataccaattagtccattagctttattgtaggatgcatcaatatttaacttaagtttgcctactggaggtgctatccaaggagctgcaggtgatgcatttggtgtggcagtagctgaagttatgtttggaacaacaatagagttagagctcattggtgtggcatgaacggtttggtattttgcaagataatcagttgcaaaaactagaattgcagcaagctgtttaggtgatttgccatggaattctgcattgcgctcgaaccagatactccaacaaagtgctaaatactgttcaaactctagtgttgatgtgttggccgagacatagagcaataattctttagatgtagatgttgtttgatatattttaccaggatctagatnnnnnnncaagtatgtttcattaacatcctcatatgaattctaaaacaatgaa

SEQ ID NO: 144825 - DNA, 2057 bp, Cannabis sativa
aagagttaattattgagcgcttcgccttgattacatacaatagggagattgggataattgactgcttcagctttatctgctggattaatagtttataatggaaattgaaattacattcattaatagaaattaagaatgattgtcaagggtagagaataacctttaactagtttctcatatcgtagtctcactataaatttgtttttttttattattgctattttattctaatcatcaaaacccctcttctaattcttgttatttgtgaataaatgaataaacatagtcctcgtgggatcgacccttacttacaattatactaaaataattagaagtattggaaataaatattagtaaatttgttgtggcttacgacaacatcacaaggcccaaaaggagagatatttaaccttaattaaacaattattattcattaaataattccaatactgattggacctaaataaaaactattaaaagtgatattttttattttagcaactagtccattttaattatcaaaactgaatgggctccctatatgcatctaggcccaaagcaaatatataggcacacactaatttggatggatcatatcatgttactaggtttatacacagatgaaataaaattataaaatttacatgttacaaattatttatttgaccaactgacaattgggctatggttaaaatcagatcattagatctgtcaacaagttaaccatagtaatttagatcaaatgataatagattttataaaacaagttttaatattaaacaatatataaaacacacatgcaacaaattgaatagttggttataggatttgtttaatttaaattaaataattaattaaattaatttttgaaaaattctaaataattaaatattattttcaaaaattaaataaaataaattaaataattaatttaaaattaaacctacaaatttgaaaaattaggtttttaacaaacctaaatatctattcaaaattatcaactaactttttaaaatttatgttatttttaaaagaaaataaaattaaatgtctaataaaataaaatgataaataaatatcatttatctaattttataatctaatttaaataaaataacaaaaatttgaaagttgacaaaatatctggttagtttttcaaaattatctagattatttttaaaaaatatatatcatattttaaatttcaaataaggtcattttattaaattatttaagtacataaaatatctcacttaaaatttaaaataagataaaataatcaatttgttttgagaaaaataaccaattaagcaacaaaagataaatattattcactttcaggttcaaaatctactaatataaaaaattaattaatctcaaattgataattagatctgacatttgaaaaatacaaatctacatacaaaattacataaaaaattcgaaattaattacttaaaaaatcatgaaatttttttaaaaaaaatttggatttggtacggatggtatgcattgcataccattcgcacgcgcatgaggaagggggttgtcgaggtttgccgcacatgtaccctgcaatgcaagaattctgcacgcatgtggggttgttcaaacaatcttgtgtgtgttttctcagacaaaagatgtccgaacacgcgtgttgacgagtgtcacctcgtgtccgcgcgcgtaattaggtcaccccatctcgatttttttccaatttaaaaaaatcataactaattcaaataaaatcaaaattaagttctgcaaaaaagtgaattacttaattttttccatactagctaaatcaaataattctagaacgtgaatcaaactattttcatcaataaacacaaagatcaacatgaatatattgggttttatgccctaaataaaactccattttaatgtaatatctattattcaatatcaataaagaaaaagaagtatttttcaactttttgtgtgtcagttggttcatgttatcaattacttgtctatttgatttataaattcatccaagcccttatcacatttatgttcttgtttattgt

SEQ ID NO: 144826 - DNA, 601 bp, Cannabis sativa
tttgatccaaacatagtggcgtgggggatcttgaatgtcaaggtcctttttctacattattttataacaattaaatgagtacaattacatgaaaaagcacattattagaaatcattaattacttaccacatcttcccttacgttcaccatttcactccaaccacttcgatgtctggattagatttttgccgaacgttccctttgcaccttactcaattcttacaatgtcaaaaaatacattagatacatgtacttgtatttaagagtttatcttagtacaaataaaattagcgtactcaaaatttaggagttagtcgactgtaaacgaatttcaaccaatcagtcaggtcaatttttagatgcttttcagggacatgtgccagtcgttgcacatccttctcttctaatgcgggcattataacgtcttttgtcattctattcttaaagtctttcattaacttcccagcaaggatcaaacaatcatgttttactcattcgccactatgaaacccgtctagtttgaaggaaaataaacacgattagagttaacatctgaattaataaaaaacaaatcaaaattctcacaaataaccgcttacct

SEQ ID NO: 144827 - DNA, 1327 bp, Cannabis sativa
attaaaataaaaaactaaaatattaaataaaactaacactacgtgccttggcacgtaacaatcacctagtatatatatatataaaggagagatatgagacaataacatggcactctagaatctctctaaaactacttttctcttctttccttaataatctcatttttaatattttaataaagtataaatctataaattaatattttactactatttaataaattttctataaaaatatctagcataaactaataatttttttttttaaaaaaaaaaacacactatagatatacttattatcattattattgttattattattagcggttttgaatcatatattttttaaatttatcaattatcttttttttttataaatttttattttgtgtgagaattaaatacaattcaatctatttttaaaagtgagtagttaattcattgtttaatttgttttatatacacaacaaatatattgaggtcaaacctagcatcatgttatataggtgagatatggcaataacaacactcttgaatgtaatgttgactacaagtgagatacggtaataaaaacagtttcgatattatatgataagtttgctataaatttatcaattcttataaaaattcgaggattcaaacctaacatcatgttatacaggtcgtgtatgcctttcattataataacgagatttggtaaatacgagttggatcagcctgtttgtacacacctaatttttcatacaaaattatatgaaaaattaaattaaaatttgatacaatttattacttagttgtcattaaataaaaatgatttattttttatatatataatttaaaatttcttcaacatccgctgcgaattatttactaatatatatatatatgtatatatatatataagagagagatatcaagtggtgacatatcactctaaaatctctctaaataactctttctattttttcccttattctttcaatttattattttttattaggtttataaaattatttcaaacttatttatctatatttttattttttttaaataaaaatatagatttttattatttttataaaaaaatatagatttttattatttttaaaaatctgaatattattataataattatattttaaaaacgtcaagtatacttaattctcattcacaatttgttttaattaaataatcaaacaaataaaattctacattgattttttttttcactctcacctatatattagggctgtacatcggtcggtttagtcggtttatactatatattttccaaccccacataaagatcgggttataaaattctgca

SEQ ID NO: 144828 - DNA, 984 bp, Cannabis sativa
tggtagtaaatctagatcctgataaaatatttccaacagcatgggtcatcacaaaagggtcaatgccgaccatatctacatgtgaccatgttaaaaggtataggttcgccgttagaaatcttattaataatgattttatttctggcacaaaacctttcccaatctttagttttctagctagagaagtgggatcaacctccacctcctccaactcttttacaagtccgaaattatttgtaggatccccaaagcgaggatctatgtctgtgtccccattttgggctggacttcattgccctttgctgggctcttccttagagcttttggcgggcatcttctccttcttggctttagacaaggctaagttgtaacagtgacaggcagattgttggtcttcccttaaacatcctatcccatgccttgttgggaatttcaagcagaggtggtagatggatgttactgccttcaggttgtatagggctggttagcatatcattgcattgaaagctgagggaacgtcaattacgacgaactgtgccattagagttttggtggtttgattttctccagcagtgaggggtaatctgatatagttgatgggtgcgattcgttggccgaagaagccacacaccacttgattgcaggttgccaaatcagtttgttggagccccatgtttttgtatgttgatttgaaaataatgttggaggaggctttattgtctcttggaatccaaaggtctccttttctgcctcttcgctgggtagcttggatcaacatttaaatgatggcagataatattagggccgatccctatcgtatcttcatggctccaggcgaattgatcctggttcgccttcaaaaaacttattagcttctatttaagctgctcgtctaggttcttcccaatgtatacacactttgtgggatttcctgggtcgagaataacctcttccaattcctcaataggtttctctcatcttgaa

SEQ ID NO: 144829 - DNA, 669 bp, Cannabis sativa
tgtactatattatgggcatggtaatatgttttaacttagtaaggatagacttgtaaattagtgaatatgtataatgagaatatcttatacatagaatgaactttgacgagtcatatacatgaaaatatcttcatttcaagataggaaaaagaaaaaatgaaaatatcttacagtgatatatgtatatactatatattacaggtcatgaatatactaattatggaaatttattctttcaagaatcttaatatgataatcatgaagggaggattttagctgctataagagtttcatataattattattatgataaaattactattgctagagattcttcttggacagacttagacatttgattaaattcaacgtatatttttggtgaataatcactaactaattatgccacttctaagatttaaatcaagtagatatttttagtgttataatatattcaaagtgtaaataagaacgaattttctttttttcattcattctttcttgatatatttatgggtcatttacaacaggttatgaaaatactaactagagtggatatcacctgccataagtgtaacatatgttgatactaataaccatacaagaaataaaataaggatctggacaccagaacaattgacttttagaaattaatgatgctttttacca

SEQ ID NO: 144830 - DNA, 632 bp, Cannabis sativa
  modified_base (514)..(516): a, c, t, g, unknown or other
caggaagggtcccaggcaagtatctagcacggttatgatttcaccccagcttgctgatcacatggttagattagatattgagttttttgtgagtaaacttaagaatttgacgctaaaatcaaatttgttggacagaattagagctacccagttagctgattcagagttagtaaagattcgagaagaagttttagctggtcaagctaaagacttcacagtgttaggtaatgggatgctattatacagaactcgagtttgcattctaaacaatgtggaacttagaaatgagattcttgaggaagctcataccactccttattcattgcatcgtggcaataccaaaatgtatcaagacttaaaaatcttctattgatggagcaagatgaagaaggatgtggtagaatatgtatctcggtgcttgacttgtcaacagattaaggctgaacatcaaagacttgtaggttgttgggttttgtgccctaaataaaacctattttaatataatcagatttannnattaataaagatcaaaaatcacatctcatgttgcatggttcacatggtttattttatgattatctttaatgtataaattctattaagtccacaacatatgtatttgttcatgatta

SEQ ID NO: 144831 - DNA, 572 bp, Cannabis sativa
  modified_base (220)..(223): a, c, t, g, unknown or other
ttgtctttgttatcttttttaatgaatacttcccttgttttgatagttatctgtgtaaactgttgtgttttttttagcttgttatttacttttaccaatgctttgtactggtatagttgcctttaagtgaccgagcagacttatgactctgggtcacttgcatttcacaagtatgattttcgtctgttcgattctttggattcaagcagacctttgtacnnnnttaatggtaaatttataacttgctaatagaatcgacacaatcaaaatttaaatagacatctttattcattcactggtcagaatagttttgttacagtagtaacttacattcatgaaagctattatatgatctaatccgatctttagctgaatttaaacaaaacaattgcacttataaaaagaaattgtactttcactggtggtcagtcgacctgagttcttaatcatttcatcaaaacctttgggcggggtccgactagaaggccatatacttacaagtaaatgttcttgctttttgtacttaaagtggtcatccgacctggtacattcattgataatactttctcaaa

SEQ ID NO: 144832 - DNA, 582 bp, Cannabis sativa
cctttgttacacatcttagcaacgaatggagaagcctcttctatacatctcttctgtacattacaccttctactatgaagtatcgtgcaacttttctcatcatctttcgagcatcgaatttgttttttggaagttctccagtgttgagataatttgctatgggtgtcatctagtttggcaccatacctatcattttgatttcttcttcacaggtgatgctgggttcctgcaagaattggattgggactatgttggccttattagttactgtgttcctcacaagtcgtgccaaggcatcattagttgtgttttcttcccttggaattcgcttgagggtgtaaccctggaattgtgcaagaaattctttaatcttgctaagataaaccataattttttctttctccacgtgccatgtattccctcccctgagacttgatttaccaccaactgtgaatcagtacagacttcaatgtatttagcatgtacctctggaggaagctttagtccagttatgagtgcttcgtactctacttcattgtgggacgctttgaacccaaacttgattgctccgtgcagaggttg

SEQ ID NO: 144833 - DNA, 1175 bp, Cannabis sativa
  modified_base (340)..(352): a, c, t, g, unknown or other
cttaataaaaaaattatatttaataaaagaaaatactaaaaaaatattagatttaaaaaaaatgaaagaatttgtattttttttattttttgcttaattaaaaaaaatttttaaaaaaagtttcagattaaaaaaaaaaaaagacgagagaatttatacttttttttttgcataataaaagaaatttgcatttaataatataaggggacttctatttgcaccccataaaatgataaatacactctattattaaaaaaaaaaaacttaaataatttttaaaaattactcttaatattttccgtaaatttttttccacgcattattttatgttaatttcaannnnnnnnnnnnntttattttcataattttttttatttttttttttgtaaatcatgtatattttttttatttttttctaagaaaatttcatataatttttatttttattttttatcataatatttaaaatataatttatttttaattgataggtatattttttaacaatatgaagtggaagataaaagttaaaaaacttagtacaattaatgatataaattttatataaaataaaaattactaaaataggatgtctttaaaaattttggaggtgtaaataatttttttttttgcttaataaatttataaatttgagaaatttaaaatttatagatttttaattagaggataattttagaaattagttatatttaaaaatttattgtgaaagttattcaaaaaaaatatctaaaagagaaaaattattagaggactaaaatactattagacaattatttttaattaaaatgtcattgaagaattcatttgggtctttaattaaaaattgttgcattttatttttatataagatttaggatttttaatttggagtctttaattatattagatttttatttattaaaataaaataaataaaataaattttgtaaggaaaatttaaaaggtataaatagaaaatgataaaaaaaaaaaaaaaaaacctaagtgaaaatctaatcccttctctctttcattctcccaatccccctctctctgccttctctttgtgcggcgtgacggtacaacaccaaagtcagccactgccggcgctagtggttcaactgaacccgaaaaccccaacccctctcccgcttccttctctctctctctctctc

SEQ ID NO: 144834 - DNA, 1040 bp, Cannabis sativa
tatatatattctcacgctatcttacctcgttccgtgctcaagtgtgccgatcagcctgagtggaaatgcagctcgacgttttacagggcccttggatgaaagcttcaccaactctgctaggaattccaaaaatcagcaagcaaaatcaaacctagactaggtccttgatgtttcgaaaatgagagagagaaggatattgatgaaatgaagatgaatttttctaatatttgtgtaaaaagaataaaacccctttacttaatagttaagttaatttcaactaacaataatcccacaacaagataaatccacctatcaaaagacctaaataaccctaaagtattaaaaccaaaataaccatatgcaccatgggcaaaatggtcaaaccaaaaccccaaaaattctaacacctccattatcaaacgatgatatcccgataataatttaaacataaaaacgcgactttctaaaggcccaacatcgctttccacaacttccgaacacaatcacagaaattggataatttacattagatagcataataacatatatgatattaaatatatttccaaaatatacatttcataattatcaattaatctcattcataaaccttaattatttaataattcaaagcattaatcatgtgtggtctttacaattatcccccgttaaaaagatttcaccctcgaaatctacctgaacaactcaggatgctgagccctcatatcagcctccaactcccaagtggcttcttccactttactgttcctccagagaactttaaccaacgctatggttttagttcgaaggaccttttccttcctatccagaatttgcaccggttgctcgtcatatgataggtcaggttgcaattccaatgcttcataactcaaaacgtgcattggatcagatacatactttctcagcatggaaacatgatatacattatgcacaactaacaatgatggaggtaaagccaatcgataagcaagttgcccaaccttttccagaatttcaaaaggtccaataaacctagggct

SEQ ID NO: 144835 - DNA, 690 bp, Cannabis sativa
ccttgaatactctattcatgaggtccataaaagttgcgggagcattggtcagcccaaaacacataactagaaattcataatttctatacctagtgcggaaatctatctttggaatggcctcctcttggattctcaactaatgatagcccgattagagatcaatctttcaaaagaccatcttcccctggagttgatcaaaaagatcatcaatcctaggtaaacgatacttgtttttgactgtcagtttattcaattcttggtagtctatacacatacacaaagatccatatttcttcttgacgaacagtacaggggctccccagggtgacacactaggacctgaaatccctatgtcaagcaatccctgaagctgaatttttaattctttaagttctgctggagccattctataaggggccttagaaaccggttttgctctaggtgtcaaatcaataacaaaatcaatttccctttgtggtggtaaacccggaagttcatcaggaaaaaaatctaagaattcctgaatcaccttgatgtcctctggctgaattgactcaggccgagtggtatccaataccacggccagaaacctaagacacccatcttgtaacacttctctgactgttagtattgaaattattgggatccgagatccctgaaccgatccaacaaaaacaaacggttcctcac

SEQ ID NO: 144836 - DNA, 1571 bp, Cannabis sativa
tctaaattctggtaaaataacttctaacaacttgtatcagagccacggtaatgatttactttaatgaaatatggatttaaaacgatatttgtatgatttagatgtcttcatgttagcttatgtgcttaattgatgaatgtttgtaaaacacaattttttgataaagaataattttattttcgttctagaaataattttatttggtttttatgaaactcaatttcaattaaaaatgagtgagatatgtcgattttaaattttggtgcattctttgtcgagcatggtgctcattcgcaccagtcactcggacaagaagggggtacacgcgtagattcagacaaaatcgtgtttgaatgcttagtcaagctcattcgcaccagtcactcggacacgaagcccgcgcgcccaaatgtcgcaagtgaccgagaattctcggtcaaggaggttacaacttcctctgtccgcgcgcatattgggctgcatgcagcctttcctgggcatacaagggtgctttgcacccaacatcgattttttggtgattttttcaccaaattttgatttttctaattttaaatccctacatatcaatataaaatataatttttaatatttgaacctaaatattaatttttgaaattaataatatttaattatattaatagtttattattaatttttgatattttgaagtttgaatttaaaaattaattattttatatttgaattatggttagattttaaaaatttattaacttattttataataagattagatattttaatataagatatattttaaattaaaagattgttattatccttttaatttgaaatattatattaagattatcttacataatagattaaataataataaatttgaaattaaccttgatatttttatagttatcctaaccataatatgttcaaattcataaattggttataaataatattataaatattcaaataacctagatatttttgtaaaaatttgaaaaagcttaatatttcaacatgtaatttagaaaattatcatttacttattattttattcttaaaataataattccctaaccatatctattttaaaatttatttatttgattattttaattttattaaattataagatcagaaaataatataaaaaatatctagttggttatttcatatcatttatcttattagatattcaatttaatttgatagaataattcaaataaaacctaaatattttaaaattagtttaaattttaaattttgaaaagatattttaggttgtttttaacaaccctaaattttcaaaattagttggttatttaagtgataatttaattataaaattaataaatatctcaattcaaatttgttacatgttattatttatttatgtaattgttaattcaaaactttttttaacaaacctattattttttttaatttaaattgctatgcttaacttcttgacaaatacaatgatctgattttaatcatagtccaattattaatatatcaaataaataatttgtaactggtaaattttgtaatttctttcatttgtgataaac

SEQ ID NO: 144837 - DNA, 567 bp, Cannabis sativa
ctcccctcaacaagaatctcgggggtgttgcccccgagtatggatttcatcactaaaggtggtcgacaaccttgtcacacccataagggactctcattgtcagtagctccttcgaatgttcaaatcccacaaaaggctaaaagtcagttgtcaatccacaaaaactgtgagatattatcataaaaatcaaacttcaactacctctaaaaatcaaggagacggttgaggtagctccgcgttggtcgcatctcctgaagcgagaagcaccaacccccctcctctatataaggggtcatccatgacctaggaggggaatccgcaatcttgaacacttagaaaaataaacacttctcattctttgcaatcaagagcctgttcttgacttttggaactcggatcaataaaacacaagggtaataggctattaccgacatccggggccaaatctctttaaattttactgccttttattaacatttattgcaaattctagtattattaactgcatttattattgtgattttagtttaaatctcatttattacgactccgcgtcggttggctaaa

SEQ ID NO: 144838 - DNA, 534 bp, Cannabis sativa
gagcagagagcgagagtggtggactgcaaaatcttgtgcgacaatgaaatactggtggattcggtgcgaagtcttggctcaggaaaagacgtcgattatgttgaagtctaacttcttctcccgttttttgatcataagttttttctttcttttttttttcttttaagtcttggggtgtactaaaaaatacctatttagtaaatgtgatggggtgtgattataaaaacaatatttaattgggataaacttagtaatagggtgtagttataagttttgggggtgtaaatataatctttcatagtaaaaagtcttaagtatgttcttgtatgaactagaccaaatatttgttatttagtattagttcaattaaggaaagaaaaattgaaaaacaattaaatatattctgaaatataagaagaggaactatagattagtttataaggagtatgtattaaaacctttaacggatctaatgttggttttcgttaattgttaattttaaaactaaaagttgtgcataaatttagattagat

SEQ ID NO: 144839 - DNA, 1353 bp, Cannabis sativa
aatagatgtgttttcttgtagtgagacccaagactacccggacctgaacccgaacccagatccacacctggacttagacccaagacctgaactcggacccggaccaggactaaagaccccgatcgggacttgggactcagacccaagacttgggtacctagaactagacttcaaacccgagacccgagtaccccagacctgagacccgaacacgggactcagacttggacccgaatccaaactcgggacctagatccagatttggatttggacccagactcgagacttgagtcccaaacccaaacccagactgggacccgaacccgaacctcacccatagttggtgttggggtggtgtttattgaaaatatattataattttatataatctattaatacaagtcaatactaaacataatattgtattaaataatactaacacaaaattaaaatagataaaaaaagtataaacttagatattaaaaaaagtcaggtcagatcagatccgatccgaataagtcgggtcaaatctgatctgatctgagcatctgatctaacgggatggggcgggacggatccttacagatttagatcaggtcaaatcatagtcgaatcagatccgacctcatccatttacactcctaattataccttacaagggtatttgacactatgggtgccctttaacattctcaatatagaaatgtaaattttatgccaaataccggtggcaatatgtaaattaatattgagtctcatacattttgatttaataaataatataaaaaaacctctaaccacttacaacaaaccacatcaatatagtgtgttgagtactatacaaaaatttaataacaatgctcgatataatattatatatatatatataactttcattttctaacttaattaatcaaactagcaaaggtctctagggttttatcatactccactccatgtgcatgttctgcctgacaacaaagataatattttgagaaatactaaaagacacgttaattggtgtttagcttttttttagtattatactgctattggtgtaattaagtatcaggtctcatataactatataacttaagaaaataatttttagaaaatatcactaaccaatcataggacactaccttttaaaagtactgaacatcactgatacccaatagcaatgctctaatattttctatcttcaggtaactatatttgccacatgtattattaatatagattaatatacaattattctagtgtcatatatatttagatatgaataaaaaaaaaggtattttggtctttggaaaaataaatttgaccaaaatcataattaggggactctttttt

SEQ ID NO: 144840 - DNA, 799 bp, Cannabis sativa
atatggtaagtagaaattatatgtggaaaaaataaagttaataaagattaatatataacaacatattatagtggaatggtctaaatattatatcttaataatattgattcccactcatgatatctcatgcaagtaaaatcacaacaaatgtttggattagattttattaatttagtggccatttgggttacattattggaaggcagaatttaatgtaattaattgctaagtaattagtcgatatgatcattcaaatgtccaagttgcaaaggtttgttgtgttcaatcaccaatttcattcttcttttgaccaaaccattatatacatatatatatagaaatgctaaaggcatcagtggtacctagcactatcttatgtgtcaatatcgttattggtccaactaagtatcaggtaccatatagtttaatataatagcttttagagagtatcgctacccaatcacaacgcaacatgtcgagaaggtgctaggcaccactgatgcttaataacaatgctcatatatatatatgagaaattaattaaattaaatcgattcaaattaagattttgttaattcaattaatttaatatagattgtaatagtatattattattagggtaaatagcagcataagtacccaaagttttgagtttttaagcggcataaattcaatgatttttattaatggcataagcatccaatgtttgtaaaactgtaatttttctctatttttatcagtacaaactccgttttaaatttattaaaagatttggaagtgactgatactacatattttc

SEQ ID NO: 144841 - DNA, 877 bp, Cannabis sativa
gtgttgttcaccttcaaatcaaggcagaagacctcatctttcaactcacaaacaactttgtataatgcgtcatttgttggttgcccaactgcactggattcaaaacttggtactagcacatatgtgtctgtcaatttcacctgcttagtacaccaaaaaaattagttagcatatctcccaaatcaaattctaacgcatcagaaaattgaagtagtaaatgtaccttttcacttgtgtgaccaccgtggtctcaaatccacttgtacactgatttgcactgttttgtggtccaaaagtcaactggagccacagtgcggtccacgtgactagcagtccaatcaacatgagtcaaatatacaagttgccaccaaacaaaaatgcatacatctattagcaccgcagtacacgagagaataaaattactaccatcacaataattcaaaaacttacctgtaaaaatatggtgcagctggatacatttttcgtgttcttagtcttgtaccgctgtagagagctcataagatatcgaaagctagcagtcgcccaattcttctttttaattgaccttgtatcaactaaagagtgcatatagctagtgctgatttcggtaccattcttgggcagcaagacagttccaatacaaacaagcacaaacttaatgagaaacaggtaatcgctctcgctgctttccttcagctcattctccgacaaagttagagaaaacctatagtccttggcctttaaaattttgtcaaactcaaggtggtcacagtcattttctgttgccacaggttctcccccatccctgattcccatgacatcctcaaacagcttggaggatagttgaatcgttcttccaaatatctccagccgagaa

SEQ ID NO: 144842 - DNA, 558 bp, Cannabis sativa
tttctcactctagaaattttagtcccatacttagcaagttttcttgtaattttgtgagaaataaaaactcaaagtagatgtaactatattatcatcgcgacatggagagtgaactactattaattttgtgtctctttatattattcacttaaattcattattcatctcaccaaactagtgagtttgtattatttatttttcaacatcaacatatatacttatatatatagcttaaaatatatttgcacgtgaaattttactccatcttttatatagaaaattaagtataagttttcccattagtgtattaagtgacacctcttatacatacacttcaagtttctatatagctatcatatagcggtattttttagttatcattaaagtaaaaactacatttaacaagtagaagataatttttaagttattgtttgttaatatacattgaaaaagatattattgtaaattttagtataaatgttggattttatgccctaaataaaacttcattttaatgtaatccattttattcaatatcaataaagaaacagaaatatt

SEQ ID NO: 144843 - DNA, 1297 bp, Cannabis sativa
tggctcatgtgaaatttccttccattaactaaactagattttcaactccaaaaactctgacaattaattaggatgctcatcttttcaaacaatgtactgatacaaactaacttcaatattgaaataatgtcataattgtttcagtccatcgaatcagtccaccaactaatagccaatatgcttgcatgcttaccactctccactaatgttgacaacattcttttcggaatcaaaaggactttttaggtaagaattttacgacttagatattcagaaaatacaagacatttttggctaaagatatcataagcacaatagaacctacaaacgtctcataatttaaaatttccagaagtattcccacaactaacaatgattgagatttttctatttttctttcaatcaccggacatcactgaaatttttctttatttctgattttttttcttcattcatttttttttcaagtaatgccgagttacaatttttctcttttctcttttttttttcacatgtttctcaatcacacaagattattgtttccttttcttcaacacttccacacactttatttttcactcccccaaacttattgtacggcttatgataccattcaaaatataataaggacaaaaataatagtgtggatacatattttagtttaatgggtgaagaaacgaaacagttttaggctcaaaggattcactaaggatattcattttatggtaggcttgaaaggctcaaactatccaaacaaactacctaaatcatgttcctattaaattctgttaaggatttcgcctcaagagaataaggcatgcaagttctaagctattcaaccagtcttaccacaaaccacagtaaaacaattataacatatttcacagatcgtcaattgcatccatacacaggctttacaagcatccaaactaatccgaaaagttaaaagaattaagcacacagtttcaaaatttcaagacatatcacaattaacaaatgcacacaactatattcagtttatttaatcgactaacaaccaaacaaaaagactaaactaaaacaaaataactaaaaagaacagaataactaaaacaattaatttttttaagcccctccccaagacatagaatacacattgtccccaatgtgtcatgcaaaacaaggaaagggagacttacctgcacccccatcagaaggggttggacctcaataatgattcaaattggatcaagtccaccccttgcatccaatagagccctcgtaccgaatgacgaaaaattgacctccaatattgtta

SEQ ID NO: 144844 - DNA, 1023 bp, Cannabis sativa
tagcatatatttaatcaatctcttattttagtccttgtattattttacaatagagttgtaataaatcttgattttcttccattgttataaaatctctaacatattataaattaataagagatttatatatattgcgtgtggatgtttaattgtatatgatatagtataataaacacaaaatttgtaacatttgaggagttactgggatttgtaacttataaactaaacttaataatacgtaattaaaaaaataattatatttgagggttagaaggcatgtgaagaaagtttttagctcttagaaaaatgatgaaatattcatttattttatatgagaacgttggtgtatcgttgaagagattcaaaactcaaaattggagttgaagaaacgtttcaggtgatatgttgcctcttactaggcaacatggtagcttttttgacgtgaaacaatgtatcccgaaggttcaaatgttttgttccaagcaacatgtcgcctggtgccaagcgacatattgcatggagccttttttgggataaaaattgtgaaacggaaagcattcaatgggacaaattttcacactttactccaacatttttttgccctgcagatctctcttataggactggtaactgccattggtatgtgggatttgtgttttaaaatttggttcttccttacactataaatagaggctttcgttcacctttgtggatacactacttttctatctttaaacactaagctaaaaaattatttgagacttgtttatttccataaatccataagtgttggtggtagaggaaataaactttttagacaaaggtgctaaactttgttcaagttattggtgatcccccttcattcactttgtgttcttcttcatcttattgttgtatatatactatactaacttctcttaggtcatctccaatggtaaaactcaaatttggtgttaaattaacaccaaaaaattattattttagcactaaatttttttccaattctaaccacaacactaaaaa

SEQ ID NO: 144845 - DNA, 687 bp, Cannabis sativa
cctggtggatttcggtgcagtcacatcgattaggcacttgtgtctgaaattccctactcaggaggctgggataggaaccgtaagaggaaaccagggagaagccaggctgtgttacaacgttgctgcgcccacctacccgttctaatggtatgtgaagttattgagccaggaatggcgaaagaagatgagttggatccccatgtgggatccgaaaaaattatagaacccatggaggatgtcgaggaagtatcggtgtgtgaccttgaccccaccaaggtgctccggctaggaaaaagtctagagccggaggagaaagaaaaaataataaagacgctaaaggctgccacggatgtttttgcttggtgtcaagaggacatgaccggtataagcccccacgtcataacccacgtccttaacgtcaacccggacatgccaccgattcaacagaaaagacgccccctcgacttggtaaagacagaagccctagagaaagaggtggataaattactaaccagtggcatgatccgagacgtttattacccagaatggctggctaatctggtgttggtaccaaaagcaatgggacatggtgggtttgtatagattttactaatctaaacaaagcatgcccaaaagactgttttcccttgccaagaatcgactagatggtggatgccacctccagat

SEQ ID NO: 144846 - DNA, 1122 bp, Cannabis sativa
gcataaaacccaacacttttgtgtttttgcaaatttctttagttaactttttttatgacgttgcttgttttactttgttgtagatggtgatacccctattggataccgagagtgctccacactggtatgcagcgaatctaatcatggataatgcaacagtggaaatcagagatttgttgtcttctgcaatgcataagaggtcacgtcggaacgcttgcctagagatggtatacacgtgtgtacatagtttgttgttctattattgtaattgcaaccatctcagctataatggttttttttttttgcagctgaacactttggacctattgttcgcctctgtgaagccagcaaacctcaaatttggctaattctgaattatttcttctggcagtgactacccatagcaaaaaatgggcacgattgtaggatttttgtaatgaatggttgagggtaatgaaacaatggaagaggtaatttaatgttattttcattagtttagttttcatgtatttaagtatgtgtttataactaaattgaagcattaatctatgttgtgttgatttgtttttatgcatttcatcgtcatgtgttatttattgaattggatcccaaatgtattgtcagtttgatcctattgaagccagactggagtgtgttgggaaaattgtgacccacgagagtaacaaggctaaagctgcggttatggagggagtcaagaatcaatttgaaatgaccaaagctcttccatcagcatccacaacaaaaccagtacttagtccatctaggtctcctcgagacccccgattcagcacagagaaggctaggtccgagaacatgtggactgggaagagcaagtctcccaaaacccgtcattctaaaaggctggcatcaagtaacaagtagtaacattcatggttcacaaacactattgtagctatatttcatacaactgttacaaaagttaggttttagttcataagttatatttaggtatgttatatattgcataagcttgttggaacaatttgcatcatactactgttaggtgatttggaattgcactaatgttggtgattagcatttactatatggtgattattagttagagttgtggtagttttt

SEQ ID NO: 144847 - DNA, 536 bp, Cannabis sativa
  modified_base (405)..(407): a, c, t, g, unknown or other
ctatatattcgacctccatgggtgaatctgcaatacaggtttgcttaatgcttctctagagtatagatccacaaccaagagtgaatgctgacccagatatcgattttcgactatctttgtctaattgaaaattagaatcagcatatccagtaggatttaactctccaccaaaatatacatgcatgagatctccctttctcctaagatacttaagaatgttctttatagctatccaatgttccaaacctagattagattggtaacgactaacaatccctacaacaaagtatatgttaggccttgtacacaacattgcatacattaagatcccaactattaatgaataagggtactttcccatgtctccttctcttgagaagtctttggacattgatccttgcatannntaattccatgtgtggatggtaactgtgttcgaagttattctaccaagatctaggtttactaacatgtatgttgattattaactataatctaacacgataaatatgactctcctaatatgatgaaataaa

SEQ ID NO: 144848 - DNA, 652 bp, Cannabis sativa
tggtaaaataattccaacaggcagaggccgcaattgtcagaagatggttgtacttggaagtgttcgcatgcgagttttatttgatccacatagaagcgctgaggcagttgagtgggatgtgtgggcttgtaaaagcgccaaagggcgtaggtcacacaaaggcatcgacagagatgcacagttgtggaatgaatgcatcaaagaagcccgcagggctgagaagaccgagcacaagcgttgagatggcgctagagtttgtgtggaggccagagggctgtgccagtgagacttagtagtcatatgagcctgtgaaggtcaagaagggtgctatagtttagatgaataccagagggctgcatcattggaacttagtacattgtgggagccggaagggagtgatgtaagtgtgaatcagttagatggttgagcggacattgcatgcatatggaaattgacaggggtgctatttgagatagctgacttgagagtcacatcctgcgggatgcacttttagatggtgtgcatgaagagttggggcggtcaggaattttcgtgtaggcatgttgtcgaggacgccaacaaatgaagtgggggagagaccttcacggttcactcaacagactagttgttcattacaagcatcaagatgagt

SEQ ID NO: 144849 - DNA, 723 bp, Cannabis sativa
gagttgttatgtataaaatcatttcgcactttccagatggtttcgacaacaatcgaagcatacaggaaaacttcttccactcggatccccctagaatttaagtttcatataaatttgacccaatcccacattcgaatcccagtattgcaaataggatagatgccccaaggtgaagatcgccataagtgcatcgccacatcgcaggacaagaaaaggtgttccatggattcctcccctaagccacataaagggcaacatgtgtcctcaatgtggaatcgcctaccaatcacagatctaacagggagtgcattggataggatgcaccaccacaggatcttatgcctttctaatattctactgttccacaacttgttccaaagtgccggagctacctcacaatgatgagctctttcgagagcttgagacagataagcagatatgcttgtaaactggccacttttatccagtgtccaaacccatctatcctccccttggccagagggttttccccctttagcgattgcggacactgtttcttgatcaaataaaccattcagctttgggatatcccaatctccattctcaagcaataggtcatccacacataaatcattgggtaagaccccgccctttggtttcgggataaaacctttcaggtgaggaatccagggatccctccaaatgctagtcgcccttccatttgttaccactttacaagccccc

SEQ ID NO: 144850 - DNA, 579 bp, Cannabis sativa
gtgcttattgcaatacaagcatactggagtcagattgtgattatgccaaaagaaattctgaagtccattgaagatatttgcagagcttttttatggaaagggtaggctgttttccatggggcaagggctgtcgcttgggataatgtttgtcaacctaaatcttcagggggattagggatcaaaaagctggagctttggaacaaagcagcaatctccaagtacatttgggctattgcaaataatcaagaaaacttatggcttagatgggtgaatagtgtatacataagagcttaaaactggtggggttacaacgcttctattcactctagttggtactggaagaagttggttaacctaagaaaccatatcagttctgttgctaatattgctgagtttaagagaaacaaatatagcataactgctgggtacaaaatgttcaacaatccacaagcaaggaaaacatggagtaaagaggtatgggctcgattgaatacaccaaaacatagtgttattttctggcttactatgcttaacagattaaaaacaaaagataggctagtgcaaatgggcattaaggtt

SEQ ID NO: 144851 - DNA, 974 bp, Cannabis sativa
gtcccggacctggtcccagacccaaactaggactgagaatcaaacccgaacccgaacccgaacttgggactcgatcctagacctagagcaagcccatatttgagactgggattcggacttagacatggacatggacacgaacccagacccaaaaccgaataccgacctagacttggacgaggatcgaaacacgggacctagactcggacctagacgtagacccaaacccgaacctagcacctgaacgcagacctggacccatcctaggatctgaaaaacttgtaccaggactcgaactaagactcggaccccgaccccaacctacacccagaccctgacctagaaccaaactcggacccagaattagaactggaactatgattaggacctgaacctgagacatgaacctaacctaaaccataacccaaactcggagtagaacctagactgagaccttgactaggactcggacctgagacttgggacctgaaccttgaccgggacctggacttgacctggtcctaaacctttgctgggacccaaaacaggatcaaaaccctgacaggggcccaaacccgaaccaggaccaagacagggaccgagacatggacccgaactcagaccgagtcctagactcaaaccaagactcgggacacaaacctaaacctggacccagaccaagacctaggaatccaacttggatggaagacctagattccagaaacaagacccaaatcggaacagggactcaaacctgaactaggacctcacctagacccaagaatccgaagtcagacccagactcagacccaaaacctgccccggacccaaaccaggacagaaacctagacacggaccatgaccaaaactcgaaattgaacacgaactgaaaattgcacccgaacttgggaccaaaactcaaacccagacctagaatcagacccaaacctagacctggacccaaacacaaactc

SEQ ID NO: 144852 - DNA, 1025 bp, Cannabis sativa
aaaaaaaaaaaaacccccccccccccccccccaaggaaacaaataagcaattaagccaagatttccaaaaaaaaaaaaaaaattaattaagatcttaaaaatcaattatgatcaataattaaacaaaatacaaagaataaaaaatcaaattttaagaaaaaactcatcgtcgaatagaaaggactctcacaatttttctaactatcactaatttatcaagtttttctcccaagacaaaaaaatcgttagcaatattggataatttttcataaaattcagacaatgattcattatcatatattctaagatcatcaaacctagtttgaagcattataaatttagatcgcttaacattagttgttccttcaaattgggtttgaggaatttgtcaagcatctttagcagattcacaagaagatataagtttaataaatccttcacctattccattaaatatagcatgtaaaattttactattgtaagtagatagcttatcatcttcagtagaccattcaaattcaggttttaacttagaattacctttagaatctgccgaaacaggatgggactattttgaaagaaatattctccatgctttctcatcttgagacttgataaatgtcctaattctaaccttccaataaggatagttagaatcattggagagtgtggacgaacaataacttccttctgtaaagggaaacatattgcaaaaatataagaaaacgttaaaagactacactaagagtttagtgtcccattttgataccaattgaaaatttgtgcttttgcaaatgccaatatattttctaaatttttgtaattaaaaaataacaataatgatgtatagcaacaaattggaatcttgtcacaacagaacacagattcgcagaatcaaaacagaataaaaaataaatagttcagaaattaaaaacttgacacaagagaattatacgtagtatcggtgttctttcaaacactcctagtccacgggaccacccccagagaatgaaatcaattaataa

SEQ ID NO: 144853 - DNA, 500 bp, Cannabis sativa
gaataccctattcataagatccataaaggccgcaagagcattagtcaatcggaatgacattaccagaaactcatagtgtccatatctggttctaaaagaagttttcggtatgtcctcctcttgaattctaagttgatgataaccagatcgcaaatcaatcttcgaaaatactgtctttccttgaagctgatcgaacagatcgtcgattctgggcaatgggtacttgttcttaattgtctgcttttttagttcccgataattaatacacattttgagggaaccatctttctttttcacaaacagaaccggagctccccaaggcaatacactgggtcggataaacccaatgtcaagcatcccctgaatttacaacttaagctccttgaatactactggagccatcctatatggagctttagaaacaggttcgactccaggtgccagatcaattacaaaatcaatctctcgctatggcagaaatcccggcaactcctcgggaa

SEQ ID NO: 144854 - DNA, 527 bp, Cannabis sativa
aaaatatgtctatttaaatattatttattttctgggatattacaactatcccccacttataggaatttcgtcctcgaaatttacctcaaaagctcgggatacaactcccggagctgcgactcaaactcccaagacgttgcttcaactttgctgttccgccacaacactttaactagcagaatagtcttgttccacaacaccttttcttttttgttcaaaaatctgtaccgattgtttctcatataacaagtctgtttgaaattcaatattctcccaactccgtatatggatttcttccactttgtacttctaaaaccttgaagcatatgttttaaactctaaataaaacagagagtatggctagctaataagctacccgaccttccctttctgaaaactcaaacggactgtttaacctgggacttaagtcccctttctaaccaatttctgaattttccctttcattggaaccacctgaagaaagatagaattcccaacttgaaatttaatatttctacacttaagat

SEQ ID NO: 144855 - DNA, 504 bp, Cannabis sativa
atagtcccaacaaaacaaggaaggcatcatagcagacatggcaagaagtgtcagtagctacccaccacccttcagatccaccaatgaagttgatctctaaaatcatagctataactggcagctcttcaatcaaattagcttgtggagcaaaactaggcatgttcttacactttcgtgtcatatgacatggcttgttatagctgtaacacatgaaaaaaccaaaattatttctattagggggtacttccaacctattaattttgttctttgatggttccaactctaattgttattattagtatgagattgactgttgcggttcagattcactttgcaattcaaattcttaaaattgttcctattgggtttcagaatagtagtgaatcttttattagtgatgttgttgtttccaacaacaagctgttgcattttatgacctaaataaaactccatttcaatgtaatctattttatttaacatcaataaagaaacagaagtatgttt

SEQ ID NO: 144856 - DNA, 768 bp, Cannabis sativa
atctttagatttacactaaaatatatgtattcattagtaaaataaataagttagtgcatatatttaaaattatgtgcatgtgttaatgtgaataagaataatttttctagtgtttttattataaaacaaataaaatacaccaactcaatatattactaaaaaagattaaaaaattagaagtttgtatctttttttaatattactaaaaaattaatatatatatatattatacattataattttttaaaaatatatataattaagtgcgaattggattggagcagttactttttgaggtcaaacaacatccaatctgcacaagtgcggattttagatctttcaatccaatccaatccgcgcaagtgcggatattcgcattttgtaaattggattggatcgtacagattagattggatcagatatttagtgaacaccagttctgtcttcttttctggtctattaactcaatatggtaataaataaataaataaattaagtttcttagttttacagaaagaaaaatataactcaattcggtcagaaaaaattatgaatgtgtaatatttcataatttgatttaattttgtaatatcttccctgtttatatgcagtggcgaagccacatggggtcatgtggggcacatgaccccactcaaatttttataaattacaattttatacaatttttttttgggccaagatgcaaaatggctctaaatctaataattaagttaataaatgtcccttttttaaaaaaattaacaaaat

SEQ ID NO: 144857 - DNA, 671 bp, Cannabis sativa
  modified_base (90)..(94): a, c, t, g, unknown or other
gccattgctctatattctgattcagcactggatctagacacaccattttgtttcttactcttccaagagatcagattgcccccaacaaannnnnaatatcctgaagtggatcgtctattttccttagagcccacccaatctgcatcagagaaacactcaatctaggtatgtccatgatccacataaattatacctcatcctaatgctcctttcaagtaacataaaatttgttttagtgccgcccaacgatgaattgttggagaagacataaactgactaatcacactaactgggaatgcaatatctggacgagtcacaattagataattcaactttccatccaatctacggtatttctcaagatcttcaaatggttccccgtcatgtgtaagatgcacagtaggattcattggagcagtacaaggttttgctccctattttcctgtctcagttaacaaatcaagtacatacttcctttgagatagaaaaataccttttttactccgagtaacttcaatacctaagaaataattgagctcccctaaatccttcgtgtgaaatggggtatgaatgaaagacttaagggatgagatgcctttagtatcatttctagtaataacgatgtcgtcaacatacactactaagaaaatgatgccagtagttgatctttt

SEQ ID NO: 144858 - DNA, 1099 bp, Cannabis sativa
  modified_base (1031)..(1036): a, c, t, g, unknown or other
tacacagttcttaccttctttccagattcaagtgtgctgtccgacttgaacggaaagtgtcgtgttagatggatgccctaatcacataatgaagccgggtgaatcacatgatgaaaaccttaatccgggaaacctgaacccaccactctaggttctgttatactctttagggataacactaactcagaaaatagagaaacacccaacaacgacacagaaatggacaagaattgagaaaatagctagcttattcggggatcctgccaaaatcggctagccagttttacaggcctggcaaatcggctagccggtttgcactaggtttccccaaacgagccccaacttgctcaaaactcatccaagtgcttccatactttccagaacacctaaacaatgcatatacaacatattccaaccagaaaatcacaaaaaaacttagtgaatcaaattatgccattaaagacctaaacttaggtttctaaattcaaacttgcataaatccaatctcaacacaaccaaatcagctactagaagctagaatcaactcaaattaactttaaaattcgaattgcaacttaacctaaccgtaatagccaccaataccaaaaatctcatactcaaccaaccttaaaattcaagaacaaaggaatagtgttacaagggcttaccttggcttgattctctctagatttcttgctgaaaacaccaagaatttgcagcaatctcccttactctagctggtttcgaaaagagagggaaggaaagagagagcttttctatttttttggttttcctctaattttctttagttggataaaggttaggaaaatcaattttccttgctgaaattaactttgctaggtgtcatataattaggcagccacctaactctcccctttaacaaatgactaaaatgccctttaacttaaaactaggatattttgaagattaggggtaaaatggtcaaattccataactccgctcaacttcgatattgtatttactctaaaaatatttcccactaagaaatnnnnnnctaaacttacccatgtgattaaaactagccatctatcgcattttccgttgtcgccgagcaaca

SEQ ID NO: 144859 - DNA, 645 bp, Cannabis sativa
  modified_base (347)..(357): a, c, t, g, unknown or other
ggtacccatagccctctgaagactaaccaaaaatttcgatgtaaacattggatccatgtctgaaacaatggatttaggagctccaaggagatgaactatctcctttacatattgtaacaccctaactaacttaggcatgctagcgtgattttcacgtactgtgcagctcgttgctaatcaacgagattgataaaaacatggttaattaaaattttcttatttaattaaaaacataaggtaatatatttataaaatcctgagatcccatttacaaaatacatttagaaaagcttgatattcatatacacaagttttgtcacctagcgactatacagcaaaagccctgnnnnnnnnnnngatcgtacgctccaggcctaatcaccccgacatgtacaatcttcatctactctctctctcacggctcctcggctttagcctaataatatcctaagtttaccaagcgcccatacacctgatcataaccctatcccggtatcccacacggtactaagtctagagcgttcatacaacaatactatcgactagggatggacatccaatccaatccaaccttttttttcctcatttgatccaatccaattagtaattggatttggaaaatcatcatccgatccaatccaatta

SEQ ID NO: 144860 - DNA, 637 bp, Cannabis sativa
  modified_base (580)..(587): a, c, t, g, unknown or other
gaggacgcattggtgtggtgggacatggtgtctatgatacacgatgtcaccacgatgacctgggaaaatttccaggaacttttcaatgcgacgtactataatgaggccgttagaagtgctaagagaaaagaatttactcacctgacccaaagggagaacgtgagcgttactgagtatacaacgcagtttgatcggttggcgaggttggcctagggaattgtgccagccgatttcagtaagaaggaaaataccttgacgtactgaatgtgaagattaaacatgatctgatgattactacagatgacaaaaccacctatgctgaaatggtggagaaggcactgtgagctgagggcgcagttgggtgcatgactgagtcagctaggactccagtgggtggcggggctcctacccctcatgcatcaggctatagcaggggaggtagtggttcggccatggaccagaaaaggaaagcatccactgcaactggtggctcgggtcagaacaagaggttttgagggaaccagagtcaaggcagtcatcagggtagttttgaggcccgatatacctatccagagtgccnnnnnnnnaaaaggcaccatctgggtgagtgtagagggcaggggtgcttccagtgtgg

SEQ ID NO: 144861 - DNA, 1000 bp, Cannabis sativa
aggcagttgataaaatcagagcgcaaatgctcatagctcagagcagacagaagagttatgcatatctaaagcgtcgggatattgatttttagatcggggatatgatacttctccaagtatcacctatgaagggcattaaatgctttggtcagaaaggaaaacttagcctgaggttcatttgaccttttaagatccttgagaggatagggcaagtagcatataggttggctatgcccacgttttgatgcttcggaaatatgtctcagacccgtcccgtattttaagttatgaagcattggaacttcagcctgatctatcatatgaggaacaaccagtgcaagtacttgacagaagagaaaatgtcttgagaaacaagacaattgcattaatcaaagtattatggaggaacagtaaagtagaagaggcaacttgggaactcgagacagatatgtaacagaaatatccggagttattcacataaattttaggacaaaatttctataaaggagagtataattataataccctaagattaaagaattagattagcaaaaccctaactagttaaacgtacaataatgtggaattatattattatataattcaataaatatgatttatatggataaatgacatgttaagatcccgttggtgagccagggcatttttcgtaattttgactcgagaagagtaaaatcgtaatttatatgatatatcgtgcttgtggactatatttttatatagtatgtttgttctgtctatctgtaggtattttctgacaactcggcgcgatatagtcacaatagggtattttgggccgaactgggttcgggacccaaaatgcatttttgggatttatttatggtataattttgataaatgagaaatctgaaatgcatgtattttgtatgtgtgattagaatgacaattttacccttagggggtgtttagaatgggttaatactaacaagggaatggtaatgtgaaacattaccttgtt

SEQ ID NO: 144862 - DNA, 694 bp, Cannabis sativa
gatgaaatcacgcctagtgtgcaagagactgggaataccagttcagcacccagccaaggcattcataacacaactgttccacctgccaccaacgttcgagtgaccattggggatgatactgagatgcaaaacctccgcgctactcttggactcatccaaggtcatactaacaccctacatcatgatcaggagaaactgcgtgctgcggtaaatcttgcgttcgaggaacaaagacgcatgtttgttgaatggagagacaaagagatggaagcgttaagggctcatcatagagagattgaaaattgtagtcagcaatctactgtgctaatacgaaaaagcctaccaaactgtcgggcaacaacccccgagtgtcatccccctgggtgaaacagacgaagatccagtgatgaatacttcccaaactataaatggtcacccgccaaatctctggtcacaagtttcgcctgtgggccaagaagtaggtgggcagaccttgtctagtaatttatcaggagaagtcatacccgatggttccaaccaggccaacggtgcaatttcacctgtcaaccaagtcaatcaatcgttgagacagctaggcgtttctgtattcaaaaggttagggactgttgcgatattttgcacacgcaagtgtacgtaccgtttcaagtagtagactcaccaggagtgaggtcga

SEQ ID NO: 144863 - DNA, 591 bp, Cannabis sativa
tcagaatctacttcaccattttcctgaatcaccataactctcttatttggacattggctagctatgtgtcctcgcccttaacatttgaaacactttatctcactagagcgaaatgaaagaggatgaactaggtttatcctctttctttgggaagattgacctccaaggttttgtatttggtctgtgtagacttggccttggctttgagctcgaactacccttcttgagttgtctttcaactttgattgccatgtgcaccggatcttccaattccacataattgtgtagttcaacgatattagcaatctctcgattcaatccattcaaaaaccttgccattgttgcctcccgattctcttccacatgtgctctaattatagccatctccatctccttgtaatactcatcagcactcttgtagcgttgacgaaaaccttacaacttgaggtacaagtctcgataatagtgagattgtacaaaacgtcgtctcattagcctcttcatagcctcccaagagtcaatatctcattctccattcctcctcctattgatgcacaactgatcccaccaaacaatagcatagtcagtaaa

SEQ ID NO: 144864 - DNA, 750 bp, Cannabis sativa
ccggttagccggtttgcaccaggtttcctccaagaattcatttcttgctcaaaactcatccaaataccaccaaaccttccagagaacctaaataatgcatatacaacacaatccaacaattaattcacagaaaaactcacagaattcaaatatgccattagagaccaatgtttaggtttctaagctcaaacttgcacaaaaccaattccatacaccaaaatcagctgctagaagctaaattcaactcaaataaaccgtacaattcgaactacacaaaaactaaaccctaataacccctagttttcaaaatgataaactcaacaaaaccttaaaattcaagaactaagaaatagtgatgctagggcctaccttggcttgattctctctgaatttattgctgaaaacatcaagaatcatcaacaattgccccttgttctaggctggttcgaagagagagggaagggaagagagtgttttcttgattttggcttatttcttctaattttctctaaatgaaaaggatttttaattaatcctttgctgaataaataattggtaggtgtcactaacctagacagccacctaactctccacttgacaaattacaagtatgccgtcataacctataacttagacatttttaagattaagggtaaaatggtcaaaaaccataccccactcaacctcggtattttattttctccaaaatttatcctactaagaaataaggttctaacttacccatgtgat

SEQ ID NO: 144865 - DNA, 619 bp, Cannabis sativa
attttaggtaaaggtttacatttataatgtcacacgacaaaaattatatttatattgtccttgctttttttttttcttttatattgtaaatactatcacataccatgtctctatcttccacacccacagagagaaccaccccaacaatacgagaacacccgaaaacaaccgaaaataaccattaattccgataagatggaacaaaagcagagaaatcgacgtcaaataaataatcatgacaaaataactgtaaaataacactaaaacaaattaaaaaacaaaagaaaaaaaggattaaaaaaactaaccatgttctgcacaacctcaacgccagatacaatagcggctatatttgcaagcccagtcctgaaaaatcataataaaaaaactactaaagcaacacaaaaataaatataaaacaatgaagcagatataaccacttaaaaaatataaaaaaaaacctcacccctcaaaattattttgccaatgagctcgtcaaatgtatttataggagaatctatataaaagaaaaatacaaaaacagtcatagagaaggaagaaaaaatgtatttaatggctctatcttccactcctacggatagaagcaccacagcaacac

SEQ ID NO: 144866 - DNA, 540 bp, Cannabis sativa
ttttctttcatattttaaattattatcccctatttttgtgggtctccacctataaaagaagagctccttagttcattttttatatttagaaaactacccacaaagtcatagcatttttctctaatttctctctctagaatatagagcttaaatacttagttccattactatcgcgacatggagagtaaactactataaattgtgtgtgtctctctattttttttttttttacttaaactcattattcatctcgccaatctagcgagctggtgttgaccacttttcagcgtcaataaaggatttttactctcctttctaactcatttcaaaattatgtatataccattgtgaattttcatttttttttcatagcatcgtttactatactcacaacatcatctttgtaaatttttaaaaaatttcaaataacttacaataccgaaaataaattaaagttttttaaatacgagtaataaattagaatatataaattctacttttgatattttaaactattcgaaatattttttcaaaatataa

SEQ ID NO: 144867 - DNA, 748 bp, Cannabis sativa
gaattggaagaaaaattgaatgatttgctatttaaagaggaagtgtattggaaacaaaggtccaaaatacaatggctacaagaaggagacgagaacactaaacttttccaccaaaaggcaaaaacaaggcaaaaaaacaaatattatcaaaggtatgattttcaagtaataattctttgatattagtatattgtttattaatttttataacatctaaagtaattgtagaaaagaaatcaaagtgtatagacaactatactgttgaggtgcaactcaaatatctataatataaaataaaattcttaaataattgcagtttaaagtaatcttctatgacatgttataggttttcaaaaatagttatgtctcttttctaaagttggtaataggttaatttatagaattacaatttgaaaatacgagtttttgtattagaatgtcttgataaatttgaaattgaagggatgggtttgaataaaaaagaggatgaatcttataatattattaagtatgtgcatcgatgtagtttggaattaattaccaaaattttttttctattaaaagtgaacttaagttcagtcagttcgttttttagttttgtattttatgaagtcaatcttgtaataggtgtaacaagtatttgaaaactagcataactcttttcaatagaaaaaacatgctaaactaaattatgggctatagaattaattaattaaataatattttaaagtttaagttttgtatccat

SEQ ID NO: 144868 - DNA, 694 bp, Cannabis sativa
aaggtggtcagggccatttacagtggtcaaagtgtttccttatggagcggtggaactgaaaggtgaaggccccaatactttcaaagttaacgggcagcgggtaaagctatacttgggagatcaatttgatcaagccaagtccgccataattctggcaccactatgaagaactcggttaacgtctagctgtgcgacgataaaggcaacgctaattgggaggcaacccaagttttctttatgttttagttgaattattttatgttttagttgttattttctcttctgttagttctagtcttgtttagaaactggaaaaacaattttggttttctttaaattttgtttgtactgtatagaaaaaaaaaagtagtaattttttgggtttggcccagtggctgcggcaagggagagtgccgccgcggccatataaactgggcagaaaggcttattttttcgtgcaatctggccgcggcgagtccatatctggccgcggcgaggtgagtcagacgggtttaaaaggggccaaacactacacaatttcaaacacactctcattcaaaatccctaactatcacctccgaaaatacctctcaaaccactttcttcttcatctaatcccattctaaacactttttcttcaattctaaccataaatcttcatcccaaatcattctaaaccattattcctctcatc

SEQ ID NO: 144869 - DNA, 567 bp, Cannabis sativa
aacccttatatgtttattttcattgttttagagaattcatatttaagatattaatcaacttacttgtaagtaaatctagatcatggtaaaatattcccaacattaacattatagcatatatactaatcatcaaatcattatattggattgtctctaaaaataatataatatacacatatattacatacatttgttctaacatggaaaaaggaataaaagtcatattgaaaaaattagtaactttataatttatagtgcagtgcagtttaaactacaattattaaattcaaactcgcaaatcgcatagcagcttgcagtttagtaaaaatataattattaatatgtggatatttcttacagataatgttctgctctcttttttccgacacccctcattaaattggttgataggtatttataacagttgtcaagaagaagaaaggtctcaattgtcttaagttcttgccttggctatgcacgaagtagggtatgcatcccctacgtagcaggttacgtagggtttaggtgagataagccatcattcttccttgattgatgtgattgttc

SEQ ID NO: 144870 - DNA, 1072 bp, Cannabis sativa
gtcctacttattgatgatattgttatatgagcacctgaagaaatagtcttggaatattctaaggctgcagtataaacacattattacataattgcaacaacttgatacacaaatataaagaagagaacaatggccatggcttttgttcttttttacctgttatatttatgtgtatgaatgaactttggataagaagatcataggctctttattgatatgtttgtctatgatgagtttcatatcaatttgggttggcagcaacaattctcataacaacaccagtagtatgtaccacaaacacaaagatccagcttcaggttcattctctttttcctcaaagagaattgagatcaccatgtccaccttaagcttgcttagttccacatgactctctttaaatgagatataaagatctcattatcttttttttaaaggtacaccaaacaaaaaaaaactcaaaaaagatagaatgataaattgtttagttttttaattaatttagtaagtttttaattatttttgaagttattagctttattttattgtaattttataaattttatgtgattttataattattttgtaataatatgttatgtgttatatatttgtaatattattttatctttttaataaatttatgtatttttaggtgttatttcgaatttcttaaaatttcgcaagatgtgttaaataagggtaaatattattttagattgtgttttgcaaaagttactgattggatcttctgtttcgttaaatgacaaaattgaccctgtatttttcaaaatagtataaatagaccctgagtttaatttttgataattttttttaatataacaacttgaagacaattcataatacgaatggatatagaaaatgtaaacagttttgtcataacacctttagatcggattagggtcttatttgtaccattttagaaaatacaagatctattttatcatttaacaaaacagagagtgcaattggtaacttttgcaaaacacagggttcaagattgtatttatctgttaaataaagggattatttcacaaaaacataaaaacaacaa

SEQ ID NO: 144871 - DNA, 506 bp, Cannabis sativa
tcttcttactttctccaaatgttagagtaaaaatgaaaaaaaaacaaaacataaactgtataaaagtttaaatatatgtctaatcgtatttttataaataaaatatataatttagaataaacttgtaaaaattccatataccccctttagaaaattgagaaaaaaaaaagcatactaaataaataaagaaaaaattacattcattatgactttttaaaacttcgttagaaaaatatggtaattttattttgtatcctataaaatttccatattttaatcttttttaaaaaagataatagtattactttttatgtcatatttttataaatattattaaatcttcagctcattgaggctagcccaagtgaccttaagatggtaggtgtgtgggaaattctaagttggagtactaaattatacattattataatatataaacgcttaaaggataaataccattttggaccatctgttttacaaaagttaccaattggaccttgtgtttt

SEQ ID NO: 144872 - DNA, 619 bp, Cannabis sativa
gaaagatacgaccatcaaaaggatattgttcttccaaccacacgtgatgaatggaacgatctacgtttccaagactttagaaaggtcaatgattataattcagcatgtccagaatcatttcttaattaaaattctatgggcgaaaaatcacagaagaggaaatgttagaaaaaaaaaacgtattttacattccatggatcaaatttaacattgcaacaacaatataggatgtgtaattttaagaaatattatgaacttattacatgtctccttgtagcagagaaaaataatgaactattaatgaagaatcatcaatcacgatctactgattcaatggcacttccagaagtaaatgccacacagacgaggtcgtggtcgtggccgaagccaaggaagagctcgtggttatggccaaggacgtggacgaaattgtaataattccttagaaagaaattctgaccaccaaaggaagagacaacatgcggatgagaatgttcatggtaactatcctcaaaatcctgaagatgcatgttacagatgtggtacaaaagggcattggtctcgtacatgtcatacgccgaaacacctttgtgattgttgtgataaatccaatacgcaa

SEQ ID NO: 144873 - DNA, 702 bp, Cannabis sativa
gggatatgctattcagatggcaactgaaattttaaatgttgttccatctaaatcagtccttaagacacctttagaattatggaatggtcatatacccagtttacgccattactcatgtcttaagaaagaaagatggcaaactagaaaagcgaactgaggtttgcatgtttgttacaaaattctaaggagattaggggtggagtattttatagtcacaaggatgatatagtattcgtttccacaaattccactttccttgaagatgactatattaagaattttaagccacaaagcaaagtagtattggaagaaatgctgttagatataactacaaccaatgttccatcgtcttctactcaagtagaggataatcccactaccttggttgaaccaacgcaagttgatacaattgagaaatctacaacaaatgttcatgttcaaaaggtcatgactcctcgtcgtggtgggagggtttccacaaaaccagctcataatggcttggatagtaaaatcaatatggttgttggtgatggtattgatgacgatccattaacctaaaaacattcaatggcaagacccaaattgaaacaatagccagctggcatggattccgtgaaaaagaataaactttgggaatatgtagatgcacttgatgattatcatccaattcgatgtaactggtctacaagaagaaaagaggtg

SEQ ID NO: 144874 - DNA, 665 bp, Cannabis sativa
gggaaagatttaaagatttattgctaaaatgtccacaccatggttttgagaaatggagattggtaaaatacttttatgatggattatctccctcaaactgaaaaatggtacaatcaatgcatactggaaaaattttgcaatttagaggggaagaggcttaggagtctcttgacaatctttctgtaaattctcaacagtggaattgccaagatcctagatcgaaagcttcaaacacacctaagagaggtgtaatttatgatgttaaagatgactactcctatactcctatacataggaatgaaatttgtccttatgctatagtacaagtcatagtgcccagtcctgtccatcattgcttatataccaagagggatttttctgaagaagtaaatgctcttcaaacttatgggaaattatctgatagcccattttctcagtcctacaatccaaattggagaaattccaatgaatcaagggcaccagtacaacacgcctaatcagagtcatgcctagcctcatatgccatatcctcaacaataaagcaatccatctttagaggataccctcaacagttcatgcaaaccacccaacaagctttacacacaaattctcaatccctgttaaagcttgaaacacaaatgggtcagcttgctactgctgtagct

SEQ ID NO: 144875 - DNA, 650 bp, Cannabis sativa
acaaaactattacgccaagtatatttatcatcctcaaaactgagaggatagagacaaaatttatctaaaaactgggcaaattggtccatatctttgtgattataataattactgccaattttatcatcaaaagataaaaaactattgaaatctcccataataaaccaagggagattgggagcattatagaaaatcttttcaagcagattccagataaccaaacgatgagaagaagagggagagccataaaaaccagtaaaataaaacatttcattatcttgaaattttatattacaatcaatatgattattagagaaagataaaatatttacataaacagttgctttccataaaagaaaaagtccactaccaaaatacttcctagggactttaaaaccattatcaaaacctaaagcaactctaaccctatcaatagccttcataggtaaatgagtttccatcaaaaaaacaacatcagggcagtgttctttaaccaacaggggagagcctcctgaatgcacgtgtactccccaatccacgtgcattccaactcaatatactcatttttctaggcgggtgtgcgaagcatcacccgcctgttccatatcagcaccttcaagggaagattcattttccctttcaccagagcg

SEQ ID NO: 144876 - DNA, 754 bp, Cannabis sativa
tctccataggctcccatttgatttactatttctttaattctagaatagtaatcttttgcaatctcattatccttcattttaagattctcaaaatctcttttaagcttttgtaatctaactgtgcgtacattaactgttccttagaactcctcctacagcgtgtcccatgcttcttttgcccttgttgcacccataattcgtgaaaaaagattttctgccatagcttgctgcaagcagtataatgcatgagaatcattttgttgattatcctccaatgccttcttttgatcttccgaaagagatgtaatatcttttagaatattgattccttcttcgacaattttccaaagattttgtgatcgaaaataggtcctcattttgatggaccaaaaattataattttcttcatggaaaattggaagaggtggagaagagcaattggactccaaactcatattgatgagcgtaaaagattacgcccagtgatatgatcaaacggagctttgataccactgatagtttgagaataaatttttattggttttgtttagaataggtagatatgtagttaatggtttgttgtggtaatgtagtaaagtagtgatgttgatgagtagttattgatttactatatgaaattagtttggcttggaagagagaattgtatgtaaagtagtaagctcttattgatagtttggaacttttggcttttggatgttggttgttacactagctcctcaacccaagcttggta

SEQ ID NO: 144877 - DNA, 645 bp, Cannabis sativa
tacccacatcaaccagtttcctttgcagatcaaaacttatgtgggtttgaagctcaagattcaatggctggaggtatttcgatccttattcgtagtgtatatatgtttgatttaaactcgcattttatacataaatatatatatatttcagtttatacatataaatgtctaatagaaataatatatattatgataagtatatgttatatgagatgatagtaacatacataatatattaattaacattaaatttagagattataatttatgcatgtgagttatatatattattggtatataataatatatgagtaactaatcatatttagtgtatatgataataataatagtgatgatgatagaaaatatgtattcattattttttgagaagaaagagttttggaattaattttccataagtgataattatctcatgagataagaaaagtgaactatgatagttacacttatgagatttgtcttgtcatagcaagaacaaatggatcaaaaatggttccaaacttgtaacaatatgtaataaattggaagagcaattttattagactcaaatcaaagtgaatcatggtatattcaaaaattgtgaaaagataacaaagttggaaaaacaattttgaatcttaaata

SEQ ID NO: 144878 - DNA, 530 bp, Cannabis sativa
atttaggaaatttccccatgaagcgtgcgagttagaataaagcacattggaaacacttggatcgttctgtagggccagttgtcagtttaggaagtagctaaagtggtgcactcttatataagagccattattccatgggtgtaagggacccaatgtagacttgaagcggggacattacaaggataacgtataaaagaacaccagggagagtagtgatatcactaaggtaaggaagattacctggattacatatggtgatactataatgatggaaaatacttttatattttaccggatggtaaatttggtaaatctggaaaatactgtaataatggtatttcttaaggtgtacggcgttccagctatttcctgtgtttctttcatctgctgctcggagtttgtatcctccttggccaactatctttgaaatctggtaatgcccctcccaattgggttctaatttgcctgctccttcttccttcgtgttttggaacactcgtcgtagtacccattctccttccttgaattgt

SEQ ID NO: 144879 - DNA, 929 bp, Cannabis sativa
  modified_base (753)..(754): a, c, t, g, unknown or other
aaaaaaaaacaattattaaaataaaaattttgatagtgccaaaataggctgtagagtaaaaaaaaaaattataattatatttttaattaatcaattataattatttctaaaaatttactataattgcattaaataatgtctacatagaaaaaaaataatcataatgtagaaaaattatgactaaatgtacaaaattaaattaatgaaactataaacaataaaacgattagcaataacaagattaacaaatcaaagaacaacactcaaatgtaaaacatgggcaaacagagtatgtaaaactaaaaaaaataataaatgcttaaagtaaaaaatcaacaccaagatatatactggttcaaattcgatagattgatttgatctatggctctactccagttaatacttctttattaataaagcaagaatatgtacaatacagtcgagacgagattctctgttgagttctcacaaagtgtttcaactctcacacttacagccaagaatcttcttcatctacaaaagattctttttacgaaaaacccccacacttaatctctctctttctctgcacctctctctacctctcaatcttctctctcaaactctcattctcatctctttgagttctcaaactcttgtcaatttcacactccttaaaatacctagacaaggtggtatttataggctaggattaagatcctaaagtcagcggctgtaagaaacgagattgttaagttagttagaaataactannttaaccaactcctctttgagcgaagtctccacgtcagcttaagtatcagagcctctaggaacatatacgtgcttctggactcatggaccaaggacactcgctaaagatgcttccagataggattaagtctgatgtagtcaactatctggatctaccattccaggagggacaacta

SEQ ID NO: 144880 - DNA, 564 bp, Cannabis sativa
ggaaggcatcctcgtgcaaagtgttctgctactcctcccgaagaatcttctttagggcctccacctcagcgtgtccccggctgtactcgtgtagggcgtagttgtgtttggcaacgtggagcatttgcctctcctcatccacaacgagctgggtcagcacaatgccgtgcgacatagtatactcctccgcttagggaggaatcttggagtcattgctcacagccggagtgtcccccctcctggtctgcttagaaggctcggtttcaaccatcttgcccttccgcttacgcgcgagggcagctgtagcctcgacctcatcttcctcgacttccccctcctcatctatcaagacgatcgtgcctgaaggggcattggacgaggacctcccgagggtcaccaactgggatggagctggaggcagagaggcgtcagggctatatgcctcggcaagagtagccaaaagattttccataatcctggctgctgcaacaaagaaataaacgaagtgttagaataatcatgagaaaggcgtgcgcccaacaagaaagcaataaaactagtcct

SEQ ID NO: 144881 - DNA, 624 bp, Cannabis sativa
gcctttagaaaattgtattttatgtaatttagaatattatcggggtattattgttagatataagaggcgttagaatttttggggtttggtatttgaccattttgcccttgggaggttataattactttatttagaaagaggggcatttaggtcctttcacctttttggcttgtagtgtacaatagaaaagcatgaaaagggatttcttgtgaaattaacttggaaatttcaaagcaaactccaattctttctctctctttccttcgaaccatcaacccagcaaggaggaggttattctttgctgaaattctctaaactctagcagattttgaacactttgaatcaaggtatatctttatagctttcctatttgagttttagttgagttttgggttgaagtaaatgaatttaggtttgaattgggagctgtgtgtgtgtgtgtttagtttgggttcataatctgaagttaaataatgattgttcatgttgttttgatctgaaattgagcctttgttgagtgttgttcaacttcaaagtttagggaagcttagtttggccattaatggtgattttataatttgagtagtttgttgtgatttgttgattggtatgtgattattggag

SEQ ID NO: 144882 - DNA, 1037 bp, Cannabis sativa
atagggaaaaacatggtggtttacgctaatgatatgttggtaaaatcaataaaaagtaaggatcatacctcagacctcgcgaaatgctttaagatattaaagaagtataacatgaagctaaacccgaaaaatgttcctttggagtttcctcaggaaagtttttgggattcatagttaatgcgaggggtattgaaacaaatcctgaaaaaatcaaggcattaataaacatgtcatcactgacaaagcctaaggaagtacaagcagtgacaggaagaatggttgcacttaacagattcattttgaagtcaactgataagtgtgtgccattttttaacatactgcgaggcaacaaaaagttcgagttgacaaaagagttcgaagaggccttttagaacataaaaaggcatctagcaatgccttcaattttagcgaaaccaataactggagagacgttgtttctctatttgtccatcacagaagatgcgattagtgcagctatagtgcgagaagagggcaagcaccagcaacctatctactatgtcagtaaaggttactaagggcaaaatccagatatcgccctctaaaaaaacacgcattgtgcctattccaagtgtctagaaagctacggccatacttccaggcccaccccataaaagtgataaccgattagcccttgagaaaagttttatcgaaaccagatgcttttggaagattgataaaatggtcgattgaactagggcagttcgacataacataccatcctcggacatccatcaagggccaagccttggctgacttcttgataaaaggcataactctagaagaaattctgcgagaggaataaaattatcaaaagcttctcgtcagtatccaggccttaggcaaatagacaagtggaagccgttaataaaaccttaaaagatactatcaagaagaagctagacgctgccaaaggcagatgggttgacgagctacctcaggtactctaggcctacataactaccgagaagacagccacgggacacactcctttctcg

SEQ ID NO: 144883 - DNA, 545 bp, Cannabis sativa
  modified_base (286)..(289): a, c, t, g, unknown or other
atacaacatgagagattaaagaaaaaaaactcttagatctaaaatattaatttttatctttctaaacgctaataaaattgtccatgcatattgaatatattttattttttagcgattttattatgagatcatgagaattaattagattaaactaatgtttataatgtatgttgaattataaagttttaaattatgttttttatatgtattttttctttttaatgaaattaacttaatggtagttacaatagattgcatggattcaatccaatccaataaaaaaccnnnnaatgcatccaatagttggaaccgatccaatccaaaacattcattggatcggatcgcatgactcaattcgattggatcggtttggtccaaattcattggatgtgatccaatgaacacccctatcaaccatgcccatgcatagcaagtcaagcactcaatcatagtgtgaaaaacagtggtaactaacccgaaggagagaaagagatccagactcagatcttgttattactctgtcacagaaaggaacaagggttaga

SEQ ID NO: 144884 - DNA, 948 bp, Cannabis sativa
  modified_base (193)..(194): a, c, t, g, unknown or other
ttttggttctgaaaaaatcgaaagaaacccagcagttaggccccaaaccaaaccctaattcagaaaaagggaatgggggtcccctaaccgctagaaagaagctccctccggacacttgccaaaaaagaaagcctcaaaaggttctccttgacaagagtggggtgcaagaaatcccaaaggtagtgacattgcnnaaagtaaagagagaaagggcaaaaggggtaaaactgaaagggtgagatctactctaagccctaaagtggtcattacatgaaatgaggatgatgccccagccaaaacgtagtgaaaagaagtaatctaaacgcaaaaaagaaggaatttaacgcgtcattcagaaactcaaacaaagttattcccaaaagttcaacactcaacccagaaatcgtaatatgtgctatataatcaaacagtaagcaagtatacgagatatgaagaacttacatgaagttttaagaacgcgtgttggtgttgatcgccggtaaaatgtagactggcagcgtcgaaggaataagagcaggaaatcaatggtgtttgaagtttattttctctttggaaaactctgaggaaatttggtgaaatgctgaaagtaaccaaatgaagtaagaaggctggcttttataggccaaaataggtgtgagacagctgtgatcagccaccatcgaacggttatgatggcaactgattcgaattctacagatccaatggttgaattaaacactcatcaaggcggtagaaaatgtttgagtacccgtctgacacccatttaatgcgccgtattaataaatgaacaagaaacgaattgacgcctgcagcaaaaagcaaatcacttcagtaatgatggtcattaatatatccccacgcgcccaaagcacgtgccaggaagctgataaggcaaccagaggcatctaagcaagccttgttcacttc

SEQ ID NO: 144885 - DNA, 665 bp, Cannabis sativa
  modified_base (638)..(639): a, c, t, g, unknown or other
caataggtaccataaacttttgaaacttatattgtacaaaataataataataataataattaaagtggagtctttatctacgtaactgaaagccgaaagggaaaaatagtacagatagaggtgcactacaagtacattataacacttattttattactttttgtagctatattataataaaattaagaacacactcactcactgtgaggtgtctaacttaagaagaagcttttgtttatagaaaatattattattattattattattattatgtcaacgcacgcccaaaatcatcactatctccattattactgctacaagaaattaattattgaactcaaatcaaacaacaaatttagtgccgtggtaatatttttattttttaattttttaatcataaaataaaataaaaatttttatttttaaaattttatttttgaaaaacaaaaatgttttctgtaaccatttttgttttttaattttaaaaacagaaaataaaagtgttctgtaaagtttattttaattttaattttttaattttatttaatcgggtctaggtccggggtcagaagtcgagtttagcgcctgggctgtggggaggggatttgggtccgagtctggtcggagtctaaaatatnnattaagaaaaaaaaaactgtttaaaa

SEQ ID NO: 144886 - DNA, 536 bp, Cannabis sativa
  modified_base (61)..(72): a, c, t, g, unknown or other
aggatcacttttgcaatcaagctaggatctccacaatcgaggtaaggaaattaagtagaannnnnnnnnnnntctgtatgtaataacattcataggaagagtcggaatagtaaaagaaaagtcaactaaggtcttctgcctcactctttattgtttgttatttaatgtactgtataatatataattaaataatatgtttatgagattcatgctatatgtatgtttacagtactagacatggtcattgctagatgtataaatttgaataatatgtttataagattcatgttatttaagtatatatgtaaatagtgtgtttataagattcatattatttagttatgattgttatgttatttaaataatgtatatatagtagtttgtcattatttaaattagatagattatagtttatgtgacacggtttgacagagaagataatggttaactactttactgttgggtctatatgttagataggtggccatttagtagtgggtacgattttactaaacacagccctccgccatttagtc

SEQ ID NO: 144887 - DNA, 1175 bp, Cannabis sativa
  modified_base (506)..(512): a, c, t, g, unknown or other
aggtagtaactcttggttattgtcattcctttgaccctgatcggtcttgacatacttctgcaagtgtgggttgtttttctttattaggaattcaatatcccgcttcaggttttagcattcattagtgtcatggccatagtcgatgtggaaccgacaaaaatttttcatgtccctcttgcgggcatctttcttcatgggctcgggattcttatatggggccagcaactgagtttccatgtaaatactttatgccccttcagtcaagatagtgaacgcagtgtaatttttcatgtccctcttgcgggcatctttcttcatgggctcgggattcttatatgggagcctgttcagatttttcggtgaactttcccttctttctatttccttgcatgtgattgttgttggaacacttaccacttgagcttgaattatttgggtaatgggtaagttgggcggatgttctagtagaaggagcctttggcttgccaggcttttgctcacattcnnnnnnntgaatggcttcttcgagcttggtgaagccttcaacacggtcgaggaaatcactcattgagtctaatggcccgttcttccttatatccttccaaagttcaccgaggactttgatgccctccagtatcgcggataactttccatcttcagttacctgtgaaactttggtcacctccgtcatgaatctattgatgtatgaccggagaggctcgcctggttgttgcttaactttgaccaagtctcctagatgcaatgggaggttgcatgaggaggagaattgcgcatggaactctgaagagaaggcttaccatgaaataaactttcgaggggccaacttgaaataccattgctgagtggcttccgacagagtaacaggaaaaattctgcaacatacatcccctcgtactccttgcaaatccatttgcattttgaaatacttgaggtgggagagaggatcttctctccctgtgtaaatcttccatgttggcattttaaacttgtggggcagcgccaggagattgatctcgggagagataggtgtgtcgcgtgctcggtctaactcaaggtcattgtttatctatccagccatgccatggaacatatttttcagctcgtctagctgtgcctgtacggctgggctaacttgctcagcattctggtcaatt

SEQ ID NO: 144888 - DNA, 598 bp, Cannabis sativa
  modified_base (162)..(165): a, c, t, g, unknown or other
aaattctaaggagactaggggtgtactattttatagtcacaaggatgataaagtgttcgtttccaaaaacgccactttcctttaagatgactatattaataacttcaagccgcgaagcaaagtagtattggaatttcaaatataactccttctaatgttccnnnntcttctactcaagaagaggataatctcactccctcggttgaacttttgcaagttgatacaaccgagaaatctacaactaaaagtttatgttcagaagatcacgactcctcgttttagtgggagggtttccacaaaaccatctcgttattgcctggattgtgacatcaatagggtcgttggtgacggtattgatgacgacccattacccaataaacaggcaatggcaagtctcagaatatgtagatgcacctgatgattattgtccaattggatgtaagtgggtctagaagaagaaaagaggtgctggtggctaggtcaaaacttttaaaactagactggtcgctatgggttatacccaaagagaaggtgtggactatgaggatacttttactccggtcgccatgctcaaatccattcaaattattctctccat

SEQ ID NO: 144889 - DNA, 521 bp, Cannabis sativa
tgtgatttggttcctatgcatgcacaggtgcggacgtagttactacaatatagggccatggctcccctagaatatatatgcttaattaaatttatatatccaaactattttttttttataattattgtatgaaattcttttgaaaaagtcaaactaaaatttataaatattaacttctttcaatctatatgtaattactttatttatttattttacatgaaaaatttatttgttttttttttctttaaagcatttatttcttctttaataatattcaagacatacatttttttttatttatttcttctttaataatatatattgatttgcttagtaagacataccatttttttttttttgaggtaccactttaaattttttttaattgtgtataaagtgataaatcttataactacatttttataactactataaaataatcattttcagctatgaatatagtaaaaactgcatttcgcaacaagataaaaaaaatgaatatttaagtagtcgttcgctag

SEQ ID NO: 144890 - DNA, 606 bp, Cannabis sativa
  modified_base (383)..(388): a, c, t, g, unknown or other
ttaaagtttctcaaagaagataattcttataacttctgttttggaatgtaatatgtgaatggctaggaacacgatctaaagttatggaatcttgacttttctaacggatcaaatgttggttctttttatgtgttaattctgaaattaaaaagttgcacacaaatttagattggatctcaattatacattcactatttaaataagggtactaaagaataaaaaagtaattagaagggtaaaatgataattttaccaatattaatttcaagctgacccaaggagggctaatcactagaattgagtatatcaatagacactagagtaaaactcaataaatacagttttatatttactaagagttcaattctatatttatagtggannnnnnatggaattaataaacaagattatttaattggttaaatattgggagcttagaattataggtttatggtccccatattgccaccttaaaatattgttcagtggtgggataaaaattgtatgtgaaagtttaaaaaaatctattttgaattatcacacaagtcttcccaacctcattaaatggcttggaagatcaaaagagtcaaagttcaagctgcaagt

SEQ ID NO: 144891 - DNA, 648 bp, Cannabis sativa
aaaatatcaataattaacgctaatctgctaatttccaagttaaagttaagcgatctttatagagggcttgcatggtcatttcaccaaagagcagaggcagaagaactcctagtcaaccaaatacgacgatctaaattaccaaccttctccaccattacatctccttagtcacaaaatccttgatattgtgaaattcctttacacatgtctactcctctactggattatttactatttggcaactatatctttgttagttaggaagtaacactagtagttaatccatcggtggaataatgtcaaaaaatatatagaaacttccacaggctgaataattatcatgtagccttcctggcaactttaacgttcactctctctagcagagttagagactttaggttggtctttacacttcaccaaaaatcactgctccaactccagagtaatcaccatctcataagtagactttcttgcattaacgcaagtctagaaacctaatttagtatagtttaagagtaataaaatacaacccttatcgactaacatatagttgctcttttgatcttaatatttatttgattgtcctccagtgtcccttttttggattaaattgatacatattcataactcccactcaatagcaggtgt

SEQ ID NO: 144892 - DNA, 599 bp, Cannabis sativa
aagatcgccagagggtaacgtcaattatctgggacttcctcttttcagatctagacaaaaggatgcagactttaactttatcctggataatctgactacgaaattgcatggttggaaggccaagactctatctaaagcagggcgcgcaactcttattaagtctgtcggattatctcttcctttgtatgcaatgcaaactactaaactatccaataaacttgctgctaagattgatggtttagtgcgtgatttctggtggggttcggagaaaggtaatcacggtcttcacctaaaagcctgggacaaactttgcctccctaagtctctagggggcttgggattccggaaatctaaggaaatgaaccaggcgttcctagccaagtgggagtggaaccttcttacaggacaacaatccttatgttgtcgcatacttgaagccaaataccttaaaggcaagtcttttcttgactgcgagccgaaagcctcagactcgtggttctggaagaatgtgtctaaaactagagctatcatccgaaaaggtgcctgcaagcgggtggccgatggcacgggtactaacatctgggtggatccttggattg

SEQ ID NO: 144893 - DNA, 1280 bp, Cannabis sativa
  modified_base (551)..(554): a, c, t, g, unknown or other
atataacatataaaatgcattctgaatttaaataaatcaccgtaaaataataattcataactaacatgaagtttcataattaaatcttaattatcggctaattttaaattaaaattaagcggtctttacaaacatcctaaatataaataatcctaaaacgataaataaacatgtaaaagtataagaaactttatattggttgctgcgaaaataatataattcattctgataagtactataacccttgttcctttctgtcgcagagtaataacacgttgctactataataaatggttttcgcgtcggtcaacgcatctggtcaaactggttgaccgacacaaaagtcccattttttggtagtgactcacttgcaatattcctcccggagagtgactcacttgcaatcttcatcccgcccgaagagtgactaacttgcaatcttcctcccgaagagtgactaacttgcaatcttcctcctgaagagtgactcacatgcactttttcctcccgaaaaggtgactcacaaacaagacttctcccgaagcttgatnnnnaatatccaaggtgttcaacctacacaatttcaacaagaaataatacaaagtaacatactaataaaatactaaaaacttgttggactcaagttcttcacacaacaaagaaaacactccctaactttgaaaagtaatttagaattgatacaccaagagagctaaccaaaaccaacgacctaaggatgaatatatatatatatatagtttagaaactctctaggtcgtggacaaacaaccaagaaacgataagatcattaaatgaaattcttcccaaaaaggaaagtcaaaatttgtttaaacagacagtcagtccattctaacagatacagtgaatctggataatttttcatcaaagtttccataaacaaataaggcaactttgacaacattaatacccatagttgtacacggtttcttggtcaagaaatcagatcaaaaggaataaatatgaataaaaatttccttaaaaagtaaatgataaaatcaaatattttataaaaggaaaactcatatttgattcacaataagtcaaataaaaatgggatcttattttgaaagcctattcacacaagaataagaaactaaatttttgaaaataataaataaataaataaaaacaatttcgaaaatactacaagtattatttttatctattttattaaatatgccaataaaagattttacaataacatacctactgttataaatattaataattatgtggat

SEQ ID NO: 144894 - DNA, 1377 bp, Cannabis sativa
  modified_base (871)..(873): a, c, t, g, unknown or other
  modified_base (942)..(959): a, c, t, g, unknown or other
  modified_base (1065)..(1074): a, c, t, g, unknown or other
  modified_base (1226)..(1232): a, c, t, g, unknown or other
aacttgttcatgacataatttgatgtaaagggcagaaaagctagagtcaaactattcaagatcaaactcacttgagttgtctgatctataataactccattattcttagcctcttagaagtaactagtcatctggagcaggtgatcacgcacgttttgatgaggtttcatccgtgcatttataaaattcttggttgcctcaaaacgagcttgatctgacgccatcccaaacagttcagttaactggttcatgatatctacagtcgtgggagtattggcaaaccttgttttcaaggtgtcaaccatgctagacagcatgaagtatggagctttgttgttggcattctaccaacgctcgaacttttccttgactggcttggtcgcattctcacctagttgctcaagagcctcttcagtcaacacaaacagggcattttcaccattgagagcaatattaatgttccctttccatttgacaaagttagctccagagagcttgttgtcagtcaatagtgacaccatgggattattcatagtcatattgggtactacaaatatcaataaatagaaatcaagtaaggtttaatacaaaatcatacacatttagaaattattatcacttagcatataggaatgacaagtgaaaatacaaaaacatacaatcttaaataatttccaaggtttccaacaaattgataccagtgtcccgtttaggcgagagtcaaagatatcattcactgaatagagtagtcaactcatctaaaatgacaaacattctagcaactttttattcaatcaagatgagaatccatcgttgtcccgtttaggcgagaatcaaggccattccatcttatgagcttccaccattattnnntacttttgtaagtcttactcttagaaaccaccattagggtggacattactaagaataaaacacttacannnnnnnnnnnnnnnnnnagattctacggcgttaaattgctaatgaacgttcattcattaggcatgattactcattaaaataagaactatgtagaatcaacaatgaagatcgaatatccttatnnnnnnnnnnattatttaaagtgtattttcatttaatatttattataatctatttattttaatatatatttatttaaaattatcaatttagtttactctaaatataaatttaaatttaatatttataaaattatacttagatctgaaaataaataaaattannnnnnntcttagtaataattctcaataaacattatgaaaaattagttaatttaagttgcttctaaattaattaaattagttttcaactcaaatttaattttctataaatatatataattcgaaatccaatgtatttaaaattaatacattt

SEQ ID NO: 144895 - DNA, 555 bp, Cannabis sativa
tgaaaatgaaaacaaccaactacagcaagtaattacagattcaacatatatttttcaaaattcatgttcttgagctaaaaacttcaaaacttgaatttaaggaaccatcatgcagacactagctctaaactactgaaaatagcaagattaaaccacagaaaataaccacaaatcacagcagcaagaacataataaaaatcaagcatgcatcatcatcttttcacacattttttctaaaattacaaaaagaaaaggtttagaaactttaccaaggatttgaagaacactttgattgaaggaaactagctttaaaatcaaaaattccagcccatggaacccccttccagccgagagaaaaagagaggaaaagagagagtattttttttacaatttttctattttctaagttttgaatgaaaaatgaataaaaagaatactttaacattaatctatttcagccaacaataaacaattaacacttaattaaacatttattttttttcatttaataaattcactaaaagacaaaacatcattggggcaaaaagaccaatt

SEQ ID NO: 144896 - DNA, 827 bp, Cannabis sativa
  modified_base (126)..(129): a, c, t, g, unknown or other
  modified_base (779)..(780): a, c, t, g, unknown or other
tctctctctctctctctctgtttcgaaacctctaactgatagagtagtgcccacacacagcaaatagtacctcaatcatagtgaggaagactatgaagaattcaaattcaacaaagaaggacattnnnnctcagatcttgataatactcttcaacagaaatgatacaagaattagagatctgagtggaaggagacatattattgtgttgcactcaatgtaaggtttctcatactttatatgtgtttacttacattcgttttagaagttcatatataggttgttaatccacatacttgtgagtagatctaacatcctggtaaaataattccaacaggttggtcttgacatacttcagcaggtgcagattgtttttctttattagaaattcaatttcccgcttcagattgtaacattcgttggtgtcatggccaaagtctccgtgcaaccgataaaatttcgtcatatcccttttgttggtttctttcttcatgggcccgggcttcttgtacggaattaacgactgagtttccatatacacactctctatatctttagtcagaatagtaaatgcagtgtgtttggcatgatcacggggagtctgttcgaatttatcggtgaactttcctttcttcacgtttccttgcttgtggttgttgcttgaacgcttgccacttgaattgttagaatagttgggaagttgggcggatgttccggtggaaggagcctttattttgcccggatttttctctccttctgctcgttgaatggcttcttcgannttgatgaagccttcggctcggtcaaggaaatcactcattgagtctac

SEQ ID NO: 144897 - DNA, 519 bp, Cannabis sativa
  modified_base (465)..(494): a, c, t, g, unknown or other
atcctaggagctcgattgaaagagaccagcacccaagagtcaataaatggcttggtgcgctggattctgcttatccaaatctgatgttttttcgaccgtctgtctagtatttcataaatacaatgatctatgaagtcagaaaaatcaaatccattactttgcatttctcatttctagcacacttagaaataaagagtttagagttttgagtcttttgagtctctcgagtctctcattttcgcaaattttcgcaaaatttcgcaaaatagcaacatctccgagaactagtgaccaatttccccaaaacatataaatgggataagtggtgtgaaactatcacttgggccttttaaaggacatccctttgacgtttctacacttaccctatatccaggttgacatcagatgtcaacttgggcgctgggatgccaacgtgggcattgggattgttggaaattattttannnnnnnnnnnnnnnnnnnnnnnnnnnnnnttattaacatcctaaataagaactt

SEQ ID NO: 144898 - DNA, 557 bp, Cannabis sativa
actagtatttcttttttatattaggttaaccgaatagtaaatagactgtaaatttaaataaaaattaatttattataccaaccaactaacttcacaagttattataatttttttattattattttcatatttaaaagttaccatatattgttatttaaaataccttcactttttttagtaactttcgttacttttaaatatgtgtgataaaattatagagttataataaagtatacttaatatgaaagttagtggagttagtttttttagtataagtgattctaatattgattaaaatattatttgatttcttttataaaagttcttttttagtaatttatcaaaattatttcaataagataaagttatgtagaatactattaggtagctttaaatatgaaataacaaaataatttataatttattaacatttggttaatttcatagtttaattactttattgttaacaaaatataaaagaaactaaatggttgttttttattttgatcagtttttcttgattgagcaaaaaaatatatgattctcatatattaaaa

SEQ ID NO: 144899 - DNA, 1412 bp, Cannabis sativa
  modified_base (410)..(414): a, c, t, g, unknown or other
  modified_base (1353)..(1374): a, c, t, g, unknown or other
aatatttttttaattaagtttttgtttttaaaattagaaaagtaaatatattttctaaaatcatgttctataaaactgtttttactttgtaatttttaattaataatctaaattaaaaataaaatcactttcaaattttattttaaacaatctttttaatcaatattttgaattctgaccctaacttagaccttaaaaaccgaacccgaccctagacttagacctaccccctgtcccgatctcggacctggctttagactcgacttaaataaaatcaacaaatgaaaataaaaataaactttacaaaacacatttttgttttttatttttaaaattaaaaaataaaagtggttatagaatacaattttgtttttcaaaaataaaattttaaaaacaaaaattttattttnnnnnttgtgattaaaaaatttaaaaacaaaaatgttaccaaatgtcacctaagtgagtaaatgtttattttttttttaaatgtagcaaaatagtaaaatataataaattagctaataaaaattataaaaatatatttaatacatattattttttaaaaaaatattatataataattaaactaagttatataaatttttaagtattgcatattaatatatggtaacaaaaatgaataaatatattataatatttaatatatcgtatcattaaagattaatatactgtagtaataaaattatatactacaaaaaaattataacaatactaaaactaatatattaatactaatatatatatatatatcacgctaataaaattatatatataccattattaaaatatgcataccataccaaaaaatttatatacaatcatcatatataattaaatagaaactaaatatcatcttaaataaatgatatactatacaaaacaaaaaatatatactatacaacaaaataatataatattattaaaaaaattgtatataccatattacaaaattttatacaatcataaaataattatatcatacgaacaaaattatatgctacctttgtatataataaaataaaaactaaacatgcgcgatctaaaataaaatgatatactatacaataaaacttatataccatatgacaaaaaagtacactttacaaaattacaatagaaatatatgtaataacaacaaataaaaataaaaataaatatagcatgctaataaaattataagtcgtgacaataaaggtacaatagaaaataaaacttaaatatcattttcaaaaaataatctaccgtataacaaaaaatacatatatcattcaccaaaatatggatactctaataataataaaaaaacatattactaatatatatatatannnnnnnnnnnnnnnnnnnnnnaccaaattatataccacaattaaactatatatatcatg

SEQ ID NO: 144900 - DNA, 1035 bp, Cannabis sativa
aattttgcatgttttgtgcccggcaatatcggaatgcggtgtttggctgttagaatcatatcctagtatttttagtatagcgggacagtatagttaggcattaggaatgtcgggaatagtagaagttttagagttgtccaaaatacccctaagtgatcttttatggtttttagtgtgggaggagcaaaatggtcattttgccaatttttgatttgtctttttgtggcttaaattaaggttaataatctaatttttgattaatttttaaatatgatattttaataaaataaaacctttttctttatcatttaattttataaaatatcaaattatcaaaaaatcacatttttctctctcaaactctctctctttttcgaatcctccaagaaccagctaaggttctattttccttcatgaaatcttgagttttctagaaagatcatagtgtattcaagccaaggtaagctcctagcaacttcctttttagttttcttgaatttcaagttatggatttatgcatgttttgagatttttgctactgttattgctgttggtgtttaagttgtgtttctgaagttagattatgttcaaatatgttgaattggactggttttatgggttgttattaggtttgagcaagctttaagttttagaactcaagcttggctctttaatggtaatttttgattctgagcttgggtagttgttttagtttatgtctattggggtataatatgcaggtctggaaggtttggtaaagtttggaatcgatttggttaggttttggaattttttgggtttctagtataaactagctaaccggttttacaggacctgtaaaatcgattatccagatttgctactacgttccccaaaaaatttgtattgtcaattcgtgctagttttagatttttggttggctaactccctgctaatttagggtattgccatgttaagtttcagtagataggtttttggtttaaaacctaagtctccggttgtgatttagcatgtcacttatctatgttgttatcg

SEQ ID NO: 144901 - DNA, 576 bp, Cannabis sativa
gttcataaaaccggactgcaaatcgtgaatttgtagccataaatcaagagaattaaggctcagtgtgcgggggttatcaccgtctttgagtcggattaagaccagcggtttgcgatcgtaagtccagggactgccttctataacacgctgaatatctaactcgtggtagaactgaaacaagaacctgttctgatctagttgcttcgcatacatacccttaccgggtctccataagtcagccatcatattctgaaaaattcgaaagtctgagacctttcctattagcagtcgcccaacaagacaccatctggtgtcaatagcctgatcgtcttcctcttcagtttcttcataaaaaacctcctctgcatcttcttcttcaagttggacgtttctccagcgttcatcaatatcatccatgttgaggctgctggaagccatatgggacaaagccacgaaccacacaaacaaaatacgtacacagccaaagacagaaaagaacaaataacaatcaatagaaaatcacaatgcatacactcaaaaagagagacagaacaatactctcaaaacagagagact

SEQ ID NO: 144902 - DNA, 693 bp, Cannabis sativa
cctaacctaaattggaattcagacgtagacatggacacgaactcatacacggacccaaataccgacccagacctagaccgggattgaaacacaggacctagactcagatgaagacgcagacccagacacgaactagggacccacaaccaagacccgaacgtggaccttgactcagacctggatccacaccgagattcgaaaaacccttaaccaaactcgaactatgactcggtacactgacaccaacttggacccagattcggacccggaaccaaacccggacccagaatcagaactcgaagtgtgactaggatccaaacctaagacgataaccaaacccaaacaataactcaaacacagaccaaaacctagacggagaccttgactaggactgggacctaagatctaagacttgaacatggattaggaccaggaccgggacctgtacctgacctggtcctaaacgctcaccgaatcctgagactcgcaacacagaccaggatccagaccctgacaaggaaccgaacctaaacctagacaaagatagggatcgagacctggacctgtaccctaaccgcgacctggacgaaaaccaagactcaggaccagactaggaccgtgactaggaagttgacccaaacctagaactgaactcgggcctagccccagacccaaaccgtgacttgaagttgg

SEQ ID NO: 144903 - DNA, 568 bp, Cannabis sativa
aaaaaaaaaaaaaaaaacagccagatacgaacttggatacgtccggtgacaacggaggatgttgcgaaaatgaacggccgagatcgaaatcgccggagaagtgggacgagcctgggagcactgaagaaaagttgagagggttttagagacgagctgagaatggtttaaatatgaaaagctaaaatatgaaagggtgagctttaatgaagcttttagagggaaaactcccgcttttttcaacattcttttttttttttgaaaaaaatgaaaccattactgatgacaatgacgtcagtaatgtataaaatcgtcattaatttataattttacaaaaaaaaaaaattatcaacgacgacaattaaatgtcgttagtgatattctcacttttagtaaggacttcttaccgttagtaatagtgccgttggtgatgctattaattcttgtagtggaactacatatgtcaataactttgtccacccctaagtgaaatagagatcatgtggagttatgaatataatccagagttcaatggatataaaagatcgttgaactgcatatattattctta

SEQ ID NO: 144904 - DNA, 707 bp, Cannabis sativa
tcgtgcaagagttgaagcaaatcctggtcgatttggtgttcgcttccccaaaactcacctggtttcatctacagaagataacacacaagatgagtgtttggtcgggatatcgaacattaaaataggcaaatatgccgactaggagtactcaacagattaaagaatgggaatattcaacgaaaagtcaaaactcaggaagtttgaaattttcgcgagttagggcaacaaatttcatgaagcttagaataagcaagataaaagacaggcattatgcagttgcgaaagcaagcattatgaacgatgaaatagcacggatcgttacaaatgaaaaacacagagtttctaaacttagggttttctacatatcttctacagcgaagttaaagttgcattcagaaagtaaatgtgcaaagtaaacataaaagaaatcgagaacttactcaaggatcgaacgtctggattcaggttatgccaagccaaacgagtcgctctggtgaaaacacttcagcaaactggaagctaaaaacctctattttttgctctggacttacatagcaaaaaaggttggtgaaaatgggtttgtgaacaaatgctcactgatatttataggcaaataatgaaaaggggtaatcatttcaaaagaacctcagacgcctcggttccccccaaaagtgaatatgggaaatcaaaagcaatcaagtgtagcc

SEQ ID NO: 144905 - DNA, 854 bp, Cannabis sativa
atgtacactggcactggaaaagaagaagaagatcctcttcctctttcgcacctcaagtatttcgagatgcaaatggatatggagggagtacgaggagacgtatgttgcagaatttttcctgccaccctctcagaagccgcccaacaagagagacatgatcggaagcctctagatctttggccagcttggacagtttcttctcgtcagtaagaagctttttgttgacttcacctagttccatttggacggctccgaattgaaccctagcttcattagcgtccttcctggctaagtccacttccgtcctcatggttttggacatggccgcattcttggaggcagcagacttagctcgagaataagtgtaagccatcctcaaaccagtcttcacagagaaaaaacattagaatctgaaccaagtaaggaaggattaaaggaaactgtcaagaaagactcaccttcgtatactccttcaggactcatctcatcaagagctccagagaaggctcgttgtcagctccagcctactgctcattcactttaggggccgaccgattcatatagtgggtgagcatctccttgcctcttttggtctccggatgcagtgatggaggtgggttaggagcccggatctgctcagatccgttgttcgactgctcgggcctatttgagcttcctcctcaagagaccttggacttagcagtttttggagcaaaaaggtctaccacggttagctcctcggatagatcgataactgcttcgactggtgccttctctctggacagtgttgactcactgcctctagacttcttggctggaggagacgagcttgagcttgccccaactcttttctt

SEQ ID NO: 144906 - DNA, 768 bp, Cannabis sativa
aaaatcacatgtcccaaattttcctattccaatcctgtccctctaatcaataattgccacctatttttttttccacctcatttattaatgggaaatttacaactcatgactaaaatgtaaagtattttacatttttacttgtgctccgtatctttttcttttgtacaattcatcattttcatcattactttttaaactttcattaattacatttttacgatttagatttacatgaatatttttgtctatatttctctccccactctttgtttcttgttcattttctatgtactatctctctctcaacacaattatcttctacaatcagatcatatcaacttctttttttccttttctattttttttttaaaaaaatcactttttataattagtatatacccatttcacataaagtgtttacaacatatagttgtaactagttataatttatcttccccttttcctacttttttttttttttcaaaaaggctaagaaaaagcctccaaagttgttcttgttatgggtaaaaaatctcttttaaccttcgaaactaactataattgaggaatgaagccttcttatttttgaaaatatattttttttttcgtgagaagattgaatctcaaatggctaaacaccataaaaaaacatatagaagtggaggccctattctattttagtattatatagttgatttttttttatattattatttttatttatagttttaaaaatataaatttatatgctaaaaaatgatttgggtc

SEQ ID NO: 144907 - DNA, 564 bp, Cannabis sativa
ttacgaatctcactttgcctcctattggtttgctccgattctccaggtgaaagaatcctctctgcataatgttcattttcctcatgacactgttccattgattcagcagcttcctcaatctctagttcctgtactcctagcactgtgtccatggatctagtcttgatgactctatccgaggaagatggaccagtcttctttcctttagctttccctttcccgttcatatttttgccttttttgccatagcttcggtgagacaccgaaagagagagaaggagcgggaaaagttatgaattatgtttagtttaattatggatttgattatgagctaaactttctatttagggatttgatgaatattgagtgagattactctatggattaatgttatttaattgttctttctttctttattattgagatttattcatatttgggcttattcacttttttgattggcgaccttatgcatgatctatgatcttaatacaaaatctgaaaagtgattattgagaatgctctaaatgaatagacatatgttttgatgtgaaacgagagtat

SEQ ID NO: 144908 - DNA, 820 bp, Cannabis sativa
aaatcttctattgatagcaaataacattatattaaaatgagttttatttagggcataaaatcctaacaacaatcacaaatgcacaaaaaaactccaagtgaggtctttcacctcatccaatcccaaatgagatcattcacctctataaaaaaaattctaaataaggtcattcacctgaaaattctaaatgaggtcatttacctcaatatatcaaagtgagttaattctccacaaagttctcaaaaatacaaaatctttgaacactttggaactagtttgacttgattcttataaaaggatatgtaggaaacttagttgctcaaactaagtggagttgccaataccttaaaataagataaaagacaactctcaaaattctataaaagattattcacctaggattttttctaaatattcaaataccaaaaaaatttaaaagtcatctaccgaaattcttatattaaaattttaaaatacctcattccaaactacacgtggcttgaactttcatatggaaggtatgtaggcagctaagttagccaaattactgagtccagttgcaattctaaattcctcttaatttttctcaaaatttaccttaattatttaatatcttcgtaattataatcaaagagtgttttctttaaacaaaaggattataattaaaagattattcttataatcttgaatgggttgaactttaaattaataaactcttatgctatgaactagttaacaacttgcgcttcgcgtcggatgtttaaaatagtttaatattactaatttttatataatttttctttgaataatatgagaagtt

SEQ ID NO: 144909 - DNA, 609 bp, Cannabis sativa
tttgaattacttgaagagatggccataactaatcaacattggtcaacagagagaggctcaactaaaaaggttgtgggaatgcatgaatttgatgcaataaccaagttgacagtccaggtagaggcattaataaagctggtgactgcacaagcaaaacaagctcaagttgtctataagctgtgtggaggatctcatgccactgacacctgccctatagatgtcgacagttttctaatggagcaagcccacgccattggaaactatcagaataattatggtcttcagcagaacttccagaagcagttttatcctcatcaaaatcaatctcaacaaagccaacaatatccacaacaacaacaagcctctagtggagggtgtaatcctcaattagacacgttactggaattcatgatagaaattaagtcttccattaaagtcttggaaactcaggtggggtagttggctactcaaaacactaatagggctcaaggtaattgcctagcactattgaagtcaatccaaaggagaactataatgcaattaccttgagaagtggtaagacctatgctgggccaaacaaagatgagccaaaggaggaagatgatgtag

SEQ ID NO: 144910 - DNA, 564 bp, Cannabis sativa
  modified_base (34)..(53): a, c, t, g, unknown or other
  modified_base (144)..(144): a, c, t, g, unknown or other
attaatttatagttggtccaaaattaattaaaannnnnnnnnnnnnnnnnnnnttaattttcgaaaatcattatatattaaaaaatatatataaaatttcgtaaaatataataaaataaatacttgaaaaatatctaatttaanttgttctaaaataacaaaattttcaatttaaattatttttcaaaatttaattaaataacaaattaagttactaaccacttaatttaaaaaatattctattttaagttgatccaaaattaacaaactttcaacttcaaaaatattccaataatctttgaataactaattcttagaattcctcaacttaattttgaatttgaaaaatattcaaattgaagttgataaaaaaaattagttataaataactaatttacaactttagtaggaatatttaatgaaatattgaaatacttaagcttcagaagaatctaattagttattaattctttatttaattaaatacagaaaaatacatttagtttatcttgaatttgaatttcattaaactaagtgtgtttttctaaattattttcaaaataa

SEQ ID NO: 144911 - DNA, 505 bp, Cannabis sativa
aaaaaaaatcaaatctcttatatatcttgatcacattaatactaaatagataataattactcttattttataaatttaattaatttttattataattaataaattgatagctttacattataaaaataaataagaacttgaacgactaaatttaaaaaatagatatttttgacttttcttgaaaaaaaatatagatatttttaattaaatgagaaaacataactttaaattaaattttaaaaaaaggtaataataaaaaaatatatgttgatttgaaatagaaaacctcacactataaatatgtagtggttgagaatcttacttctcatattcacggcttactatctcgaattctcaatgtcttctttagaaacaaaattctcttttgtgtcaatttcagagtctgagtctccaataatggctaatcgtgaagaagaagaaaaaagtgtggtttgcaataatatctcttttgatttactagagaacattctttctagactcgatg

SEQ ID NO: 144912 - DNA, 671 bp, Cannabis sativa
gaagtggggaaaaggaaaagataaatgaatggtaagagagatgggaatgctttgtttatgtccctactcactcttgtcactttcttctttaaaatggggattatctatatttagaaaaatgaattattggtgtttgtagattgtgagaaagataagaacaaagatgcctcttttgcttaagagaaatgctaaggggtttaaggtgtgacgtattgttattatgtattttaatattggatctcatacattttaatttaataaataatatgtgaaaccgctaactaattataaagtgtcatattggtatggtgttgggtaccttaaagtattaaataacaatgttatttgcttaaattctatagctaagaataatttaaagttaaaagaaagataaagagaacagtgtgtaaggaattatctctttcttgtgaaacctaagaatatctctgcaccaataaaaaaaaatatctaagttacttttaattggaatttcaactcattttcagcactacacaattaccaccataagccattataattccattgtttgatttgattttaaaactttgtatggcattattaaaagtgaagaaaaaatgatatgaataaactgttaagcaaaaatttcacatttaaaatattaaaataaatgcaaaacacaatttcaccta

SEQ ID NO: 144913 - DNA, 550 bp, Cannabis sativa
aaaattaaaaaaaaaaaccaaaaaacatcatgaatcaaaaaaaaattaaaaaaaaacaacattatagaaaaaataaataaaccacaactatctgaaattcatttacaagaaacaaaatgtataaaaccaataaaacaaaaaaaaaacacacaataaacctatttaaaaaaaaaataaactaaatcaataccaaaatacatcaataataaaaaaaaaaatcaagaaaatagaaaagaaaaaaaaacgacatgaacaacaaatccaaaaaatgcaacagattataaaaaaaataaaataaaaaataaaaataaaaaagttaaaatgaaagaaaaaaaccctaaccctgatattcactcaacacatttcaaaagttttgaaaaataaaaggaaaaaggaaatgaatagctgaacaaaaaataatgaaagatgaaaacaagtgataccatcaatcctctacgtgattgacgtgttgtagcttctcaggctaacgtcacgcgcgcacgcaaatagaggagaggttttcaaaaaaaaaaatgggccgaaaaagtag

SEQ ID NO: 144914 - DNA, 910 bp, Cannabis sativa
atatttgttaatcatcaaaacaaggagacctataagtttgagttgacaatctccccctttttgatgatatcaaatatttgattattttaaaagagaaaggagaaatttaaacaatgtatattgaattagctcccccttaatgtgtgccaaaaagaaattaccttttaattttaccttgcatgttcttacaaactccccctcaatttttacttatgattaaaagattagatactaaaaaaaattgaggttatgccaagaaaaaaataatcaatagattttctcccccttttgattcatcaaaaatggtggcaaggaattcacaaaatatagagaaaaaaaaaataaagcaacattacccatgcataattaaaaaaataaaatcacaacatccaacaaaataacattcaacaaacaacaacaaaaaaaataccatccaacacaaagtcaagaggcatgaagcctttgcacacaaccaaaaacaaaatgaaaaacaagagtaaatatgcaaaagaaaaaaaaatatgcaagaaactagtttggtggggggcgaaaacgatccatgtaagccctccattgtgccatctcctcttgaacatttttaaacccatgaaccatgttactcctcatggtattgatatcgttgttgagattggtgaattgagagttgatgttattcctcaaggtttgaaatttattgtcaaacgatgtgtgaagacgagtaaaagcttcctcaaggttgaattgggaaaagtgaggcatgggaggagcttgaggaggcatttcttcttcttcttcttcttcactttcacttgcggacaagttaatgtcttcatcttggtcttcatcatcactttccaaatcaatttgcattctttggcctctctttggtgtgaacacccattcattgtta

SEQ ID NO: 144915 - DNA, 919 bp, Cannabis sativa
ttttgcactaaaaaatatctgaacgatctcaattaccgtcgatctcatctaaatttgatagtctatgacaactttggataattataaaacgtgcagtaagacattaatatcatccaaatataatactttattgctgtaaaatttatttgctatgtaagtacacatagtggtaatttatttactatgcaagtacacactgtaaaataaaactaaacattctttatacatataatttttcccttatgtttgttattttttgttttatttattttaatatgttgttggcgacataaaataataataatttatttttattttgttgttagttatgtgagaaaactaagaaacattaagtaattcaatattaaaaactaaccaatctaatctgcagttttgcagattagatttgagttataatgtggattggatccaaaatatgaaattctcacttagtacaaatcgaatgtactcaaaatagtgcgaaatgaattgtatgattaccgttagtgagaatgataaagaggagataaaaaactcttcaaaaaaacgaaataaatgtaatatgtaaaaaataaattgtataaatttattattaaatgaaggtgtcaaggcttgaactcatgtcacttaaaaagagataggattatgtgcattaattttttttcaactatatatgtatactactagctaactagtacatgcataatttatatagatatagtgttattaaaaaaaaattaatttaatatttaaaaaattttaaatacattgaactaagttgaagaaaaaatatattataaatatgtattatttattattttatgcatatgattatataaataatgtaattaaaataaataattaattttatatctaaaatttttaaatacattgaacattataattttgaaaagtaaat

SEQ ID NO: 144916 - DNA, 711 bp, Cannabis sativa
aaagagattttttttttttaaatatatgaaacgagaaactactgtcagtacttacctttttttaattacacaaaaatacgttaattgcattttatttatggatatatgatgacttaattaatttaagtatatacccaatatcattttatttaaattagtttgcggtatacattcaaataagaatagcttttatttgctttctcttcctgtaaaaacttttattaagcattcaatattaacttttttttttctttttctaaatcattttctctctcctgtaagcattcaatatcatttcattggtcatttcattccatgaaacagtagtatccaccaaagagaaagtagtaggtttaaaacaatatatatacaccacattatatagtatactcataatttttttacactatattcataattttttttttaaaaaaataactctttctcttttttagttttaaaaaaaagtgtacaatttttttttattacactgataattatttgagctcaaattttatatcaccactctactttttaaggggatcgttttaatatatcggaagcatatatttcattaccattgttagaaaaagataattaaaatcagaagtaatattttagtttctttactagaaaattaaatttataaatatcaactaatttttaaaataacttataagaaactaaatttttaaacatgacgtattctct

SEQ ID NO: 144917 - DNA, 658 bp, Cannabis sativa
  modified_base (568)..(568): a, c, t, g, unknown or other
taaccaacgctatagggtgttttttatttaaattttatttatccacactctatagcgtcgattgtttagtattaagctgaaaaaaaaaagtgcctctaaagacttgttttgtagtagtggcatcttttttctgatagtttgaaaatttaagcattgtacgtcaactatgagataactattatgaaactaatgcaacctttatatttgttgtgagacaactaatattaaatcttaaaacaactaatattaatgcctctatgttatacaaacaaaacttacaacaattgagttttctctgtacgagttgtgtgttgccaattctgaactctatttatttttaaataataatattgtactagcacaaattatacaactaatatacaacttaaatgaaactagaaatagaaaatttgaatggacatcgtcatgaagaaatttgtcagtattttttttttttgtcactgatctacaattaatagtaccttaataatattctgtggagaaacaattgttaaaattttataatccaactttataacaaccaaatgaatatattaataaaagtaancatgttataatttttttttaaagagctttgtgttgaattatggatatgaaatactaggggtgttcacaaagtatccgatccaatccaatc

SEQ ID NO: 144918 - DNA, 629 bp, Cannabis sativa
taaagtgcatatatattttttcccaatttcccaatttttttagggagcgactgccccacctcgcctctatgtgggtcctcccctgacattaacctagtatatatatatttcaatggttgcatcaaatatttaaccacgatagttacatttatttttagtcgttggatcattgttcaacggttatgattaatttaaaaattaaataaaataattaataaattacatgtaatatgatactaacttgattttatttgtttcttataaaaattaattgtaaaaatatctaattaaatattttaattaaaaattagtttattttaaatatataattattttgagtttaaaaataaaattttttgctattagtaatctattatagcatatcataaaagaatagaatgtaactagttagcatttttaatataatactattgaataaccaccaatatatttatatgaatttatttatatatatatatatatgagtgtacttttttaatgggtattagtagccattcacgggtagtattatgaaaatttgagtttttatgttcaatttttctatctaattaaaataatctctcatttttacattatatgagttgagattgttccatcagctgaaaaaa

SEQ ID NO: 144919 - DNA, 738 bp, Cannabis sativa
  modified_base (28)..(30): a, c, t, g, unknown or other
  modified_base (568)..(570): a, c, t, g, unknown or other
  modified_base (625)..(630): a, c, t, g, unknown or other
tagaaaagattacattgaaatagagttnnntttagggcacaaagcccaacattaggaactttaaaagttattgtgagatttgggtttgaattgaagtgtgtaggtgggtttttgtgttttctacactaaaccaaaattccgattcaaggggacctgtaggaaccagaattctggttggtccccaagaaaccccacataacaaaaattctagttggggaaccggtctaccagttggggcattttagagaaccctagtttttcttgtttttgcaatatttagggtattgccatgttatccaccgataggaaaacttttagtttcaactttaagtctccaaaaagtgatttagcgtgtcacccatcaattttacgaataatgtgatttaggggactgtaaatcgtcgagcatctattccactcaggttggctggcacacctgaattcagaaacgaggtaagattagtatgatggtatgcatacgtgtttacatgtttagcgtacatgttagttaagcttgttagattacattataatagcagtatcagtatatttagtattatattggatnnngataaatgtatgctagcttaagtactatttgcagtatcacatcggtacgactagnnnnnnactagcgtaccgagtatagactgatattatggtcgatagtatgtactacttggcagcatcacatcggtacgactagagtatgactagcataccgagtataggctgata

SEQ ID NO: 144920 - DNA, 512 bp, Cannabis sativa
tattttattttgatatttagggttgtgaaattgaaaaattcaaaattgggtgaaaattccccaaaaaatcagattttggtgcaagcacctaggctgccgaggagacaggctacacgcatcctcccatgcgcgcgcgggagaaggactttgtagggtcctttgtgcgacgtttctcggcgcttgcagggtggtgtctgtgcatgctcctatctaaacgtgcatatcatgtctgaagacacgggtttgtccgaggtaatgtgcgcatacggggttgcttgtccgagggtctggtgcaattgagcaccaccctcgacaccccttggactcgatttttcaaaacaccataactttctcaatttttatcggaatcgaattctgtaaaaactaaaattgcataatttttcacaaagaatccaaataaattatttttagaatgaaaaataaattcttttcatggaaaaaatttgtgattcatatacaatcatcaaatcacacataaaccaacatgaaca

SEQ ID NO: 144921 - DNA, 678 bp, Cannabis sativa
ataattagagaccttaatgaagatgttaatgaataatttatttatgttttctaataatttagtttaattttgagacaatattgtaataggattaattttaaatttatttactttgagacatttttaaattattcctaaattttaatgaattattataattatatcaattggaataatatttattatatatttatatataaataattatttatatatttaaaattattagaaaaatattttttttatttctgattacttgtagcggcgtgagtggggtttttcattgttcttgtaaatttttttatttcttgtttttttttttattttatgtttatttcttgttatttattgtctttttttttttgttttgtctcgtttaattttagggaaaggataaatcccctgtcaagatttttccatcaacaggtctgtttgaggaaattattgccaataggattgtagaggtgtgtgatttaatgcattctgttctattttttttccttgttttttgtttttatttattatttttgtgttgtttaatgtttgttttagtagtgtttttgttctttttttttaggattgggagtccaagtatacccgatctcaatactaccattctagagtagtgacatctggttattactttgtaattgaagatatcaaaaaagttctaactaa

SEQ ID NO: 144922 - DNA, 709 bp, Cannabis sativa
ctggaataagctaactgagacagtttgtcgccacaaggaaagttaatctggaggtcagcgccttgactaacatcaagcagcggcctacggaaacattgaaaaatttcataaagaggttcaaggtagaagcctcaaagaccaagaaagttgatgacggacaacagcttgcccttcttcaagtagggatccgtacagggactccgttctggaacgagttacagcaagaaggagcctccaaccttcaagactttcagaaaagagtccaaaaatacatcaacctagaagaggcccagatagtggcctatgggggatactaccctactgggatagcgggatatgtacccggagctcagctcccaggaaccttaccagcaaccgctccatcgatgaacggcatacaattttccgctacctccggatatagtcagggccaggcccttagcccctgcatcttctcactttgggaatccttcagggatgaatggacaagccccgtcgcactgccccggccgcaagcttagcaggtccctctcaaggctctcggagcaagaggtcctcaaaaggtagcaaccgggcggaggataagcggcagaaaatggggtacactccccagtatacccagtacacggagctaacggactccccaaagcgtgtgtatttcgctaccaggcaaaatacacactaccggagtgttgggttttatgcccta

SEQ ID NO: 144923 - DNA, 828 bp, Cannabis sativa
cgatagtaagatcttttcgctttacaaacttgtcctaaacctcttcggtttaaggtatctactactaatttacttcccaaagtggtagtaaatcacaccgttaaaaattttcaatcaactttaaccttcaccactgcctcccacctaaattctttcaaaagaaaagtatttgatactttcgtgatccgtatagacttcacattttcaccatatagaaaatggtgcccaactttcaatgcaaaatgattactgtcaatccaatatcatgactgaaataccacttctcatattccttcaatagcctaggtagttaggcaacaactctcctaaactgtgtcaaaatacaatctaatcttagaagtatcacattgaatcacattttctcctcactggctaacaatgttaacattggtacaatagttaacctctgttttcaattctttcaatctaattccactaagggcgttgacaacccccaacaaatattctgtagcatcctgttaatttcagaaaaccttaacctttattgtaaatttaggatcagcgaaatttgcatttcttatatttagcataaaactttttcttctagagacgttacaacatcatccaaaggtgtctctcatattccttccttggatcagaagaaatcacaattaccttactaaagaaaattatgaagtcatcggtacgaaaactgttttaagaatatcctcctttcgagtcttcaactggtactaaccagatcgaaaaccaatcctagagaggatgatccttccctaaaattattcaacataacatctgtccttatcaaaggatacttattcttca

SEQ ID NO: 144924 - DNA, 1059 bp, Cannabis sativa
  modified_base (696)..(698): a, c, t, g, unknown or other
aatgatcaagcaccaaggcatgctcatgttacaaaatcgccccattgttggtgtgccatggggcagcatgccacattctcccccacttaatttttcggaatccttgacgaatatggtgcatgatcttcagtcttatgcataaactgctgcaagtcctccgccttctcccagcgatcttgtcatcagcgaggcccttccatttgaccaggtactcttttctcttctttctctttacacgagcagttctttcagcaaggatttattctagttccctgttgcttcgtcgttgaatgctgatgtcttccctggtagactggttgcacgctggatcttcttgatcttcttgatacggcttgaggttgctgacgtgaaggaccgggtgtatcttcatcttagaaggtagttcgactttgttggatgctaggcaaactttgcagatgactggaacagggccctcatatttgcgtacgagtctgatgtccttgtccccgcagaatctcaattgttctggtcgtagtttgatcaacactaagtcacctgccttgaagtccagcgatcggtgattttgatctgcccacttcttcattcttcgtgaagctttctctaagtatgcttgggaaatctctgtgttcttcttccagtcttttgtaaaattgaaggtccccaaattctgtccgtggtattcatccactgtgnnnggtaacagtggttgctgtccattcacaacttcaaaagggctcttgtttgatgaagaactcttctgagagttgaaaaaaaattgagctacgtctagtagttgttgccaattcttctagttggaattgacaaagtgccgcaaatactcctccaacatctcattgaatctttctatctgcccatctgtatgtggatggtagctcgaggagatgttcatttatgacccaagaagcttaaatagtttagaccagaaggtccttgtgaatcttcgatctcggtcacttactatattctggggtactccctagtacattactatatgcttgaagaaaagttgagttgtctcttctgccggacactgct

SEQ ID NO: 144925 - DNA, 801 bp, Cannabis sativa
ttaacacaaatagtattgaaaaatctcaaaagtgtaagggtctcaactccaatttcctcacgggtattgaaattattcgtattgggcgggtgacactcttttggagttggaaatgtagcaattaacgcacaaatgagagaggggtaaaatatttttctttaggaccaaacaatttgaacaagaattgatcacaaaatagacacatcaaaccattagaaattaaatggcatataatctttgggatttatatgaaacacttacaaaataagagccaaaaaactaactactaaaatagaaaagtacaacgataaacatatgtatatatattatatatttctttttttttttttatatattattaagagaaatatgatgtttctctcttttcctttttttttttttaaataaaatactaaattgaaacactttttttagaaagagattaaaataatgttattctagttctctctccaattttatatatatatatatatatattatttagaaaagagggagactacttaaaaattgaaataaaatgatgttgctcttgttctatatatatatattatgatttttttttttttttgatttactctttttttttatttattattttttttttttgacaagagacaacatatacaaagaaataaaataagattacaaagaaatataataaaggctctttattacaatagaaattaatccctctagtaaatgtcatgattgaaattctaaaagtttaactttgccaactcaaatgaccaataaaaattcaaaaagttattttctcaactc

SEQ ID NO: 144926 - DNA, 525 bp, Cannabis sativa
  modified_base (232)..(233): a, c, t, g, unknown or other
ggtctttagtgttggccaagactctgcgtagtactaaatctcctaccttgaagcttctttccttaactttggaattaaagtatctggctactttttgtcggtatactgctaaccgtatttgtgaggcgtccctacgactttccaataggtccaacgattcattcatcagctggtgattacttacttggttgtatgtcgctcgtcggtggagggtgggtctagctcgaccagnntcatcgcatcatacccataagcaagggcaaagggggtatcactagtagttgttctttctgtcgtcctatatgaccacaaaacttcgggtaattgttctggccagcttccttttgcttcttcgagtattttcttcaaggtgtcctttaaggtcttattgaccacctctatctgcccgtttgactgggggtgcgagaccgccaaaaagctctttactatgccatgcttaatgcagaaatttgtgaacaggacactatcaaattgggtactgttgtcagataccaatttatgggg

SEQ ID NO: 144927 - DNA, 549 bp, Cannabis sativa
ttttaggttaaataaattatatgttacacaatttatttaccaaacacctaatacatattattcacataataatatatattactacattttaatctacacttattatattataaaataatataacatcaatttgatcaatattttcattggtactgttacatcttatattatagtttgtctttagtacttgtcatacattacactgtggatatatatatagtagacacataagataattaatttaatatatataatgttatataattattattattaatgataataataatattataatgtctcgctcccgagatacctggtcatggtttggttttgctcaatatatagtaaattggatctccacacagatcactaaaaatcataatgaagaaatttattcaactgctacaattcaacaaaaccatatatatagcagacgtgagcaattacgtgagaacagtgaacttcttttttctttcttaactccaatggagaacagcaacgagttatagggcccgtttggcacagcttttggaaaagctaaaagtt

SEQ ID NO: 144928 - DNA, 1024 bp, Cannabis sativa
cgatctccttttctgttctcaactaatcctatttgtagaacttatttttaatttaatttaatttttcttttattagcttcaccatccatgtaatgtaataggtgacagaaaatagggaagtgggcagttaaatagtagagagagtctcctaacttggctcttaatttgactgtctattttttattattattttaaaatcaattattcctttatatttttttttttaaaaaaagaagtaattataatagaataattttatttttctttctctcattcaatagatgccccttcaagcaagtgcgtgtcatttatgtacacgtgtcttgcttgagaattttgtattttattttgtctaacctgcttttttttttttttttgtctaattttgggagacttggctctcaacaagctccaaataatttgggaagagaaatagaggttggaccatcttattgacgctccatttcattgattgacgttaaagcatccaatgatcatcaagaccctgtttcattatgtaagattgaagatgtaatttcgggtgacttacaatatcattcttcacttgatgataatgttgtccaacacacccgaggcttcggtcccgatttccaagctaaagttcttgggggatattgacaataaaagggatgttgatatggtttaccaagtaactgtggacttttatccaagcctccatcgtgtttcaccagacaaaaaaaatcaatagaaattttttctttcaaggacatgctgtatttgtgacatatcttatcgaatggacagaccttattttgcatacaaatcgagatatttttaatcagtctaggatttatggagctgtttatatatcaagatatccattcaattgtgaaagatctgtatggcaggatttttctaaactttggggtcctctatctaacacatttcatcatagcagcggtgagatgggaatatctctgtatgacttgaaggttattggagggttacctattttaggaattccttatgaagagttcatacc

SEQ ID NO: 144929 - DNA, 559 bp, Cannabis sativa
tctcccaatttcgcctataaatatattattggaagaatttcaaaacacatctcttcacccactacacatctcttcattccataactctctactttgcaaaccatttcactcatatttctatcattttctttctactagttttacattttgaagagcatgtcaagtatgtcgtaatttttattttaatctagttatgagtttctaatatttttttcaatattattaagatgataatgaaacaaaatgtaactagacaatatttattttttaatgctaatttcctatttgtgctataaggtttatggatttttctatcaaaaatatgtctttttcatcttcaatatcatgtattttttattgttagagcatgtttctacttagttcttcattatgcaaaaatataatactctttgattaaatgtctttcattaaactgtttacatctaattcttaaaacataagtatcatattttgcctaaatatagtttctttgattttgtgtagtttcattaaattgtaacacatttaatgcttggaaattatatcttatttaagtgaa

SEQ ID NO: 144930 - DNA, 834 bp, Cannabis sativa
taaaataatttccaacagaattgtggtgtggggagcatttttgggttcccagcactaaactggtcaaccagttcaaggggacctgtagcaaccggtcgactggttggtccttgggaatcgaactttcggttgggatccggtctgccgattgggccactttccagaaccctaattttccccgttttatgttatttagagtgtttgcatcctattcatcgagagggttattcttagttttgattttaaattcccgataagcgttttagggtgtctctcatcagtttctgaatattgtggtttagggcccagtaaagcgtcgagctgcaattccactcaggctgaccggcacacctgagcacggaaacgagataagttagcataaatgatatatatatgtgaatgcatgcttattattaattgtttacactactaacactaactgaaatgtgattttaagggtgttagtacagtgtaggatattagggtagtatgttaccaacacgagtaccaaggggtacgttgtgcatgtggtacaacacttagtaactcctcggagtacagtaagggccgtaccaacacgaatacacagttggtactttagtgcatatggtacaatggtcgtacttcggttgagaacgttcttaaccatttggtgagctcggttgtcgagctcaagacggcttaagcataaagccggtagagcattgcttatatatatgttatgcatttcttattaattctgatgactcatcagtttgctacattgtgtaggtaaaggaaaagctaagctggaggagcagtgagttggagcttggcagtgattgtacatatcgc

SEQ ID NO: 144931 - DNA, 706 bp, Cannabis sativa
  modified_base (57)..(59): a, c, t, g, unknown or other
  modified_base (674)..(675): a, c, t, g, unknown or other
aataccttatgtctaaatctatgtgccctaagaccaagttagagcaagaagagatgnnnaatgttccctactctaatgcagtggggtccataatgtactaaatggtaagtactagacatgaccttgcttatgcaatccgtgtgctaagcaggttcatgtctagtcctggaaaagagcattggaaagccatgaaatggcttatgagatactgatcaggtacatctaagttgggattggtctatcagggtcaccaaacacatcagaacattgaagggttcacaaatgcagattatgcgggggacaaggacactagaagatatccttcaacctactttttcttaacagtgggaaattgtactagttggaaagtacaattatagccagtagtggcattgtccactaatgaatctgaatatatagctacaacagaaactattaaagaggccttatggttaaaaggacttatggaggagctgaagttaatgaaaaaggctcctataatctactccgatcgtcagagcagcatctatttgtgtaaaaacccagtttttcatgacaggacaaaacacattgagataaaatatcactttatcagggataaagtttcataaagacagatcgggatagacaaagtgcctactgaagtgaatccaacagacatgggcacaaaggtnntgtccctcaataagtttaagctttgcttaag

SEQ ID NO: 144932 - DNA, 1099 bp, Cannabis sativa
caagtctgtacgagacttctgaagttgcgtgtagacttcatccgagctgtctttgcgtttggatgggtgacacatgtcaggtgcgtctgtttgccactcgatgtgaggctgactaggcgtctctttggtttttgactaataaatgctctgacgcaatcaatgcttcgaaattcgattttctctcaccacgtttgacggttgcacttgattgcttttgatttctaatattcacttttgggggaaccgaggcgtctgaggtttttaaaatgattacccctttttgttgtttcccctataaatatgactgagcattgttcacaaactcattttcaccaaccttctttgttaagcaagttcagagcaaaaatagaggtttttagcttcaagtttgttgaaaatttttcataagaactgttcgttcagctttgcgtaaactgaatctagatgtcgatcattgagtaagttctagatttcttttacttttactttgcacatttactttcagaatgcgaccttaactttgctgtagaaaatatgtagaaaaccctaggttcaggaactctgcgattttcctttgtaatgattcatgcgacttcaccattcatgatgcttgctttttgactgcacaatggctgtctttcatcttgtttattcaaagcttcgtgattttttttccctaactatcgaaaattttaaacttatgagttttgacttttccttgaatatttctattctttaatctgttgagtactcttggtcgacatatttgcttgtttaatgttcgatatcccgaccaaacactcatctcgcgtgttatcttttgtagattaacctaggtgatttttggggaagcgaacaccgaatcgaccaggatttgcttcaactcttgtatgaggatcaccatcctctttgttcaagtctgccctcttcaagcgatgaacattttaattcaatcttcccgtccagccacaggatgatcggtcgcactaaacggacaatgcattaagtcaacgcgtctgaccctcatgtggcccagcacgccaccttgcccagcgccgaacaggatccacccgtgcaggaggagggggatcatgaaggg

SEQ ID NO: 144933 - DNA, 533 bp, Cannabis sativa
tttgatgcatgattagttgattttaagcaagtatggagttttaaactaaaacttgggtttttatgggtgatatgttgtttttgcttgctgtaggtactgtggttattgttgttgtgttatgcaatttagatatgagtttttatgtggtttaatacatgagttagcggttgtttgaagggttagttaagttttgagtttttgaactcaatcttgaaccttcaatggtgaaactcgtttctgtgattaaagcttgcttttattgctttggaattgttcattagggtctaattagtaggtttggaaggttgaatgaagtttggggtcgttttgtgtgagaaatgaaatttttaaggtttccggcactgaaccgaaattccggtttagtatgactgtaggaactggaattccggttggtgtcctgggttccgcccagtatcggaattccggttgtagaaccggtctaccggttgggaaaaatttaggaaccctagttcttcccatttttgtgttatttagggtattgccatattatt

SEQ ID NO: 144934 - DNA, 747 bp, Cannabis sativa
  modified_base (53)..(60): a, c, t, g, unknown or other
aactacttgtcgcttactaaattagacccactgtcgttggctaaaagcgaggnnnnnnnnttggtgctttcattgagagtagaatcaagaatcgttcttcattcataaactaacgacaagtacgatggtggtacagactcgtaggggtatggttgatctggcaaatccactggcggtggatcttgcattgcagaacctaggaaacacaagggttctgcctgctgttaatcccgaacagccgtcgaacgtgggtcatggtgcgatgactcctgtggatgaaatcgcacctagtgtgcaagacacttggaatacctgttcaccactcaaccagggcattcataacacagtcgtttcgtctgccaccaatgttcggatgactattcaagatgatactgagatccaaaacctccgcgctgcagtaaatcttgatcaagaggaactccgcgctgtggtaaatcttacgttcgaggaacaaagacacatgtttgctaaatggagggacgaagagatggatgcgttaagggctcatcatgcagagattgacaatcgtagtcggaaagctactgcactaatacgaaaagcttaccaaattgtcgggcaacaacccccgaatgtcatccctctcggttaaacagatccaatgatgaatacttcccagactataatgtgttggattttgtgacctaaataaaatccatttcaatataatcagacttactaattaataaagatcagaaatcacatttt

SEQ ID NO: 144935 - DNA, 631 bp, Cannabis sativa
tacggcgttccaaacgagctcttattagaaaattggattttttagtgacatacattgagtaactctaaaagtgtatagtaacacttcaacacgtttacattcactttttacgtgacactataagcgtatagagacaaattttctaaaaagtaacagcaacacaaataaagtatcactatatcttttttttatttatttttattaatatttttggagatatagtcacatacaaaaagtgccactacattaaatatttttctaaaaaaaatatttaattgttttaattcaaatttttatataaataattattttaattatttctttttaaaaattcaatttgtttttgggcagaatattaataatttttttttttaatttatcaaataatttagctgtttggtgctcaaaattaaaatggaaacaaaatgaaaattttacacaaaaacttattatttgcaccctaatattttaaaaaaattataaaattattataatgaaaaaaaaaatccagatctatatacacaaaatacatgtctgtacaatatcaagaacaatactaacatatataatacaaatgcaagaaaatctgatacatttgttgggttttatgcactaaataaaactcatttca

SEQ ID NO: 144936 - DNA, 798 bp, Cannabis sativa
tagtacatgttaaagttcgaggggaaaaattactaattagccttatcattactttagtttaagttttatgatacatcattggtatgtttaatgtgacatttttttcatccttaagtattctaaaatattatttcaatataatttgtgagacttacgcctcaaacgcctcagacttacgaaattaataactagtaactaagtatagtatactaaattactaactattaactagtcctaactctaccaaaattttaacagcataacgaatataattgaacgtttctaaaatatttaaagttattaataacaacaaaacacaatttaaaataatataaaacaatcacaacaacatttagcaatacaaaaatttaccacccatccgaccgcagtacatgtattcccagaacctacttcactacggatgaatatgtaagatattcaaactcatctaacatgcatattgttccacccatcttactgcaatacaatatatcgcaaaacctacttcactacagataaatacttaagatattcaaactctactaagcattcatgattaattaataataaaagttagtaaatgtgtacctcgagctagctagaaaccgatcaacaccaaataagtgggatccttgcaaattgacctcacaatctacaatgtaaaaaatactacaaaattaaaaaaattatgtatttaactacttattggttatataattaatgagtaactagttactaactagttaactagttagtaataagaatacattaataaggaatgaaaataagtaacgagtt

SEQ ID NO: 144937 - DNA, 529 bp, Cannabis sativa
ctccagtggctccagtcgctcctcctcctgctccttccttctttctttcttttgatttttgtgtttcgttggtggtgacctagtagagagagaaaatgtagagttgaggagaggcttaattattattgtgagtaattgattggtttggtgaggcgttggtaaagtgaggtgagctagtgaggtaagtgggtgtgagagaggagtgattgattgtatatatataaataaagtaacaatgaaaaaagtaaaagattcctgccacaaaaaaaataaagtaaaattatttatatataaatgaaaaaacgattaatatatattatataatatatattgaagatataatatattttaaaggtaagtaaatgttagattaatggtcggttacggttataaccgccagcttattggtcaaaccgtaactgaccgcagttacagcggtgtggtcggtttttttaaacggtttcggttatgatgtggcgccattttctcggttttttaacagtcggtttactggtcggtgtcggttttg

SEQ ID NO: 144938 - DNA, 533 bp, Cannabis sativa
  modified_base (190)..(202): a, c, t, g, unknown or other
  modified_base (250)..(275): a, c, t, g, unknown or other
aagagttgatgcgtgagattatttgggacaagttttaatgtactttatcaatggaaatacacaagttttaatctgatcatgcatatgctgataaataatggaaattcaaggcaaaaatatacaattttccatgaagtttattatatttatacattaacaaatagaatttatacattaaataatcatgaannnnnnnnnnnnnaccatgcaacataaaatattattttttatctttattaattagtaaatnnnnnnnnnnnnnnnnnnnnnnnnnntagggcacaaaacccaacactagttcagttgcattatttgtgttattgaatctattagttaaagtcgaccaaatggttcttcccgtgacgtataggtggagaatatggtagttcaattgagtgggagcgccaatcatagatacagaatctatagtttctattcgaatatagaagtcaaattatgatttctgtcgagtttggcttaacagagataattggttgagtactcatttcagtgattatattagttcactgaaa

SEQ ID NO: 144939 - DNA, 680 bp, Cannabis sativa
tattttgtgtgcaaatatatttttatataatctaaaataagatattttttatttttttttaattaagtagcaaaataaaaataaaaaattttctcttattattcattatttgatcaaaatttaataatttaataattttacaattaatatttataatttgatttatttaataattattaatgggtaatgcccattaaaaaaatgtttcatatatgtatatatatatccaattaaataagactgattatagttacaccatatcacatgataagagtgttcgcggtgtgggtggtgtgagtttagattatcatatggtattttcaacagccatcgaagccatataagcatcacaataccacaagctcagtattaatatcaatcaaccaatttagcttgcatattgatgctaaaaatcctattgaataaacataattaaacttgtgagtatattaaagtaaattttcaagagtaatataaaataataatattgcaatgatgctaagtttatttactaatattttaaaaatgtaagccaattaaatattcctaatatactaatatttcaagagtaacataggaagtaaaataaaaaataaaaaaatattaggaataaacttattattttatattactcttgaaaatttactttaatatactaacaagtttaattatgtttattc

SEQ ID NO: 144940 - DNA, 733 bp, Cannabis sativa
  modified_base (650)..(650): a, c, t, g, unknown or other
ttttttttttttaattttgttagtttcctttttggtggcattttcggatatgggttggtgtaatgtatttattttttttagatttattggcgatatgttgtttctttttctatttttggtaacctttgactattttttgaagtatttttttggtttcttttttctctcctcacgtggtgaccaaggtaaggaagttactttacatttttctcttttttttttggttttttgggtatttatttttaaatgttatgtatgtccaactactcaccattcccacgatcaccactatccacttctctctctaatttctttcaaaaagtctaatctttttcaagtttgagagtgtgttttttctaggatttcaaagaaaaatggccaagaccaaaaatgttcaaccttccaaaagacctgctcgaggttctacctctgtgtctccaccatcgccacctgtgtcacctgttccagtgaccagagctccttggtcgtcatctgctccaacaaaaactgccaagaagtcgaaatcccaagctcgaaagttgacttacaatctcagttctcctctgatcattgcttctccgattttaaccccaactcctgggcttggtaatcatgatgaatcctgtaacaccctaactagactaggcgtnttacgtcatttttaaacgtactgtgcagctcgttgctaatcaaagaggtttatggaaatcgtgattaaagatcggaagagcgt

SEQ ID NO: 144941 - DNA, 750 bp, Cannabis sativa
  modified_base (298)..(303): a, c, t, g, unknown or other
tagaaatcatggaaagtgctagcagttttcattactatataatatacatactggtaggtcattacatgctcaacatgtatatatatatcttaacgtctatgcgagaacattttctacataattaagaatatttatagctattcataatcaataatctcatcttttcactaaacatacatttgttcaatacataaacacataatcttagtgcttcgtaaagcaccctaatcatacatcattatatacactcaattttagtgcttcataaagcattctaattcacacattaccataaccnnnnnntctcagtgcttcataaagcactcctaccactcgttatcaacaagctttgtatgtcactatcgttgcccgataaagaaaacgataactaagaaacctatctgcggtctcaacgagtaattactcataacggtaatgaccgtatccttttagtcgatcatattcgagtcacaacgataataatcggttgatatcattaccctcgattataatcgagtctcaacgatgataatcatttcctatcatttccctcgatcataatcgagttacaacgataataattgtttcctattatttccctcgatcataatcaagccataaccaatacataacattaacctcgattgagattaaatcacaacaacatataccgagatttcaatcttaataaataccgtaacaatcataatattaaccttatacagtatttaattcttttcttacctcagt

SEQ ID NO: 144942 - DNA, 892 bp, Cannabis sativa
  modified_base (784)..(787): a, c, t, g, unknown or other
cacgtaaaaaatcctttgtgtctatactttttcctttactgtttttatttttctatgtgagattatcactgttaggctcatatttggttaacgaaaatctgcgttaacaattttgaaaataatattttaattatttagattttttgaaattaatttaatttaattaattactttaaattaaataaatcctatatccaactatctaatttgttgcatgtgtgtgttttatatattgtttattattcaaacttgttttataaaacctattattgtttgatctaaattgatgtggttaacttattgacagatgtaatgatctgattttgacccatagttcaattatcaataggtcaaataaataatttgtaacatgtaaattttgtaatcttctttcatctgtttataaaactagtaacatgataggatccatccaaagaagtgtgtgcttgtgcctatatgcttgccttgggtctagatgaatattgggagcccatttaattttgataattaaaatggactaggttgctaaaattaaaatgtcacatttgatagtttttatttaggtccaattagtattgggcttattcaatgaattacagttgtttaattaaggttaaattcctatccttttggaccttgtgtgagagttagggggccatagtagtgggtaccacatactgatccaagccctccctcacatgaataacccaaattgtgaaggtccatttgccttgattgaataattataataggttaatatcactagtttaacctaataaaattnnnnagcaacataattaattttaaaaaatatgaaatttttttccattagattattttgaaattaatttaagaaaaatacacttagtttaatgaaatatattcaagataa

SEQ ID NO: 144943 - DNA, 541 bp, Cannabis sativa
  modified_base (63)..(64): a, c, t, g, unknown or other
  modified_base (191)..(191): a, c, t, g, unknown or other
acgagctacttctaacaagtgtttattctttctttctgctattccattttgttcgggagtatnnggacatgtagattgatgcaaaatacctttttcttttaaaaaatttcccaagctatgattaaagtatttttctccattatcagtttttaaaatactgaattttgtttgaaactgattttcaatcattntgtaaaaatcggtaaaaatttgttcaacctcaaacttttcactcattaaataaacccaacaaagacgagtgtggtcgtctataaaagtaacaaaccatttttttccagaattagtggtaaccttagaaggtccccagacatcgatatgaaacagataaaacggttttgaaggatgataaaaaagatttaatgtaaggtttaagttggcttttggccaataaaaaactttcacatttaaccttttaaatagtgctggaaacaaatgttttaaataagaaaaactaggatggcctaatctataatgccaaaccattatttgatcataaacagaaagagaactaatgctacta

SEQ ID NO: 144944 - DNA, 986 bp, Cannabis sativa
cttcaatcccttcaaaaattttgttattcctttcgagccaaataacccaaatgattgctaggacagctgtcctccataggtatgatctacccttactcccccccaccttgctcatcattagagggactaatccgggaagtacccattgggtctcaaagacgttcaacagctttatccaaagtctttgggtcaaacagcaccccaaaaataaatgtgccacttcttcactactttttttacaacaaacgcaccatcccggggacaagcagataaatggtcgccttttttgcatcatagaatgcacgttaatttttcctaatgtcaccaaccatccaaagactttaactttagaaggacacctgcttttccataaggtcttcttccaaaacaactcgccagaattatggtttaaagtaaaccagttaaatgttgacttacaagagaaaatcccaccaggatttggtttccgtaatgtgatatcctctgatatgttgagcagtctaatatgttccagtagttgcagtaaacttaaaattccagcttgcaacacaatttcctacctctccttcaatggaaaccaaatcttttatactcatatttttcgcctttgataccactgtcaggtttggaaagcgactctttaatgttgtttctccaatccagataccttcccaaaatcgaatagttgcaccattccccactttaaattttaccaactccaaaaattcaccataaagatctgaaatatccttccaaggatctcttggagatagcctatgacctgatttagtatcccaacaattttctgctctcccataacggcttttgatcactttatgccaaagtgaatttaattctaatgaatattgccaaagccatttcataagcaaccctttatttttcatatctaacctaccaatagcgagacctccctcatgtttaggtctacacacctcctcccaggccaccaaatgatccccacccat

SEQ ID NO: 144945 - DNA, 1813 bp, Cannabis sativa
agatcaatctcctggcgttgccccacaagtttaaaatgcgaacctcgaaaatgtacactggaagagaacatcctctctcccacctcaagtatttcgtaatgaaaatggatctccaagggatacgaggggatgtgtgttacagtatttttcctgctaccatctcggaagccgcccagcaatgctatttcaagctagcccctcgaaagttcaactcatggaaggccttctcctcagaattccatgcacaattatcttcctctcgccaacttctgttgcatctagaagacttggtcgaagtcaagcaaagactaggcgagcctctttgaggatacatcagcagattcatgatggaggagaccaaggtttcacgggtaacataagatggaaagttgtccgcgatactggggggcattgaagtcctcagtgaactttggaaggacataaggaagaatggccgggtagactcaatgagaaattttctcgatcgtgctgaaggcttcatcaagctcgaagaagctattcagcgagcaaaaggtgaggaaaagcctggcaagtcaaaagctgcttccactggaacgtccgccgaactcccccattacccaaataattcaagctcaaatggaaaacgttccaacaacaacaacaggcaagggaatgggaagaaaggcaaattcaatggcaaaatcgagtaacctccccgagagaatcaagcaaagtacattgcatttaccatcttgacctaggatatcgaaagtgtttacatggccactcaattgctagccccgtataagaagcccgccccgatgaagaaggatgttaacaagagaaacatgaccaagttttgtcgatttcacggagattacggccacgacaccaatgaatgcaacaatctgaaacaggaaattgaattcttgataaggaaaaataatccgcacttacagaagtatgtcaaggccgatcagaatcagaggaacgataataaccaagacttgctacctcaaccggtagacggacatctgtaagtcatcattagaggcccgcacatagctggagattcgagcaaagcttgggagaggtatgctcgaacagcacaacacgagcaagaagaagtgatcctggccgtagaagaaaggaagcccaaaatcccacgagcaggagggcctaccataaccttcaatgatgaagatgctgtcaaaatcagatttccacacaacgacccgttggtcgtggtggtccagatagctaataagatggtggccagaaccatgattgataatggagcctcttccaatatcttgttcaagactgcctatgagaagatgggactccagctcaaggatctagcccgatgtctccagcctgtctatggtttctccggccaaggagtcgcacatctaggacaaattcgtctacccctcagtgttggacaagctcccacgagcatgactatgatggcacaattcctagtattagatgttccttgagcctttaacataatgttaggtcgtccaaccttatattacttaaaggctgtcacatcgatattccacttgtgcctgaagtttccaacgaagaatggggtagggtgtttgagaggaaaccagcaaactgcacgggaatgttataaccttacagtggccaaggctaagaaggaagtatcctccagccagtgcacagacaaggcaaaaacattaccaagtagggagcatcccaaggtggggatgaaatgtggatccttgttaggctaaaattagtctaagtttcgggtcatattttcggttagttttcactctttgtttctagttttagggct

SEQ ID NO: 144946 - DNA, 1238 bp, Cannabis sativa
aggtcacttaacttccagacgtgatataaatttatcttaggagttgattctaactactctagaaaagataaatgccaagaaaaggaattccctaagcatcaatagtaagaggtttcatgtatgctcttgtatgtactagaccagacatctgctattgagtgggaattgtgagtaagtattagtttaatctaaaaaggaacattggaagataatcaaacatatcctgaaatacaataagaggaactatatgttagttataagggatatgaattaaaaccattaagctataccagatcaaattcttagatttgtgttaatgctacaaagtctacttaagagatagtgattaatctggcggtggagcagtatttttggagaagtgtaaaagccaattcaaaatcactcactctgttagtaaggatgaataataaggctgtcctaaagtcagttaggaaacaattcaaactcgggagagtttgatacaaactttgtcataattctagacatggaataattgcttagtgtaactctgtgataaaataaatgcaattgctagatagtaaagaattttgtaccataagatgagtaaaacatatagatggagaattcacaaaatcatagattttaagactaaggaaaatgtgatggtggagaagattgatactaagtacagcttatcagatcctattaaatattctatgcaaaatattacatttgataaagacatcaagcatatgagattaaattaaaattcacttttatttttatatttgtacaagtgggagtttgttggaattttatgtcctaaataaatccaatttcattttaatcttatttactttcaataaagatcagaaatcatatcttcacattgtcatatgcttttttaacatgttttatacatgatcatatgtttaatatataatttctactaaatcccaaacaggtattcacaattacagtgatgtcatcacagtgaaaagtaattctgattatatgctttaaattattaagtctcacgatttattagtgcactagatttacactaacgagataatcaaggataatgtttacttacacttagctaagtggaatgacttttccaagacattagtaaagtaaaccaggattggatatatcaactatacatctaaccaagatcgtgttgggctttgtgccctatataaaactctatttcaatgtaatcttttctattcaattatcaataaagaaacaga

SEQ ID NO: 144947 - DNA, 977 bp, Cannabis sativa
tggttgtcccatcgagggtttcgaaaaatgagctgtaattattttgttttatcttatttatggtgccacatcacgaaactcttcggttttcgtgtaggagcgcccatggctgaccgttggatgggatgaccttaggcattcctgctgccacgtgtcacaatcccaatttatgagggatattggtaattaagcccgctaatacgaaatgattttctcattttccctctcattcccaacttcctcttctcctttttctctgaatttttagagatcctcatccatccttcacccagatttgctttttcttcctgaatctctaaggtttcagaagtgatccaaaccaatcacagggagaaatcagaaaaaaactaaaggttagtttctaatccacttgcatatttggtttttgattttgaaaaatgaaaactgtctttctgggaattttgacattttgagaggtttgaaaatgtatgttcgtagggaatacacatagggttgtatttttctgtttagaactggataatcttagaagaaaaatagaccttaaatttgtataaccgtgaactttaggaagaacattttgaatattcgcaccttccttacttgtttatttctagaatactcgcgggtattcggatgaacacttcgaatactcgcatatctgcctcctttacgttttcttagagacttaatcatttttacccgttgtttagaacttagggttttatattctttgggcattttgttgtgggaatattggttaagtctttcaaatggtgggtgtgtcaccgtattctaatgttcatgcctgcgatcgcatgttccttgaaatactgtgacacacccagccatttgcaacatacgccagtgttcctagttcccatataaccgtattcttcgactagtagatttgctcgaaacggtgggtgtttcccagtaacttcagggtcatgctcgaaaacgcatgccccttgggt

SEQ ID NO: 144948 - DNA, 504 bp, Cannabis sativa
acttttcttttgtaatggactatatatcatcactatattatattgtatacatatatattacactttagccgcagaagccgcaaacagagagattaaactcacatgcctaaaagaaacttttatacaatcatacaaataaatataaatttatgcatatagacttcaattcacagattgctaccttgctcatgcagtataatcccataataaggaaatgacgcacacatgagtaaataatatttttaataaaaatagttaaattcacttatcacatcaatgtgtgttatagttatgtatataatttatgtgcatatatcattatagtacatatacatatatataattttatatatattttgaaaaacaaggtgcatgagcatatctggttttgatactatagttataattcaaaatttttatgtgacaatatatatacaaatataattatttaggaaattttatgtatttttttgtaaaattttaaataatatttttttttttttt

SEQ ID NO: 144949 - DNA, 817 bp, Cannabis sativa
taaatgtaatgcatttgggccctccacgtgtctatatttatgagttaataacggaagtgatagtaactgtgtaagagaattgtaatattaaatatttttgccaccaaaaataaacattaggtatttaaatgtatacaatcaaaaacattaagtatttatgccgcaatttacccttaattttttatacgatcaaaagtttgttaataatatctttacatacatcatctttaattttatcttgaaaattgaaatggtggatgataatttttttttcttaaatgaatttaaattaaatactcttaacgataattaataatataataaaataattttttttctttaaaataactttttttttttatttttcagttttttaatcattagaataaaatgggcatagtttatttaatttgtattcatttaacatttagaataattagtatttttgctccctaaacttttggtactatttaattttaccctctaaagtatacggcttgttaaaaattcttccaaaaatataacaattacataattatgccatttctattaagttttgttacctttaccgttaaaattaaaattaatatttttactctctaaactttgactaattaatgtaaacttttatccccttttattacaaaaataattttaaaaattatgggggtgtgcaaaaagtcatcaaatccaattacaaccgactcatctaatcccaaccgatcctatagaattggatatccaatcataattgaatcggatcgaatgtaaattttaaaaatctaatcggatcaaatcagttgttggatgggacatc

SEQ ID NO: 144950 - DNA, 520 bp, Cannabis sativa
ggacaaggcttgatatatgagtggacttgagtgttatgtcccttcttcaaaacacgtagccacgaaaccgcagaaagggatgtgtgcttggtcaggcgctcatactaagcaaggggtaatgttgcctttgcactcgtacttcaagaaggtggcagatttttttcgcctttgtccgacccagtttactccgaagggcattaagtacttgtctgccctgttcgtcctctatgccattcaaggatggggtgtgtcgtctccgcacgaggtcaattggttctttgacctaaagtctacctccaagcaaagcaggttggggtacttctacatctctcagcaagatttcaagtggttgacaggcactgtggacaaggtcgttagcaggctcgggggttttattcatgagtattactttgtggaaggcatggacaccacctttactcagtttcaacatatcacaatatattatcgtccaccccttacactgactcttagggacagagctcagaggattctccaactg

SEQ ID NO: 144951 - DNA, 560 bp, Cannabis sativa
  modified_base (30)..(35): a, c, t, g, unknown or other
acaaaatacagggtccaattggtaactttnnnnnnacagagggtccaaaatagtatttttaaatttagcatatttttgatttactataatgccacataattattgtgattcattaacttttactaaattttacattctttatttaccatatcaacatcatataaataacaaaagaaaaaaaaaattgtatatctcaataagatattaaataaccatcaatataattatttttttttcttattttacatattgtcttgtttattagagcctaattgtaaatagtaggtcaaatataggacaaactcatttttgagtcaaatttagcacaaactcattttttgagttaaatttagcacaaattttaaatcttctactggagatagttttaacaccacatactaaaattttaaattcttttactttttttactgtgggacgaaattttttcaaaaatactctgtgtactgtaataagtttccacggttgttctacaattattttttagttgttttattgttattttaattgttccgttttattattttacggttgttttataa

SEQ ID NO: 144952 - DNA, 723 bp, Cannabis sativa
acaaatacaaaaaccaccattgatgagccaagcttgagttcaaaaactccaagcttgctcatccaactaattagcccttaaaaccttgttaaatcacttataaaataactgcaaaaaacatcacttaatcacagcagcaagaacagcaagctaaacaacatttcaccattaaaaccaagttgagtttaaaacttcaaacttgaataaaatcaactaacaaccaccacaacctgttctaatccattcttctgaacataattaagcctacaaaaacaacactaaacacatacagtagttgcagcaagtaaaacctcaaagcatgcaaaaatttcttttttcttccaactcaagaaatcaacaaaagctacaagaaacttaccaagaacaactcaagatctccaaatccctgctggaacaagcttgaaatgcagaaaaagaaaccaaaccctaattgctctaagggtggccaaaagagagagagagtttgagagagaaatgcttttctctttaattttccaagtttcaacttttaaataaatgagtaaaataacataataattaacttacttcagccaacataaatcaaataatcaattaacacaaaatccactaaaggaaaaaagcttatggagaaaaataaccattttgcccttcccacgcttaagggttaaaaggcacttaagggtattttgggaaattctaaattcccgaccaatcccgaca

SEQ ID NO: 144953 - DNA, 521 bp, Cannabis sativa
ggctaaaaatagcctaacagttggttccgtaaaacaaccaaaataaaaattaacacacaaaaaccagttacatgaaataaataaatcaaaaatagattccttgaattaattaaaacaaacaatcagtttctaaaataaataaattaatactcaattcttgatatgactaactcaaaaaccaactgagaaacaacacacataaaatacaacacggtctttgcaacttactagcaaacccatgtgttgacgcagtttttcgtcaacttatctaagaagattgtaaaaataaattaaagaggactgcgatgaattaatttgaccaaatcaaacggcaataaataaaatgaacactagggatttatagtagttcaacccccatgtcacaatggtaatggggctatgtctacttttgtttttattgattagatctagagtctcaatgggtaagtgtcccattaaggactagagtctcaatttcatctttgaggttttggcactcattagttgtgtggtcgatgtcc

SEQ ID NO: 144954 - DNA, 659 bp, Cannabis sativa
  modified_base (112)..(113): a, c, t, g, unknown or other
attacaagtttattttcattctgtataatataaaagtttaaattctgcgctattttgattagaaatctcgattaggggattagggtttcataagtattttgggtagcgtgcnnaattatttagggcgttacagaatctgactaaaacaagaactgtgtagagccaacaatagagatcgaatgtccctttgattaaagctcattatttaaaaataatgtatttttaattaatcattaattttaatctatatattttaataataaaaattactcaatttaagttggtctaaaattaattaaaaaatcaattttcacctttaatttaattttcaaaaatctaaatatatatatataatatatataattttgaaattatataaaatataatcatataaattcttaaaaatatctaatttaagttgttctcaaagggaaatttcatttttaatgcttaacaaaatatcttgtaacaaaatttagactcctaattaatttatacaattaaatgctattgttttcaatttctaccgaaaataccctccctttcactttccttgtctctttgtctctttctcttcctcactctctctttctctttctcgcaccaccgagacagtcaaactcaggcaccgagaccaccaaccaccaccactgaacctc

SEQ ID NO: 144955 - DNA, 667 bp, Cannabis sativa
cacttcagacttcagagatcagagaaacagtcaacagtcctccacaactaaagcacacgacctgtagagaaacaagagtctcttgccaagcaatgagccaacttaattgcagatcattttacaaaacaccaaattgtgaaggcataaaatacctctctgagaaacatataaaaataaaagaaacatataaatttttgtctccaaaaaatgaggactattgtttctttttatatttttaggctatattatgttattttattgtttaagataccttgaagttaccttttttttaatgtaactcatatgatgtttcaaatactactcaattcatttacaaattattttataaacttattaaaatagttttataaaaattaatttttatttatttaatcttaatcttgttgtaatggtaatgtttaaatataaaaataaaaaaatagtaatgtttaacacattaaattttatttaaatttaaatattgtttatttatttattaacaaaatataaaaatatatatatatttaacaaaaaaaaaaaaaagaagaagaaagagaatgtttgacaagtttatcatccttatttaaaaaaaaataattttactctatatgtcatgagtcacataaagacaaaataaaagtaatgagcaaaaaaaaaaagtataagt

SEQ ID NO: 144956 - DNA, 596 bp, Cannabis sativa
  modified_base (256)..(258): a, c, t, g, unknown or other
  modified_base (358)..(359): a, c, t, g, unknown or other
aactaatataatttgagtactcaaattatctctactaagccaagctcaaagcaaatcattacttcacttcaacgtctagatagaagttatagattctgtatctatgatcagcgctccaactcaattgaactaccatgtccttaatctacatgtcacgtggagatccattggttgactttaaggaacagattgaagaacataaataatacatttaaactagaacctaaccagctcaggattgagatcatttgatctnnnatcaactaggtgatattgaattgtgtagatattacggtaagtttattaggtgttattcaagttcagtatcggtctctttcgatgcatactccatacatcnnacccaagcttactttaaccaatgcgctggaaaagacatagcacttatccaaggtgcaagtaaactacattttagattgtcatattgttatacccggaattaagaaatggattagcaaaaccctaactagataactatgtataacagaggaattacattattatatagttcaatatatgtgattttatatgaattttaatatattaaagacccggttggtgagccaggggcattttgg

SEQ ID NO: 144957 - DNA, 594 bp, Cannabis sativa
ccattcgttcctggcgtcagaacagaaaagcaatttctttttctggtttctttttccaaaaacaaaaaatgaaaaattcaacaataaatcatagaaaaagcaatttctggtttcttgtccctatttctctctgtctttgctcactccctacaaacctgaaatcaacctctcaaacacccctaacctacacagagagactgagagagagagaacgcaagagaaaaagagagggaaagagagagacttacggaggtgggaaaatcgcaagagagaaagagaggggaaagagagagaccttcagttcttcaaaatcgcaagagagaaagagagggaaagagaactgttcagagaaagagagggaaaagagagctcgaaaatgaaagtatcattcaactgtttgggggtaagtgaacaataggagaatttgcgtcgttttctcacactcacaatatttttaccgtcggttttaaaacgccacataaagcttaagtgagccttttaaaacgacgttaataatgaacgaatttttttaatttcttgacttttaccgtcggttgggtaattagtgagagacatagaaccgacgcaatttgt

SEQ ID NO: 144958 - DNA, 704 bp, Cannabis sativa
gtttctctctcagtaccacaaacaggacaattctcattaggaattacaatgaatctgcttatattatctctagtaagcagtttttcattcactaattgccaaccaataaacctgtgttttggcaatatcaatctattccatatgttctttgcataattatcagtcagtacttaaacaaaagaaacataaaacagtttagagtggaatttacctctcctcaccgccgccttaacatcatcgtcacctataattgagcagagccggagaagctttttgaaataccaactagcatcttgctgaaagttgacagtccatatgcttcgccctttcaaatatatagcatcaatccatctgacccataggttatcttgcttgttcgaaacatcccaaaaatacttagccattaaagcaatgttccatttcttcccttccctaaacccgatgcctccaagtttattggggagacaagctttctcccaagaggggatatgcattttgctacggttcccattcactccccaaagaaaatccctgcagcatttatcaatggtcgcggtaactttttggggaagtaagaaaaggttcatccaatagttctaaacacccagaagtaggggtgttcataaaaaccgaaaaaccaaaaccgaccatcaaactgaccagaccgtaaccgaattttcggttccacgtcatcaccgaatttg

SEQ ID NO: 144959 - DNA, 523 bp, Cannabis sativa
atttttaaccctaatcatgtcactgatttctgtgtggagaactatgtcagtatttatttgcaggaatacagggatgcacaagatcggatatccacatcatttcacacctcacatcatccatcaccgccagttcaagttcccgatgacacatatcggctttctgtagatgctgccctttctcaatcaactaaccagcatgggtacggggcggtagtaactgactccaaaggaacagtcattgcatctttcacggctctttcgcacacagctcttgcccccatttttgccgaagccgaagccctccatcgagctctcctatggtgtcaagcagtccgattcccaattgccgtcatcacttctgactgccaaactttggtgcatcgtatccagaaattttctccagatcgttcagcactctcgggtctacttgccctcatagtctcctctttgtcgtcttttccaggtgcggtcctccaccacatccccagatctacgaacgtcgcagctcatgacctcgccagat

SEQ ID NO: 144960 - DNA, 1726 bp, Cannabis sativa
  modified_base (1697)..(1700): a, c, t, g, unknown or other
gtaaaaattacaatacctattgtattagctcccttatataaattagagaatatatataataaaacttactagaatggtgattaaactaaaataatttcttagttttatccatggagattgaattgactacaaattaaagttttatatttagggattttaagggattagatgacaaatttaatgagaaaagatagagataagtttatagaaaaaaaaaaattaagaagaaatagtgaggtgaagagaagaaaaaataatagttgagcttattattgaggttggttgagatgaaaaaatgaagaagagaagaagaaatgaagaagagaagaagaaaaatggtcttaaaggtggggattgaggctgggtgtttatgttttatttaggtgggtatatcagtcatttacttaattagttaataaaaaaattaaaaaattaaaataattttataagaaagttatttagcaaaagtagttttgaaagaaggttatttagcttaataacccgactaattatgttacaagatttgcccgattaaggctacatcagtcccaactaagctggaaagtccctatctgcacagatgtccacacagggacttggggggaaatgttatcccaaatttttccaacctgatgtggcatgtccacgtggctagcaccaattccacataatatctgcacagatgtccacacagggacttgggcagaaatgttatcccaaatttttccaacctgacgtggcatgtccacgtggctagcaccaattccacataattttataagaaggttatttagcaaaagtagttttgaaataaggttatttagcttaataacccgactaattatgctacaagatttgcccgatttagcctacataaatcccaactaagctggaaagtccctatatgcacagatgtccacacagggacttgggaggaaatgttatcccaaatttttccaacctgacgtggcatgtccacgtggctagcaccaattccacatgggagtacagctcgccaataagaaggccaagtcatctactcaacacttcaaccaacgagaggtccgagtacttaggaggaacaattaaatgatgaactaaccacctcaagggggctggtcggccacccctggccgaccttatggccaacataggctagctagcttttgggcatcatatggccgaccaccatgcactctgtagctgcatggccagccaacctttggcctagtaggttttcgtgcgcagctttcatttgtggatagcaagtcaaaccacgaattgggccttaacaaccaattaaaatagagggagaatatcagaaacttccctatttttgaggggaaatttagtcatttgtactttattaatttattatgtaaataatagctttatgtacctatttttaggagatattagggatgtaagatctactatattaagggcattagtcaatccttaaattcataagtctcaaaccctaagccttaagctccaagtctgataactcatctcatctctctctcacacgcccattgctctactctcacttaagatttttcaactgtggttctcacattgtaatcttaagagagctactttggattcaattactatagtgatgtaagtggtataatctctggtatcaatacaactaaaatgggagtaggtcgttatgttaggttttatgccctaannnnaactccatttcaatgtaatctatttt

SEQ ID NO: 144961 - DNA, 635 bp, Cannabis sativa
  modified_base (163)..(170): a, c, t, g, unknown or other
ctgctattattatcatctcttgaaaaggacataggaataaaaattcctttagatgactcccccatttcaagagatgttgaaggaatatttttagcaacaatgaattcaagaaatttagcagtctgagattcaaaaatctgcgtaccacgagtaggacaataannnnnnnngccttttgagtgcattggataaccaatgaaataacagcaaactgttcttagatctaactttttcaaattagaatcataaatccttatttaagctggacaccccatacacgaagatgattcagactaggctttcttccaatccacaactcaaaaggatttcaggaacagatttacttggaacacgatttaaaagataaattgcagtcataagtgcttcaccccataaaaactctagaagatttgatctactcatcaagcatctaacatatccatgagaatgcgatttctccttttaacaacgccattttgctcaactgaacctaacatagtgtattgagaaactacattattttcttaaaaatattcaacaaaaggccccatatgttgtttagattctttataacaaccataatattctcctctgcaatcagaatgaacaaattttatgactcttcccaatgattt

SEQ ID NO: 144962 - DNA, 747 bp, Cannabis sativa
  modified_base (647)..(654): a, c, t, g, unknown or other
ttcgatgttgcgcttcttctagaaggcatctcaagcagcggctttccatttcataagttctgtctcccatatattgggcacctccacggttgagctcttcatccctcgtcttgggattctgaccattcccacgctgagttctcctcgagcgcattttccgcatactaggaccaacgtcgggttgagtctccaaggacgtgtggtctgagcactgggaccatcctcaggttgagccctcctggaacgggtggtccttctagactacggattagtagatcttctagaccccgtgggctcttttccagaacgatggttattttcctcatgtggggtgttaatattctctggatttttagcataaaggagaaggtttttctttaaaagaggggaaggttttttttgagctttttcacagagcctctcaatgaaagcaccaaactgttaatggagattttcgttaatagaatttgagcctcacgatgataattcaacacaaaaaaaaataaaagctatagaaaaataatatatgaacacagggatttttacgtggttttacagttaaaattctgcatactccacgagttaatattattcagatttttgaatgtttttttagggcctctttcataagagttttttcatccctnnnnnnnnattgtttgccactatttataattgtatagtggtagttaattacaaagccgaccgaaatatgattacagtcattatccctaaaattgtgggatc

SEQ ID NO: 144963 - DNA, 1919 bp, Cannabis sativa
  modified_base (1461)..(1461): a, c, t, g, unknown or other
taactccctctacaattatgtatcgtgcagcttttctcctcattttctgagcttcattcctgttatctgggagttctccggtgttgagataggctgttattagcgtcatcaaatttggggatgtatcaatcatttcaatctcctccgtaccagtgatactgggtttttcaagaaattggatgaggaacagattcactttatcatttatgctgctactcgtgagtcgggctaatgcatttgcagttgtgttttcttctcttggaattttcttgagagcgtagcttttgaatcgggtgagcagatcatgtattttgcttagataagctatattctttctccccgagccttgtattccctagatacatgatttactaccactaactgtaagtagtcactgtagatctcaatgtgtttggcatgccattcccgagtaagttttagaccggcaataagggcttcatattcggcttcattgttggacgctttaaacctaaatttgattgctccgttcaaatgttgcccccaggtgtaacaagggcaatccctgcgctggacagttgatctgtagctgacccgtccacatgcagtttccaaatgggttcgcctttactgttgctcagctaagaattctgtactggctctgggttgttttctgaagtgctctccactttacccgtacatttaaccacgaaatttgctaaggcctgtcctttaatcgttgttcgaggctgaaagatgattttatactgggccaactctactgcccatttgagtaactgtcgagaagcgtccgattttcgcaacacttgacgtgatggttggtcagtgtatacccgaacaggatgagtgtgaaagtagggccttagctttcttgttgctaggattaggcaataggtgagcttttctatcaatgggtacctgccttcagcttcaatgagtcttttgctgatgtaatagaccaggtgttggatattgttctcttctctgatcaatatgacacttactacatgttccgtgatagccaagcatatccctaattcttctccgtccagagattttgagagtacatgaggttttagaagttgcattttcagctcttgaaaggattttttgcattcctccatccattcaaatatcttatttcctcgtaggatgttgaagaatggaacacacttgtctgttgactttgaaacaaatccactgagtgcggcgatccgactagttaaactttgaacttccttggtttttgtaggccatttcatatctaggagggcttgaattttctctggattagcttcaattcctcgggcattaacgataaagcctagaaacttacccgagctgatttcaaaggagcactttaggggattaagtttcatgttgtatttaccgaggaccttgaagcattcgtccaggtcatctatatgccactagccttcatggatttgacgagcatgtcanccacgtacacttccatattttgtctgatctggtcttcgaacattttatttaccaatctttatgtattccttgcattcttgagaccaaatggcatgactttataacagtacagacccatatctgttcagaaacttgtatggtcttggtctggtgaatgcatcttgatttgattttaccttgaataggcgtccatgaagcttaatatctcgtgtcctactgttgcatccacaagtcgatctattcttggaagtggaaagcagtccttggggcacgccttattaaggttggtgaagtcaatgcatactcgccattttttgttttgcttgggcactagtacagggttcacgaacatggccgagtagaaagcttcaattatgaaattgttcttgcgcagcttttctacctcttcttttagggctagggcccgttctttatataacaatcttcttttttgttga

SEQ ID NO: 144964 - DNA, 570 bp, Cannabis sativa
tataaataccttggcactctgatagcaaactgcaacgtcctaaaaattaggcacgctatgccaaccgattatgaaacgcgaatcccctaagaaaaggattactagaaaggtaagcgcgagaagtttaaactttatttgaaacgaaatgaaaattaaacttgcaataactttaaactttacaaataaccaaaagatacatgtttcgagatctcgtaaatattttcacaaaaatactacatgtctatttcatgatccgacctaagcggtaaaatcagagttacaaaatacatcactggtagacgccaacccgcttggtctagtgtggctccaccatgtacaagcaccgccaaactctcgcactcatggctaatcactgactaagttatcctttcctgcatagtagagcacccgtgagccaagccgagtaagacagtaaaggatatcaataatcacaaataacatatcatatacgttaatgctatttcacatttttatattaaatatagacctgagtgttacgcccacacgcctatttctgtctatgtggcatagacccacgtattacgctca

SEQ ID NO: 144965 - DNA, 592 bp, Cannabis sativa
ttcgtcccctcttctatatgctgcctcccagaaatggggtatgccctctccttacgaggttgcttggtactttcatttgaagtccacccccaagaaaggcaggtcggggtacatctacttctctcaaccaggcttcaagtggttgacgggcacggacgatacggccatcagcaagattgggcgctttgctgatgagtacttcatggtgtacggcacgggcatcactcgtacttggttccagcagattttgacctatcaccgccctcccctcactcttgctcttagggatagagctcaaaaacttgcccggcttctgggggaagaccgaaatattatcgtacgtgcaaggactttactcctaagtccatgacggggaagaagaggaaatctggtgctggcccgaccaaacgaggtcatccggagaatgaactcattcaacttaagcgcgaagctctgttgaagggaggtgcaaaggctgagcagtatgcttaggagcccttgaatcctaatgatgaggctgagggagagcaggtgactccactgaagaggaagaagaaacttctggccccgcccaggcctgctgaacatgcca

SEQ ID NO: 144966 - DNA, 911 bp, Cannabis sativa
  modified_base (152)..(153): a, c, t, g, unknown or other
ttcaaacaagtaattataaagcgtaaaccctttaaaattaaccgaaattaatctggaaatacatagtacaatgcaaacccatcatttcaaaagataattttttttgaaaactttttaaaaggtcttcgaccaaacctttttgacgaaagagnngtcaaactgttataactccctaaccaaacctttttgacgaaagaggggtcaaatcgttataatgccttgatcaaacctttctcacaagaaagggatcaaaaaaatataatttttggtttaaaacctatctgacgagaaaggaaaatcaaaagttatgtttagcgcataaagctgaatactaacagctcgcactaagggaaagtatttaacgagatgtcaaggtgtcttgaaaaaatactcaaacctaacacgtgggtagaagatctaactactcatgtaagtaatgaaaatatatacaaaatgacaagttcattaaaaatatatttgagtttgcttaaaataagatcatttctgatgatcgcgaggtggaatcaatgatgggttgagggtcggccatataagttgttcgtgcgtaaagtaggaaattaactgcttagcatcagaggaaaatgcaaagcaatggaaacccctaataaactttatgcatgtgattgtttaaattgtgaatgaaacgcaaacaatcatcaacatattaaagtttaaacttaaaagtatgaaaagcaaagttggcaatccaactttacaaatctgtctttacgaaaagtgtcgccaggggcacaccattctcttggccaaaaggccatttttttaaaaaaaaaaggggaaaagggagataaataaataaccaagtctacatgctgagagacttggacagatcttcttcttattcttcctcgacctcgccatcttcttcctcc

SEQ ID NO: 144967 - DNA, 614 bp, Cannabis sativa
  modified_base (469)..(471): a, c, t, g, unknown or other
  modified_base (545)..(547): a, c, t, g, unknown or other
tctagagtgatcgttttaagaatctaatgataactcgaatccacccctgaatgtacatctatatgtttgaatacagatgatcttactttcaagtggatacaggcatattttctctttgtagaggatgatcttatcaaaacgactatgaacaagatacgaaggccatagatatatgtggtggtttgatgaatcttgatgattcctaggtctagttacaataaagagttcttagaatagtccaagtgggttctggtcacagaatacaaaactcatattccatgcataaacatacagttcggatccattgactaaaaatggatattaacaacttgtgaaagttgtactgtattgtccaatgcatcatggaaactgaaatttaaaatttctctttggaatttaaaatttaaagtcaaagacttaaatttataccaaatatacaacaagtgattattctttcttggaccaccannnctaatataactctaagtttaagttacctctagtaagcatctacatgtaggagattctaagatcgaggatttatnnnattttgggatagaatgtctggaatatagtcatttgcgccattcaatttcatagaataaaatagaatg

SEQ ID NO: 144968 - DNA, 599 bp, Cannabis sativa
taaaattgaaagagtgaaaatatttttcaaaaacatattctataaaactgtttctagctacttttcaatttttttaattaaaaatcaaaattttgaaaaaaaaaagactttcattatgtttttaaacagttttttttaattaatgttttggactccgatcagtatcggacccagactcaaactcggccctggccctggtgctgaacctagcacccaacctagtcccaaacctagccccagatccagaccagacttaaataaaatcaaaaaataaaaataaattttacaaaatacccttttgttttttgattttaaaattgaaaaacaaaaatagttacaaaacacatttttattttttaaaaaataaaatttataaaaataaaaattctacttttatttttataattaaaaaattaatggattgtcatcaattatcttttcattaacagcaaaataaattgtgaaaatgattgtattagattgaataggggtgttcatccgatccaattcacacttttttggtcaacaacatccaatccgcactaagtacggatttcatattttggatccaatccgtccgcataatagtttaaatccaa

SEQ ID NO: 144969 - DNA, 753 bp, Cannabis sativa
  modified_base (231)..(231): a, c, t, g, unknown or other
  modified_base (408)..(408): a, c, t, g, unknown or other
  modified_base (639)..(643): a, c, t, g, unknown or other
acttcaaatttcttgtattgataactaatcagattgtagtgggttttatttagggcacaaaatccaacacaacctccatctgttccctctcacggctgctcagccttagccttgcccttacctacatatggaaatagcaactgtgagtcaacagactcagtaagaaaagcataacacaaaacataataatatcccagattataaccctatccccgtgtcccacacggtacngagtctagaacgttcatacgataatactatcgaccataatgtcatatgccagtcttactctagccatattgatgtgacagcatcaattagtatttcagccaacatacatttattagtaatcagtacaattctatgtatactattactgctatcaatgtactctaacaggcataaacnacatgtatgctaaacatgtaaatacatatgcataacattatactaatcttaccccattacagaattcaagtgtgttggccaacctaagtagaatagctgctcgatgaattacaggcccctaaatcactttattcataaaactggtgagtgacatgctaaaatataaagtaaaatttagtgcactatatattcatatatatatgcaagaatagcatatatatatatatatannnnnatatatagaacacttcttaatgggtaatacccattgatgggcactaaaaaacattaataaagtaacaatctaataatcttttatgatctaacaattatttttttttttaa

SEQ ID NO: 144970 - DNA, 504 bp, Cannabis sativa
  modified_base (85)..(100): a, c, t, g, unknown or other
  modified_base (337)..(352): a, c, t, g, unknown or other
tacaaaacgacgcaaaaaaaaaaggaagttaattccatgaaatagcatgaaaaactgaagaaaacgaaaaaatttgcaagtggtnnnnnnnnnnnnnnnngcatactgtccgcgcgcgtatgcagggaaggctggccgagttccctcagcgcaggcggctacatgcagcctctcggcacgcgcaagggacgatttcagaaaaaattgtgtcctaaccaaggaagctcggtcgaacacttgtctgagcgcgtgcatccgagggttgcaccctcatccgcgcgcgtagttgggtaacaccatcctgatatttttttcaattttcaaaaattcataactnnnnnnnnnnnnnnnnaaattgagtaaattgcttaattttttttttccaaactatccgataaaaatacttccagaaactgaacctcaattatttttcacgaaaattcacaaacatcaaacaatcatcatataacacatagatcaacatgaaaccatccaaatcacata

SEQ ID NO: 144971 - DNA, 767 bp, Cannabis sativa
ttcttgcaagtaaatcaattacccctaagaactaagccctaaatcctaaaccctaaatccctaaatactaaacccaaaaccctaaaccctaacatggacacggtcctagacaaatactcatatcgagattggaaccctagacccagacccagacccagatccaaacccaaacctagaccaaaactcaggacctaaacgcggacccaaacccagactagaacctggtctgggatctagaccttaactgggacccggatcgtgtcccgacccggacccgaatagggacttggactcagatcgagacttggacccagactcaaacttgaacccgtacttggacctagactcggagccgaactcgaacctgaactcggaccttgaccaggacctatgatccggacctagatgggggacctgggccccaaacccgaacctggacccagatttggaccaagaatcaagacctagatgaggcacttggacttgaaactaacacaggtttgtctaattccatttgggttgtggtagatagattcacgaagtctgctcattttctagcagttaaaacaaactattcagtggatcagttagcagagttgtacgttaaagaaatagtaagacttcacggggtaccaaagtctatagtaccaaagtcttactatgtcacaaggctaatttctcacactcaaattttccctgcgatggcctagattcacccaaatctagtcagccaacccaacaacccgttagtatgcacacacactcac

SEQ ID NO: 144972 - DNA, 936 bp, Cannabis sativa
taaatacaaattttattgtttattattaatttacaattttatgtaattagtaggcttactcattaatactatataaattagtcataaaaatagttatactgatataaatatagtaagttgactcattaatatatctattacaattgaattaagaatttgtatgaatttttgtaaatatgttttcaaatgtgtatattttttaaattgtgtttttctgcatattttttgtaattatttaagaaaatgtatacatttatgtaaaatgcccttaattcatctaaaagtatttttgtttatgggtggttgattaatttcttaccctataagttattattactttatttttaatatcttatagttttttatttttcatttaatatgcattttattatttatatttttaaaagtagttatttaataaatatttgttttataagtttttttataattcatgtaatatataataatacacaatttattagcccaaaaaattcaaactaaattattttaaatgaaactaaacattatttttttttatctcaatatataaaggaaaatataaataaaatgagatgtcattttatgaatattttttttactatttatctattaatattttatctattttataatatgtcttctaagtaatatatatattttgtaaaaatctcacattatttacaaactatgtgagtattatacttattaactacaagtaaacacaatatattttatttttcattaaaaaaaatactacaagtaaaatatttcttcattcacaccgagatttgtctaaaaattaatattgtttctctttataggggcaattgaatatcttacgcaattaattctatatatttatatataaatatatattcaattgatcaactttatataaatatccaaaaattaatatttttttctatacatttgatt

SEQ ID NO: 144973 - DNA, 795 bp, Cannabis sativa
  modified_base (241)..(243): a, c, t, g, unknown or other
taaggataataactcaaataatgaaagttatgagagttgtttgaatatagtagaagcaccatttgattgaatatatagaagagattgagcttataattgaagagaaaaaatctgttgaagtgcttgaaaatttgagtacattggatgctttctcaaaaatgatgatctcaattgggtgaatgaagaaatattcatcctcaattatgaaattattgaagatcaaatcacaatcaaagatgtnnntggtcatgaggaaactgaacaaccaattgagaggttatttgaggaaagtgagaaagaggtgtcatcggtggccgaagaatcacatgtagttgttgatttgagatcatcaacgtcactatattatgaacaaccaatggacccttattttccctaataccgcattctccatattgtattctttacgacctaccaacagtttcttcccaagctcatcatccaaagtctcttattattgatgcaacttttggttcaaactcaccgcatgtcaagcttgagggcattttcaaaaacaactttcaagttgtcttgcatgatgcttattatgggcgtcaaccacttgttgatgtggcatggacctaaggtaagttttcttctctttaaatttttgtttcacattggggacaacgtgaaattttaagtttgggggaagggctcaattttatttttcgttgtttactttatttttttgttttagttgttaattaagctaatgtcgatttttctgctgttgttatttgtggaatggattgaaattttaaaccgtgtgcttga

SEQ ID NO: 144974 - DNA, 638 bp, Cannabis sativa
acgtatagggttaatccctaattcaaaatttacaaaatatttacttggcattcaaaatataaaaattcacataaagctcgaaacgagctttctaacggtatatagaactcccaaatcggagtccggatcacaaagttatgactatttgaagttcgcatttggatctgcccagaaaggaaagggcgggccgcggcatgcaaaagccatgctgcgtcacctgggttcaaaaccgagaaaattcaaaaaccagaaacgattttcatgcccaaaactcatccaattcaacccaaactttaactaaacctaaaaccattccccaatacataacttatcaacacaaagagtttaaaacataaattcatgcattaaaatccaataatataactctcaaagttcagcttaaaaatcaaccaataacaagcttctcacatgagcatataccatcaaaactcaagccaaagaacttgaacttcaagcaaggatcaacctttttttgtatttttttcagaaatcaaaacaaccaataaacttaggataaaaacataaaaaaaccctttaatctcatccaaagtttatcaaaataaaatccattataagccaaccattttgttgacttcgcttttagccaacgacaatga

SEQ ID NO: 144975 - DNA, 915 bp, Cannabis sativa
taattataaaatgataagattaactttgtcttagaaaattttcaaatacgggtgttacaagcaccccctctggcggtggtggccttaatggtacacctagtagttgtctggccagtggctatagtttggccaattgctccatggccagcagtctgagcggtggtggtcgcgccgctgtttcccaggcctgggggttgttctccattatttccggcaagattgcttgcttatggaataatctgggcactatccatcttttcgtcaggtcgctcttgagatcttcgggttaacaccattttttttttggtgaaaaacttcaagattttggtcatagctctcaatgaaatcaccaaaatgttgactggatttttaaccaaccgacgcagagtcataataaatgagatttaaaccaaaatcacagtaataaatgcagttaatgacactagaatttccaataaatgtaaagaaatgacaccaaaatttaaagaggttcggccctggatgtcggttatagcctactccccttgtgttttattgatatgagttgcaaaagtcaagaacatgctctttaatgcaaagaatgataaagtatttatttttctaagtgttcaaaattgtggatcctcctcctaggtcatggatgaccccttatataggggagaggtcggtgcttctcgcttcaggagacgcgaccaacaaggagctacctcaaccgtctccttgatttttggaggtaattgaagtctaatttttatgataatatctcgctattttcgtggattaacaattgtctttcagcctttcatgggattggaatagtcactgacgacgaaggtctcctatgggtgtgacacggtcgttgaccaccttcgggaatgaagcccatacttgggggcaacacccccgagacccaac

SEQ ID NO: 144976 - DNA, 737 bp, Cannabis sativa
  modified_base (134)..(134): a, c, t, g, unknown or other
  modified_base (184)..(218): a, c, t, g, unknown or other
  modified_base (276)..(287): a, c, t, g, unknown or other
tatcgtggaacatatagagtgctctatataattgagagtgcaattccaaatctatagtggtgcaaggaggaattaattctagatcttattattggaagctttgttatataggcccatggtctccatactagttnagacaatactgcttgtaagacttacttaattggttttaattaatcaattnnnnnnnnnnnnnnnnnnnnnnnnnnnnnnnnnnnttttcactaagcaagggctcaattatgaagaaaagtgattttagggtttatttattannnnnnnnnnnntattaagtctaattaataaataaactaaatagaaattttatttgataattaattgtaattattaaattaatatttttgacattcaaatggttgaattggaaaaatatggtatttgtgacagaaaatgataaatagttgagaaaatagcaaaattgtaaatggtgggcacatcctaattgccgaacatttaaggtctttttaccatttatttattaaatttttagtgccatataattcaaacctaaacctagaaggattcctataaatagatagtgatagactcaaaactcacagttgatgcaacttaagcctttcagtcaaatttgagccttctctttctctctctctatttcgaatcctcctctctcgctttctcttcaattttcatcccttatagttatagagtacttgcccacacatagcaagtaagtactcaatcatagtgtgtaa

SEQ ID NO: 144977 - DNA, 521 bp, Cannabis sativa
gagagagagagagaatgaaagaaccttacaatacgattcagagagagagaaagatggatttaaggttttaatggagcggggctctccatttcgtggtcagattagaccattggaggtcgagacaaacaaagtgttagagagggaggtgctgttttttcaaagggaggaggtgttgcgttttttttgcagaggaaggaggcggtactttgttttttgaaaggagagaggaggcgctgttctaaaggagaaatagtagggttttgttatttgatatttagggttgtgtaatataatatattaggttttattttattagttaatgatggtacacattttttttattaattcaaattatataattataaaatggggacaatgaattaggactaagagattataattatgattttttattttttaaaatatgaggctatatggggacgcacattgtgtgtatgcaaaagtgtatacccacacgctatgcgcgtcactaaagccacatgttcacgtggctttagtga

SEQ ID NO: 144978 - DNA, 591 bp, Cannabis sativa
tgttgttgttacattgtgttttgtttgtatagttttttgtttaattttaaccggttttttcatgtttacttagattgcccaatgttatttgtatattttatcggtttattttccagtttgaaaggtcgttgtttaatgttgattttttttaaccggttatttgtttagttatcttatatatttttttttgttattaagttgtttgtattgtatatattatatagaaccttttttttatagaacatgtatttttggttcatgtttaaatataatcagtttcattttcgttgttttcttttgttttggtgcattttgaatatacccccggtttttttgttgttttttttttacaaggcaattctatattatgaaaattttcattttcattcaaaaccaattatgtttgaagatatagttcatgatcaacaaatattgaaacgattattggaacatacaaaatcaaatatatattttttttattgtaaatgtctctttgtattcaataaaactggttattcttgttgtgtctttgctttcttgcgccttggttgttttggttcttgttgctttggtggtagagctggattagtg

SEQ ID NO: 144979 - DNA, 622 bp, Cannabis sativa
ttccatgttggcattttaaacttgtggggcaatgtcaggagattgatctcaggtgagaaaggagttccgcgtgctcggtccaactcgagatcattatttatccgtccagccaagccatggaaaatatttttcagttcgtcaagctgtgcctgtacgactaggctaacctgctcggcattctggtcaatttgaatcacgtcagcatctttttgagtgggaatttgagcacgggctccaggctgcacgatcgtcgtgacattctgatcgtctactcctctccttctgttcagatcattccttaggtaatgagtcgcccccaacctttcgaatacagaagcgcctggctgtcttagcgattggtttgctttgttgacaggtggaatggcaccgttaacctggttgggaccatcaggtataacttctcccgatgaattactagacaaggtctgcccgcctacaactaggcccacgagtggaactcgtgaccggggatttggcggctaaacatttgtagtgtgggaagtattcattgctggatcttcgttcgtttcacccagggggatgacattcggaggttgctgacctacaatttggtagtcctttcgtatcagcacggtagctt

SEQ ID NO: 144980 - DNA, 639 bp, Cannabis sativa
tttagaattgtattggcgcaatagacggtgtacatgtgaatgtcataattcctcctgaagatcaagtactatttgttagtagaaaaggggtaccaactcagaatgtcatggtagtatgtaattttgatatgcatatgccgggtgggaaggttctgctcatgatacaagaattttttattcagttttacgtagttcaactttaaattttccaaaacctccccaaggttgccatctaaacacatttataaattattaaagttttataattttttaattatgtttttatattttatttgacaagaaaatattatttagtagaagctggatacccacaaattacaggtttaggaccatataaaggccaaagataccatcttccacaatttcaacgaggttgcaaacccactggctataaagagctattcaaccaggcacattcttctcttcaaagtgttattgaaagaacttttggagtatggaagaaaagatggaaaatattaagagatatgcctagttattcataccagaagtaagtaaaaataatgattgcatcaatgaccttgcataattacaatcgaagacatgcaaaacgtgatcgacattttgagaaaattagagacaatccagattattgtgcaa

SEQ ID NO: 144981 - DNA, 639 bp, Cannabis sativa
actctttgtggagagaccaatcctctcgaaagattgggaatttggagagacgagcctctcgaaagctcgatattgtaacttcgtgactgtttattagaataaaaatcatttgagaaattcattattggtatttattttgggaaatagctgatagaatatttttactctaagattattctatcagatctgaaatgacttctacaaggttcgaggttgacaaatttactggctccaatgattttagtttgtggaggattaaaattagagcttttcattggaccggattgatgacaaaagaaagaaactagaaattgagacaaaagcacactgtgctatcttgctcagtcttggagatgaggttctaagggaggttgctgatgaagaaaaggctctaggcctttggaacatgttggcctctatctacatgaagaaatccttggccaacaaactctacctcaagaagaaactgtatacattgagaatggatgaaactaaagaactaaggaagcacctagatgactacaacaagatcagtttagatctgaatgacctgggagtgaaaattgaggatgaagatcaggctataatcctgttaagttcacttcccaagatgtatgaacactttgttgatacaatctt

SEQ ID NO: 144982 - DNA, 842 bp, Cannabis sativa
ttgggaggcctctgggagcccattagctcttttccaggacagtgagtggtttcttcatgaggagtatcaatgttttctccgtggtcagtcatggagaaagttttctttatatatatatatattaggagggtctttttttgagcttttttcaccaaggctctcaatgaaagaacgaaactgttatagcagattttcgttaactatattaaagcctaaatcgtgatggatttgcacagaaagtaaaagcagtaatggaaaaaataagaacacaaagcttctttacgtggttttatagttaaaattctgcatagtccatgagtctttcttattggatatttctaatataattctagggctttttccctgaaggattttccgtccctttttcagtgtaacctactcctatttatagttacattggagagcagttaattataaatcgagctgatatcttgcaataataatcccctgaaattatgggatttgattacgtcccacgtaaaataaatgcggttattatttaaaaatcacacagctgtcattggtccgtttttacagggtcaatgcatacatgtattaaatacgtattaaagtgtatcgttctgggacatcacctaagaacatagcaacaataatcctggcaacgagccaaagattttcccatgtctttctgaggttaataatgtaaatcttttcttttatgatattgaagacataatgctctatctgacaatggcagttcttggtgacaaggtgaagttcaacagtcaacatcatttgaatgccagcttctatatgagagagctgactcaatggaactgtggatctcattgaaagatgtc

SEQ ID NO: 144983 - DNA, 594 bp, Cannabis sativa
gaaaaatcgtgggttagggctttggacgggatgatcgtgggttgtggtaacgaagaaccaaggaaagagaaacagaaaataaaaaaaaaataataaacaaaaaagaaagcagaagttatggaagtggtggcgtgtaagaagagagaaaatcatgacataagcatggggatagttatatttgtaattatgaaacttttgaaaatgtaaaattaaaaaataaaacttgtataaaagtttcaataaccgagtattgacaaaaaaagtaaaaaaaagggcaaaaaaaggcaccaagtagtgtaaaaatccctaatattatttgttttattataggaggatgtcatatattgtgtaataaaatttatcagtaattaagtttatcctgtatactatgtgtatactaattgtagaaatgatacaaaagtgtatatatattttagttgtaggaaactgaagggagccacgaccatccgtaccatagctgcacgtctgctcttgaatctaattatatatgttggccaaacgagatttagtatatttatttttgaggctttagagcatgtttggtattgttttctgttttttgttttaaaaaat

SEQ ID NO: 144984 - DNA, 877 bp, Cannabis sativa
aactcatcacttttatttttaaagatccactttgttccaatcacattgataccttttggtcttcgaaccaaaatccaaaccttgctgtgaacaaactgattaagttcttcttgcattgcattaagccattcttcaaaagtcatggcttccttcacactttttcggttcaaatcgcgagacaaaacaaagaaaactaatcaaattaacatacatttttcttgttaccatgctttcttcaagatttccaagaatgagatcttttggatgattcagttttactctggtgcttggttccttctggatagaatcagtaatgatttttggatgagtcaagataggctgttctggttcaccagcttcagttgcggcggcagattcgtcatttgggtcttcagaattcaattctcctacatcagaatctacatttgctgcttctagtggagtatccagaaaactatctatctcagtttctgtggaaaattctgaaaaatctttaaaatcatcaacaaccacattagctgattccaaaatagtttgagttctcatgttgtaaacacgataggctctactatttgtggaatatccaatgaaaacaccaacatcacttttagcatcaaattttccaatatgctcacggtctctagaaacatagcaaacacatccaaaaacatgaaaatgacttacatttggacgcttacctttccaaatttcataggatgttttgaaagtacttgaacgaataaacactctgtttattgtataacaagttgtgtttatagcttcttcccacaatcgttttgtcagcttcttgctatttaacatcactcttgccatctccttcaaggttcgattctttctctcaacaactccattttgt

SEQ ID NO: 144985 - DNA, 697 bp, Cannabis sativa
acaaatacgattcatcgtacaaaaccaaactcaacttatcactatcatcatgaaacgaaacatcgtctttcttcaaagcactcttaacagtgctatcaaccacacccttaagaaaatcaggatcgataaacatattttcaaaattcaaagtgtccttttcctcctacaaaattgaagaaaaaatatttagaacaaacaatgcaaaacataaatgtgaaaaagcttgtacctaaacttgaacagtatgaacggacaactgtaacccaccaccatcatcggatatatcctgatagtatgtctgaaccataaattaattgaaacaagatttttaacataaatatagaaactggtttcctacagaaaataacacagaaatacagacataaacaaagaccagaaaccagttcctacagaaacctgttttcactaacagtcaaaaatcataacataacacatccaatacagaaactaaattaaacaagatgatgaaaaaaatataaaaaaaaaaccaaaaacaacataaattaagaaactggtttcttacaaaaaaaaaacacaaaacagagaactaaaccccacccagaaaccagtgccaataaacagtaaaaaagtatctcaaccaaacccaaaacagaaacctgtttaaaacaactgtggaaaataatataataagacattcaatacagaaactagtttc

SEQ ID NO: 144986 - DNA, 554 bp, Cannabis sativa
  modified_base (64)..(67): a, c, t, g, unknown or other
aaaaaatatatttttaattaatcatttattttaatatatatattttaataataaaaattacttnnnntaagttggtctaaaattaatttttcattgtgatttaattttcaagttaaatttcgaaaatctaaatatatatataatatatataatttcaaaattaatttaaaatataataaaacaaatacctgaaaatatttaatttaagttgttataaaataaataatatttcaacttaaataatttttaaaaatttaattaaataaaaaattaagtatcttgaactaatcaccttaatttgaataatatccaaatttaagttgatctaaaattaataaatttttaacttaaatatattttcaaagaatatctaaataactaattttctaaaaaaaaatctaattagttataacctttttttttaattaaatacatcaaaatacatatagtttatcttgaattaagttcattaaactaagtgtgtttttcttaaattaattttaaaataatccgatgaaaaataaatttcatgtattttgaaaattaattatgtt

SEQ ID NO: 144987 - DNA, 510 bp, Cannabis sativa
attttaagagaataacctatccaacatcacttatgtttctagacaaaatgcttgaaatactgaaaatcttcatctttcactcataagttgacaattaatatttgtctcatgacagcataggaaatttttcatttggcgactggtttcaacaacagttccaacgatggaacagtggagataggcaaatgggtgccatgctttgttgggctatttagcaagacaagaataataaagtttggaatgacaagtctgggtcagttaaaaatgttgtggctttagcaagaactaatcttgaacagtggttatttgctcaagaaaaaaacttttcgccctcttctttctcggttgggattggagaaggggataagcaatggtgtgcccctcatgttgattattacaagattaatgttgatgctgcaacctttagtgacaagcacagattcgactttggttgggttcttcgagatgctaaaggctatgtcattcaagctagatcgggttcaaggcatg

SEQ ID NO: 144988 - DNA, 809 bp, Cannabis sativa
  modified_base (257)..(261): a, c, t, g, unknown or other
tctaatcttctattgataacaaattagattgtattgtaatgtgttttatttagggcataaaatcccaaaagatatctcacatttttctcgtcttacttcgtgaatatgattggaggttcttcagttttcaccttcttggaaggtttcggggcaaatactgactgctcgttctttatctctttcacatatctcttttgggcgttattgctctcctctacaatatgcagccctcccaaaataaccaggatgtcctctcnnnnnacaggaagaggttgtaacccctggttgtttgggttgttgggcaaactgctctggttatgtacattgcccattcttttcacatactgtttgaagtggcctcgagcgatgagactttctatctcatctttcaactagcggcattcgtcgatcgtgtgtccaatttccttatggtatttacaatacctgttaggatctcttttattcctcgcatgcctcgagcgatgagactttctatctcatgtttcaactggcgacattcgtcagtcgtgtgtccaatgtccttatggtatttacaatacctgttaggatctcttttgttcctcgcatgcctcatgggctcgggcttgccgaaggtaaccttttgctcatgtgcaaggtaaatattctcccgagtttcattaagcttggtataaattgtatacactggcacgtacttatcatactttttaatagtttctttttatcctttgacggttcctttgaactgtcctttctctttgagccagaagcccccgagttatcaactcttgttgaaacattgctgggtt

SEQ ID NO: 144989 - DNA, 1286 bp, Cannabis sativa
tatatcatattcaacataagcgccaccgcgcatactctacgtgcaaattactgtcttatctgttgtcctacaataacagagattccaaacccttgggtgctcttgatcaagtgccggtaatcctagtcgcacaacccgagatttcacaaatagggttaatccttgatttcactttcacatagtataaacatggcatgtaaaacacagataatcaaatagagcttggaacgagctttccaacgatataaagaacgtcccaaacaaagtcccgagtaaaacgttatggccaaaataaaattgggaaaaacagactttctcactgccgaacccagtcgcgacgaccaaaaatcccatcgcggtgattgggtttagaacaccaaaaaactctatttttaaggcctaaacatgccaatttttccataaatttgaacctcaataataccatacccaaaattaacctattacagataaaaatcatcacaacgaagagctaataacatcaattccaacattaatcaacaacatccaatatttcacctcataatcatcaacatgcaccattaaatcacaagaacatcaagaacatcttcaagaaacttatttcagagctaaataacagaataaaaacactaataaaatcctttaaattcattccaaacctaaataaaaataaactcaaaagatccaagcacaaagcatgctcacaacaacaagaacaacccaactatcatcaacatgcatctcaagataataaacacgctaaaagatgcttaactcacttcaatttcagcaacaattaaaaggaaacaagagatagaaactacctaagcatcccaaatcaccctagctccaaagattatcacacctcaagcttgaatccaagatatttctcaacaaaaatcaaaacttgaaaagaggagatttgagagagggagggggtcggttacaagggctgagaacaaaagcataaattgtttttcatttttgcaaacaattcactttattacaaatacactaatttcccaatttaccaaaatacccccaagggccaaattacacacgtaaaagcatttaagggaaattttgtcaatctcatcacaaatattctcaaattaatttgagattagtcacatataaataaaatgccaataaatcatcccaaacttgtattgcggccccgaaccggttcggcccgaaatacccggttgtgactataccgcggcaacttgtcaaaacacacctgaaaaagacagcacaggcagactatataataatatagtcccata

SEQ ID NO: 144990 - DNA, 785 bp, Cannabis sativa
  modified_base (148)..(160): a, c, t, g, unknown or other
  modified_base (481)..(491): a, c, t, g, unknown or other
aacctaagtatctttttcaaaaaaaaaaacatgctaacaacttttcaaatttcatgttatttaaaaaaaaaaaaatgttcaacaaaatacaaatgataatttaatatcatttttctgattttacaatttaatttaaataaaaaataannnnnnnnnnnnnttagcaaaatatcttacttcaatttaaaatttcatgattataataatcttattttaaaattcaaataaggtcaattaattaaaaaaatgtaaatatctgaccttaaatttaaaaataagataaaataatcaaacttttaaaataagataatttattaagccaaaaattagatttttacctattttcaagcttcaaatttaactaatatcttaagttaatttaaaaaatactaattaatttaattatgataattagatttgaaatatgaaaaaaaaaaatctaaatacaaaattacacaaaaaattcgaaattaattccatnnnnnnnnnnnaaaaaatgaagaaaattgaaaaaattgtaaatggtacggatggcatgcatgcgctgagcaaagtgcacggccgagaaacctcgaccagagaggctgccagcagctttcatacaaaaccaaggcttcagactgagaaatctcggacaacctcgtgtctgaggcgcgattgaccgagtgatcactcggatccgcgcgcatattgggtgacaccacccctatcctttttttcaaaacttcaaaaaatcataactaattcacattaaatcgaaatcaagttttgtaaaaaagtgaatt

SEQ ID NO: 144991 - DNA, 954 bp, Cannabis sativa
agttcatatatctgggtaattgtttaagtttttctctgtttttgttatgtttgttcatttcttgttttcttatatatatgttttttgttgatattttattgttatttttttggtgttgtttcgttcaattttagggcatgggtaaatcccctgtcaaggttttgccatccacaggtgtggctgaggaaattactgccaataggattgttgaggtgtgtgatgttatgcattctgttctctatttttttttccttgttttttgtttttattgttgttttcgtagtgttttatgtgtgttttagcagtgtttttgttgttttgttttagaattgggaatctaagtacacccgatctcaatactaccattctagagtagtgacatctggttattactctgtaattggagacataaaaaaaattctaactgaaagccaactagaatttttttcaaaaactgtgtttggatattttctccggattccagagtacattatccattaccaacttcttcatggtttgctgttgagggaggttcaacagcctaatgggttggagttttgggtatgtgtccaagagaaatatcttaagtttagtatcgaagagttttcgttagttactggattagattgtcaggttgattatgatttttatcagtttaagcaagatgataatgcattggctaaacattgttttaagggttacaaaaaaattaccaagggtgctattcagactgcctttattgctgacaatctcaagagtaatgacgatcttgcagtcaagttggctgtcttgtattttgtgcagtgttacttgttgggtggtcccccgggtaaagttgtttcaatagaggaaatgaatgttgtcgatagtggtcggtacaatgaatttggttggggcaagcattgttttgatatgactattccatctttgaagggtaagattgactctggtctt

SEQ ID NO: 144992 - DNA, 1138 bp, Cannabis sativa
tttttcccctcactaaatttcagggccggccctgtgtacaactcatcttcaaaaccctcaaactcatgtgttgacctcaaattttggtcaacagacaacagagtcttatttatgatcggaatcaccacgtgtaaataattagaacaagtaaataaatggacacaataattttatagcggttcgcccccccccttagttagcgtgtataatgacctactcctcttttagttgtattggtataagagataataccactcagatcacaagtgttgtgagttctgaagtggctctatttgaattacaatagtgagaatgtaagacagatttcaagtacatgagatgagggaggcttagtctctactacactacagttggcgtttaggagagatagagactagggtttcaagtgcttgaactcaagagcttaggaatgagaacttaaatattagccccttaagtttagcctagtgctttttatatatagaatagagcttgtaggttgatatcccttaaaataaggagatatcacctatttgttacatattaaatatatataagaaaataacccataatattcctaaagaataggtaaataagtgaagttgaacccttattttcgtgggttgttgaagtcactttatagctgagagtgtttgtccaggttgaaagctgcagagacaccaaaagtgtctgccagaagaggagctggtcggcctaccaatttggtctgaacacttttactgcgggatcttcgttattcaggaatactcttcggagcactaagtctcctatgaagaatttcctatcctcaacttgtttgttgaagtaccttgcaaccttctgctggtaggattacaacttttaggctggcttggtctcttctttttttttttaattttttttattttgttaaagagattccgccagcaagatattgtttacttcttggtcataggttatcttcctacgagacggtggcgccaactctacgtgcaatattacttcatagccataagctaaagcaaatggtgtttgtccggttgccgtcttctcggtagttctgcgtgaccagagtacctctgggagcaattcaggggaatttcctttcatcttttttagacactttttcagagtgtcc

SEQ ID NO: 144993 - DNA, 1236 bp, Cannabis sativa
  modified_base (924)..(924): a, c, t, g, unknown or other
cggttcctcataaaaggcagggtgtcttgggcgccaggtgggtaagtccttcgtccaagattacggaggcgcgccttcgaactcttgattagggctggtacctgggcgagctacactggtacattcctgcccacaataatcgcgccacaaaccctgacaaggggatgtgcaccttgtcgggagtccatggtcaccaaggagcgttgatgcccttgcataattacttcaaggatgtggcagacttcttcagtctctgcccggcccagttcactcctaagggcgttaagtatttgtctgccctcttcatcctctacgcttcccaaggatggggtactccttatcctcacgaagtttcttggttctttgatttgaagtccacccccaaacaggacaggtcagggtccttctatttctctcaaccacgcttaaagtggttgaccagcacgcatgataaggctatcaacaaaatagggcgtttcgctgatgagtacttcatggtgaaggatgcgagcattacccgaactcaatttcagcagattctgacatatcaccatcttcccctaactcttgctcttagggatagagctcaaaaacttgctctgttgccgggggaagatcagaatattatccagttgaccttcgatgataatcttgtgaggtacaggctttatcttgaggacgttactcataagtccatggtggggaggaagaggaaatctgatgctggcgaggccaaacgaactcatccggagaatgagttgattcaactgaagcgtgaagctaagttgaaaggaggtgcgcgggccaagcaatatgctcaggagctttcgaatccttaatatgaagctgaggaagagcaggtgactccgctgaagaggaaggagaaactctcagcctcacccaggcctgttgaacatgcaattngcataagggagcccatttcacctgctcggccatctcctcccgtgtttggaaaagggaaagttgtcatgtcttatataagatcgatgtcaggtgatgctggacaccttaaacacggaggtggacttggccaagaaggaagatgaagaagccagggtagaagccggagctgttcggttggagttgggcaaagccaacaagaaggtgtttgctgctgagaagaaaataacggtgctgactaaggatctcgaggttgctgaccgttttgaggagaccatcgagatcttatctgctgaggtaaacagtcttcaagat

SEQ ID NO: 144994 - DNA, 568 bp, Cannabis sativa
gcgcaattgttgacttgccccggcattagttgacatttgccgctgcaattacccaatagcgtcggcaaaagttggcattcttgtaatgccaattcattatttaattaaaatttgttacataaatagtcattaaattattaccttcccaacatttgagtaatttgttcgggaacttggtggccacgtataaggtctaaatggacaattttctttggcgttacaacctctagcatccaatgcacactagaaaattatattgggatgtaagtaagatagtataaaaataatttgaagtcataatatagaaacaattagaactaaagaattaaatagtgtttacccgatattctaaggaataaagaacatgtggtggttgttattcatcgatgataaccaagcagccaattatcttaccgcattgtcaaaagactgactcttctcttcagggttgctaccactcttctcttcagggtttctcaaaccgttgatgctctcccagatgtgcctgccaaaaaaattgttaagtattagtgtcttataataatttgactagaatttaatatataag

SEQ ID NO: 144995 - DNA, 582 bp, Cannabis sativa
tttatgttagtttttttttttctaaatttaattatgtttaaatgtctgtggatgacatgttcaactgttttgcgtttgttatgtataatggtgtttgggagcttgagggtagagattggatttataaccgagctaaaaaattaacattcaagattgatacaaacgtaaactactcacgtttggttgatcttttgtacgaagaactcgatgttgacaaagtgcaatatgacttaaaattggaaatgaattacaagtacatgaaagacttattaatgtattgccctgaaattattaaaatggtaagcgtccaagattatttttgtttatgcttgcaagagccagatgaatttactcccttgtttgtgactttggtgaagaagaatgtttgtatcggttctaattacaccaagtactgttaaagatactcgtagcgaggttaggagtttcgttcctgaaatgaatttagaggtgttggcagttgatgtgttacctgaattaaacactacgatgccgacagctgacattgtagcacagatgccctttcatgatggttttggtgatggtccgaccctgatggtatgt

SEQ ID NO: 144996 - DNA, 829 bp, Cannabis sativa
gtatgtagtgtatgtcgaactggcttaattccatagcccacttgaggagtcttccagacgcctccggcttctgtaggacttgccggagttgatggtttgccaataccttgatagggtgagcctggaagtagggtcttaactttctaaaagccatcatgaggcaaaaaactagcttttcaatcactcgataccgtgtctccgcccctatcatgcgcttgttgacatagtacacagggtgttgtgttttttcctcttcccggactaaggctgcgctgaccgtattcttggagacggccaagtatagtaacaagtcctctccaagaactggctttgacaagatcggaggtttggccatgtgttcttttaattttatgaatgcctcctcgcattcttctgtccattcaaatttttggcatttctttagaatgttgaagggaatgcacttgtctgtggatcgagaaataaaccggcttagggcagcaacaattctggttaggctttgcacatctttgtgcttcttgggagaaggcatgttcaggagggcttgaattttctctgggtttgcctctattcctctttggctgacgataaatcccagaaactttcttgatttgaccccaaaagtgcacttcttcgggttaagtttcattccatacctccggaccacttcaaagcatttcgcgaggtcgtctgcatgacttccacatgccttcgatatgacaaacatgtcatccacgtaaacctccatgtttcgtcccagaaggcctttaaacatccggttaaccattctctgatacgttgcactagcatttttcagcccgaagggcat

SEQ ID NO: 144997 - DNA, 500 bp, Cannabis sativa
ctttgatgccatcttgctctccgggagcatatgagactttgcatgccttttctgggaggcatatccacagttacctttttctttataaagacttagctttttaattcaaatgctaaaccctttccttccacgtgtcgttgtacggtttgtccacgtattttgggaaaaatcaggggcaacagttaggttggtgtaactttagcttttaattgtagcttctccaaaaattcttcaaaaagctattttttgactgcttaccaaatatatttttttcacagctttttcgaaaagcagcttttagattttccaaaaagctgtgccaaacgggcgctaagtatacccaaaggtctataactgttgggaatattaagtattcccaatagttatattagtattctcaatagttataaattgttggcatttattgttttttttttttaatttcatttagtttttggccacagttctccaccgttggcattagtttttcccaacggttt

SEQ ID NO: 144998 - DNA, 593 bp, Cannabis sativa
  modified_base (214)..(230): a, c, t, g, unknown or other
catttgccttattttaaataattgtattaggctaattatattagtttaacctaattaaaattgattaggaacataattaattttaaaataaatgtaaactaattttgtgttagattatttttaaattaattttaaaaaaacacacttagtttgatgaaataaattatagatagtaatttctagtaactaatttatatttttctaatatttaatnnnnnnnnnnnnnnnnnttaagttgaaaattaattttagatcaacttgaattagtttatttttcttagatattaaattagaattaataattaagttgatttttattcaagatacttaattatttatttctattttaatgcatttaatgaaatgaaaaattatatttaagttagaaatttttaatttcagatcaacttaaattagaataattttcaaaatatatattatttcatttaaataataatttttcatgtaattgtctaaatgcttttacttttttaatatcctaagtttgaaaattttatggttaccaaaccctaaaatttctattcaaaacaaaattaacaaacttttcaaaatttcatgttattttgcaaaaa

SEQ ID NO: 144999 - DNA, 770 bp, Cannabis sativa
aggttcgagttcgggtccggagtcttggttttagtctaggtcccggtctaggtcccaatcatggtctgggttcaggtttgggtccttgtcagggtttggatccttgtctggatcatgggtatcaggttccagcaagggtttaggactaggtcgagtccaggtctcggtctatgttcgggtcccaggtctcaggtccctgtcctagtcaaggtctctgtcaagttctttcctgaatttgggttatggtttgggttcggttctgctctcagctatgggttctagtcatagttccaattctgatttcgggtctgggtttggttctgggtccgggtctgggtccaggttgtggtcgcggtctgagtcttagtttgagtacgggtgacgggttttttagattccagtttcagtcgaggttcgtgtctcgggtcagggtctgcgtcttgtggtccaggtcctgtgttttgatcctggtctgggtctgagtcggtattccggtccgggtctgggttcgtttcaatgtcctggtctgaatcccatttgaggttaggggcttcgtctaggtctaggatcgagtcccgagttcgagttcgagttcaggttgaagtctcaatcttagtttgggtccgggactgagttcgagcacgagttttggggctgggttctggtctagttgtggatccaagtcttggtccagatcctggtcactatcccgatcatgttccaaggtcctgataatgttttggttcaggtttcagttttgggtcccaggt

SEQ ID NO: 145000 - DNA, 1291 bp, Cannabis sativa
agtctttcgaatagacattgcagaatttttttatcttattctcataattctgataagttataattatccatgtgaatggttagattaatgttccttactcgactggtgtcatatcttatttaaataaaatttcttgaacatatcattgtaaataatcactagtgtcatctaaataatatagtcgactggaaaaatcctcccactaagataaggtaccactacaaaaaacagctacttttagttataaatcaacactatctctaaaaatactatcatattatataatttaaatttataaaatatcaccggcagaatgcagtaaaaattatataatataatataataaataccctaataattaataacttaatttacataagaaaagtatgactgaacttatataaaaggtactattaaatttaaagtgcaaattagaagaagagaaatttaatataataaatatagaaatgaagaacaaagagaatcaatatattaaaaaaaaaaaaattaatatgaacttacacttcagtcttgtcaaaaaaattagccaagaaaaatattgcttttacacaagaaataataataataaataaaaaaagaagaatgagctatcctggtttggcaaagcatgcccttcggttagacgatgagctatcctggttcgaggaggtgtctccgccgattgtggattgctgctttgtttaatcatgtgtgattttgatcaccgtgtcaaaaaaaaaagaagaatgagagaaaaagacacaaatttagtataataacttgttgctatttatagtgaaggtttgctcttaaatgagcaaaaattcatgcttaaattagaaaagctccaacgcataaaatatatgaacgactaagtggaagctatttgaaagagtagttattacattggagagattttagtgagcatctaccattgctattgtattacaatgctaatatatatcatttacagttcaaataagcatctactcttgcttgtcaaactaaactcatagacgcgtagatgcgctatttattttttcgagtttaaaacaatatgatccaccttaccttggatcttgtttattgatatttcttacttgttgatggttttggtaagtctcactttaaattaaaaaaaaaaaaatattattacttttaatctcaataaaaaaatttattactgacactttacttacgactaaaaaattatatttagtcataaattatctttaatatggtcttagtttgaacttatttgttaggactaaaaacactattaattataaat

SEQ ID NO: 145001 - DNA, 786 bp, Cannabis sativa
  modified_base (678)..(690): a, c, t, g, unknown or other
cccatgcatgtgccgcagcagttagtcagaatgtgagcgtgtacacactttgctctccatattacacaaaagaaacgtggaagaagatctacgatgtcataattaagattgttggcgaggaggatgagtaggtactaccggaacacatcaagaacataagaatcggggtaccagtggagaaaaaaaccagtaggtcggcctaggaagagcaatgcaggtagaagaccgacgaagcgttgaccgtccagtggtcaggtggtagtggaacctcgtcactgctcgctatgtcacggtacagggcacaacagagctacatgcaaagctcgagtttgaatcgattctctaatattttaatgaatatgtgttgtattgctggttgttgaatattgttatggatatttttaaagtgtctgcgattttgtgcgacatttatgcgatctttgtgcgattttggctcatatttataattgttgtttcgtgcgatttgtatgcgatatctatgcgacattgtgcgatttcggcccatatttataattgctgtttcgtgcgatttgtatgcgatatctatgcgacattgtgcgattttctgcaccattttaatttttattttgcgattcttgtgcgatttctggggacatttggcgatttcactagtaacatgcttaatatactaactgnnnnnnnnnnnnnatttctatgcgatgtatgtgcgacattatttagcgagctaagcaagttattatttcaactttgataatatttgcgatttcacatttcacagtataa

SEQ ID NO: 145002 - DNA, 617 bp, Cannabis sativa
ataaattgaatctacaagcctacaatacataaatttagcttctagatgtcaagtggctacccctacttgcctagtaaagcagaggccaccgttgaagaactgtgggagaccatgccaataaggttgtgggtgctagtgctttttgtactctaatgttgagtaggtagaactgctactttggagtagagttctataaactggttactgatagtaactgcgaaggtgctctctattccagtatttaggtaggagaacgagccccatgttctcgttgtaccttcccagcttgtaggctcccttactagttatcgttgtaacttgataagggccttcccagttaagtctgaaaactcctgctgctgaatctttggtgttcaagaacactctttggagcactaggtctcctatgaagaatttcctgctcttgacttgtttgttgaagtgccttgctaccttttgttggtaggcctacaactttatgttggcttgttctcttctctcttctacttcgtcaatggactctgccagtagggtattatttatttgttggtcataggttgttctcttgtgagacggtggcactagctctacaggcaacatcgcctcatagccataag

SEQ ID NO: 145003 - DNA, 1260 bp, Cannabis sativa
  modified_base (75)..(77): a, c, t, g, unknown or other
  modified_base (291)..(298): a, c, t, g, unknown or other
aaagaatggctccattagctgaagtgtccaacaccatcctagaggctgcattgagaccattgtaaaatgtctcannntggatacaatgaggaataccatggtggggacacctcctcaacaactccttgaatctttcccatgcttcactagtggtctcatcttctaattgttgaaaggacaagatctcacttcaaaactttgcatttcttgtaggaggaaagtactttctcaaaaaaatttcagccaagtcattccatgttgtcaccgaatcgggaggaagagtattaagcnnnnnnnnagcccgatccctcaaggaaaatgggaacaacttcaaccttaaagcctcttcacatactccttgtagcttcaaagagtcactcacctccaaaaatgagcgaatatggaggtgaggatcttccgttggcaaactactaaattggccaaccgtttggagcatttgaaacatgacgggcttgagctcaaagtgaggtgcttggatttcgggtctcacaataccgagattaagctcattgaacataggggatgcatattctcttattgctcgagctctatcatcggccaaagcagtaggattggcaccattatgagcacccccaacttcaaacccatcggccatattgcagcacttttagccttttgttcctttctcctttgtttgaaagtgtgttgaatttcggggttaataggagcaagttcaaggtcttcttcttgctcgttcatgcactagattacacctgaaaaataaatatagcgcaccaaaatgggattagaacctcaaaccagaaagtaaattgaaaaatagttaataatacacaatttttagtttcaatcccccgcaacggcgccaaaaacttgttgtgaaaattatgtacgcaagtatacgcagtcaaacaagtagtaaaatgataagtaagatcgtctccacagggattgcaaacaaagtattacgcaaaacaaactaattacaacttaaagtaagaggaaataacatgaaaatgattgagcaatgattcaaaattaaaatgacagtaattaaacttgctaaaattaatgctactgctgctagaaaattgcttgaaaaaaaatataatatggtaaaaagtggcttgaatagctaatcccttctagtcaggtttttccccagttgttacagcatcggttttgcattactccagcattttgcacagagataacataaattcctctaggcttgtgagaattttccaaaactcacaaatt

SEQ ID NO: 145004 - DNA, 568 bp, Cannabis sativa
  modified_base (516)..(523): a, c, t, g, unknown or other
atttttgctcttaatccaactcagggcttctttgacccccattgcttcaacaacttccgcatcatagacaccgccataataacacgatttggcctcaatgagattgccaaagctatctcgagcaacgagcccgaatccataagagttatcctgtggaaagagtgcagcatcaacatttatctttattttgtttgcttcaagtttagtcaaacgctcaactccatctcctctattctcaaagaataaagaagatagtgaagtgttatcgtgagcgttacgcaaatgatcaagagttatttgtgcagatgcaataacttcagttcgtgaggatgttttattcttccatacaacaaggtttcgggccttccaaattgcccaacaaagcatagctgcccgtgagacaatctcctcatcaagagccataagtgctttctcaaaccaaccaccaaaagataaaggatgaagcgtgtcataagtgatacaaagagtatgttaaaaatattttaccaggatctnnnnnnnntaccatgtatgtttcattaacatcataatatgaattctaaaacaa

SEQ ID NO: 145005 - DNA, 595 bp, Cannabis sativa
gcacctttatccaccactataatgcaagactttttggttgtcgatctgccattagcctacaacatactgccgggtcgaccatcattaattggactagggacacatttagttcaattaagcacttatctctgaagtttcagacaccgacaggtgtgggagtgtgccccactatatcccaccaaatgcaggtatgatctagtaacataaaagtggcacaactcactttctctgttcccgtcacccccatattatctagaatgcggttgatattattcatcccttgttcagctttaattatattagtaccctccagaaacattagaggttgcagcttaacaaagcgctcaaatactgaatctctgtgtgacaacatgaaccccaagttagccaccattggcatagaagctggtggtaacacttgttctacaagagctgccgatgtcggttggctcaaccaccataattcatcttcttgacaaagtataatactccgcattttgtgaaacatttgttaccattcagtaggcagattagcattgcaaacccccgcattatcccccatattcggcagaggcacaggcggtgccagtggatt

SEQ ID NO: 145006 - DNA, 623 bp, Cannabis sativa
ctaataagtcatcttaaagatggatcaataaactctttaaagagcacatggttcaacatacttgttgttttgaaattgtaagcaattactaaatagcatgacttattagaatttatcaattacttgtggatgattagttatgaattctcaataactattaaatttaaggttgttgtgaatcataaataatataatacttgggtggaagtttgatacaataaatgatcttttctagaaactcggttcctagatcgatcgttcccattgatcaagtaaattcttaattttacaattctgataataaaacatgtaacccttagccttatagcatttatgatgaaatactcatttatggtatttgaacccagttctttcatttgacaattgtactctaactgtatacgggtatttataacatatgtatatgtcattaagtcagtttccaatcttatcacaactcaaaatttgtttgagaaataactttggttagagcacgatccgatatatgtacactcccatggaagagtatcaaccgacaaagatttaggaaaattgagagtttgctatgaaggttccactccatgtccaacaatacttagtttcttaaatctgtcacacactat

SEQ ID NO: 145007 - DNA, 590 bp, Cannabis sativa
  modified_base (546)..(551): a, c, t, g, unknown or other
gtcgttctcctcaataacaaacttggcactgaggtctagtgtcaccataatagccgagcagcaggccgccgcttcttcacacaatgcattgaaaaaatccaaccgattcgtataaaagggaaatgtattcctataaaaattgaggaagaacctttctttttgttttctccctaatttgtgtgagtcccattattttttccctttccaaaatttaataaataattatatgagaatcaataacatactattaattgtcattccctttaagtaaacatgccaaactatgttcttgacaattacgtaaaaattttatattcatttaattttaaattaattttcgaaaatttaggtatattagaatttaaacttaataaatatgataagtatttaatattgaattaaatttatataattaaaaaaatataagagaattgaattagatttatttatttattattatttaatttatttttgatttcttcatatatatatatataataaaaaaagaaagctaagattacattttaaataagttttttttttttnnnnnncaaagtgattagaatcactcatgaatttacgacgcctac

SEQ ID NO: 145008 - DNA, 823 bp, Cannabis sativa
  modified_base (343)..(357): a, c, t, g, unknown or other
tggaactgtagagggttggggcagacctctacagctcgcgacctgaagaccctaatcagatcgcgctctcctgattttgtttttctgactgaactgaaagtggatgcaactcctctggtacgtattctaacatccctccactactattttaatattaatgtaccccgtattggtactggggggggtattattttggcttggaaaattggctttagttttgaatgtgtctcttgttctagtaaccatatctcgggcttggtctattcggacccccccactcacccttggcttttatcctgtgtttatggtcctccttacctccatgctaagaaaaaattttggnnnnnnnnnnnnnnnttaggggataggtttgggggtccctggttgatcattggcgataccaactttgttcttagtcactctgaacgtgaatggtcatcggggagggatccgtttgtccctttcatttcaaatttggttgattctagaggtctgattaatttgactatccaaggggaaaagatgacttgggataaccaccggtctggaagtaaacatgtgaaatctgccctggataaaggcattgtgaatggtaattggcttcaattatttcccaaagctgtccttagctcttctcacacgagcaactcggatcataggccgctgtgtctagatactgtggggcatccccctaaatttaaaagatgcttcaggtttgaagaagggtggacgagagatgagaggagtaagctgatagtagccaatgcttggaagacggttgtaatatcccagaaaataaataatatttaaatggacatatttt

SEQ ID NO: 145009 - DNA, 1186 bp, Cannabis sativa
  modified_base (1156)..(1159): a, c, t, g, unknown or other
tgtgatgaaatattgattgaatgttaattttttggccagatttaacatttagtaagctagatcttacttggaaaagtaagacctagttgaacccatttaattgatgcttgatttttacctatctcttaggtattaattagtagtgcaatagggatattttgctaccttgcataactaaaaatttgatgctacattggactatttgtgacctgaattagtgtaggaatgcattattgaggttatgaattgtatattgcaggttttgggaaaagcttgctgttttttttttttaaatctgttaactctgacaggattgctaactcattgctaactcattgctgtattaactggaacataccaggggaaaattaagcatccaaatctattgtctaaatctgaaattttcacaactttatttaccttttgcttcttaattttagtttatctagcttaaaatattatttctaaactctagaattaaggttaagaattttgctcttgaattgattagtggttttgctttatttttacttgtaattttttaatgcttttaattgattttgcattatttagtgtaaaagtccttgaggatacgaactttgataattatcattgtattacttttttgtaattgtgtacacttgcacaattataaatcaatataattttcacaacaatcgtcgagcagctgttccacttaggtcggccgacacacctgaatttgaaaacgtggtaagattagtataatgatatgcatacatatttacatgtttagcgtacatgttggttaagcctgttagattacattataattacggtatcaacatatttagtattatattggatattgataaatgtatgttggcttaagtactactcaacagtatcacatcagtatgactagagtacggctagcgtattgagtataggctgatattatggtcgatagtactgtactacttgacagtatcacattggtacaactagagtacgactagcgtactgagtataggctgatattatggtcagtagtactgtcatacgaatgttcttgactcagcaccgtgttggacacagggttagggttatagttgggtgtatgggaacttgattataatctgggttattgctatgttattgattatgcttttcttannnngtttgtcgactcacagatattgtttgc

SEQ ID NO: 145010 - DNA, 739 bp, Cannabis sativa
aatttaaaaatctaatacataaaaacaagtttcaaacctaaaaaaaataatacaaagaaacttaaaataaaaaatatacaataacataaaatagagcaaccccattaaaggactctcaaaatctgtgaaaccagtttttaacatgtgaaatcagtttcgaccatatgaaaaatcataacaaaattgaaatgataaattatgaagataactgaaactgattttatcagtcaaccaaatggaaaaaaatacactcacacaaaattactaaaaaaaaatttagaaataatattaaaacaatacacgatgcacaacaataatttaaaaataaatataaatatgaaaattaattttgaacatagaaacaaaataataaaaaaaaaaaaaaaaatataataacatcataaaatagagcaattcacattacaatgccctcaagacatgtgaaaccaattttgaacttgtgaaaaatcataacagaacttatgaaaccataacaaaatcataacaaaacttgtaaaactatttttgaccatataaaaaataatatgacaaacttaaaataaaaaatagacaaaacactacaaagaatggagaaaccccattatacaaaaatataaaaaacagttacgtaatgtgaataaattaaaattaatacaaagaaatctgacatagagaatctagttacgattatcagctagtgaaaaatttgacacagaaaaaatagttacataaaacacaa

SEQ ID NO: 145011 - DNA, 989 bp, Cannabis sativa
gggatcgaaatgctggacctagaactggaccaagatcctgacccagaccaaaacttcgacctgcactcgacacccgaacttggacctggacacgaacttagacccagatttgggtcgagaccttgacacaaacccagacacatactcgtacacaaactcaaacacccacacctagaatcagaactaaactcgaaccaagaccaggatcagaactgaatccagactcagatcctgattcgaacttggtacttggacacaacctagaccaagacccaggactcgaaaaccgatccgaactcaaacccaaactcgaattaagaatcgcaaatggaactagaactgaactaggagtaggaccaggaaaaggaccaaaacccaaacccaaacccagatcaaaacgtagacagagatttaaaccagaaccgagactaggactcaaacccgaacttagaccagcacccaaacccacaccataaccgggacctagacccagaatcagtatagggacctttgaaacagaactaggacttggacctagtacccgacccagaccttaacttgacgtaggacccagctcgtgactcggcacaagaaatcgaaccagactgggacccgagatgggaatccagatctggacccagggcttggacaaaactcatagtcaatgtcagggttagggaccagccctggacccgaaccctgacaaggaccgaaacccacaccctgagttaaacctagtccaaaacccaaaaatggactcgaacccgtaacctgtgacccaaacttagaaccaaaagtggaagttgaccggcactagaactaggacttaaacttggaatcataattttaattggacatagatccagaaccgtaataggaccaagacccatactccaaatcatatctagacccgaattgggacacggactcgaatcccaacccaaacctggactcgggacgcgaacccaaacttgaactcagacccaaac

SEQ ID NO: 145012 - DNA, 503 bp, Cannabis sativa
aatggtggtggggaaagtctgggaatgaggagatgttggagtagatggaatggtggtagtgttggtgataatacggggggggagagtgaactcgcagaaattgattgacagcatgttggaggctttgatctggtgaagatataggaggaagaaattcctcaaaaggggtagcgttggagatttcgaaaggattcttcttaaacagggactgggtcggagcacgaagagtatcacgatattctaagagtgggggggaagggaagttatcacaacggaggaggtaacgggtgcagcggttataagtgtgatcaaggaggccacaaaagtagcagaagttgggaaggctttcgtatttgaaactaatccatcttggttcagggatggatctgaaacgaattgtcatacccctacgcaagggcttggtgatgtccagcagaacacgaatcctgagaaaggggccagaattctcaaggagagaaaggggataggtttcaatgaggtca

SEQ ID NO: 145013 - DNA, 518 bp, Cannabis sativa
gatggttggaaggctgaccttggcttagagaagtcaaggtcccgcacaggtgttccactgccggaaaaagtgagcatgtggcagttggtattagagccaagttcatctcagtgggaggtgaacctagttggcctaccgtagagaggatgtaggcgtgtggacagatcgagatggtacgaatgttggaacaagatgtcgttgagccaattagtcttttaaaggggatcagtagactgagatggagttgagactgggttgcttttcttcatgggaatactggacatcctagagaggagacaatgattgttgcttcgagttaagttcaaagatgctagaaaggcaactaccacgtgcaattgtagagaggtgaaacagaatgttcgaaactcgttggtatagtacaagagtgattggatagtccatactatatgcttggtacactaggccaagtttgcctaagtgacatcgtaagccacatgaggcgcttttgttgaaaaggatgttggaaattattttac

SEQ ID NO: 145014 - DNA, 505 bp, Cannabis sativa
tgtaaaaggcattaaacacatatctttataagctatatccaaaccacataagtgctctcgtcttatatttaaatttattcttatttcactatagcataattcacactcacttctcaaatctcgtatcaaaatctaattgatggccagacaattaaaagaattaagaatgaatgaaataaaagacacatagaaaaatgagagaagaaccaaatcatattaaaaccataaaaagatgtcaaataatatccatcaataactagcaattgtttatctactcttattcattgtaacaattcaacacaaattaattaagaacataagaagaaaatagaaaagaataaattattaaaaaactctgttgaaaagcattctgggtcactttgtttctctccaactcgtactatctaattgctattaggctatttttagcctatgttttggatctaatttatgtgcgtttttagctgtgttgggacggaattacgcttgttttctatgttttcag

SEQ ID NO: 145015 - DNA, 504 bp, Cannabis sativa
atttttagtataaattaaagtttaggataagagagtgagaaaaaaaaaattaatctaatttttatttttccaattaaaaaattttaaaaaaatcttagggttttatagaaagggattaagaaaatctcgactggtgtcttcatcgatctatttcaggttggggtttcgtttgaaatttgtactggttcgtgcttttgttaagaattagtgaattgtcattagttgttaattgttctgttttcagtgctttgtattaaggtgtagtcaacctttattttctgttattcattgttcccttggtgccaacattagggccacctgttatactctcatttttcattgtaatctctctacagagtataaatacaacatgatttactcagcctcctttgcgctgagaattacttttccatttttgtgtaaacctttacttggtatcagagccaaaaaagcctgcatcaatgtcctcccattctcaggctccacaagttacgaatactggtg

SEQ ID NO: 145016 - DNA, 1226 bp, Cannabis sativa
tgtaaggttttcttaactttataagtgtttatttatcattttagaaagttcatatttagggtgttaaacaacatactttttgagtagatctaagatcctggtaaaatgcattccaatagatatttcattcatgccttaagtttctaacaaagaatggggttaggtgcctgagaggaaatcaacaggtcagccgggaacgttacaaccttgccctaaccaaggctaaaaaggaagtatcctccagctagagttcagacaagggaaaaaacattgccaaatagggaacctcccaaggcagggatgaagatgtggatccccgacttggggaaccaaataccaatgttggtccggtggaagaattagaagaaatcggaatcgacccaaatgtttcgaccagaaactcaaaattggaaaaggtttgttgctcggagtaaaatcagcattgataaaatttctaagagcaaacctagacatttttgcatggtcacatgaggatatggtcggaatcgatccttctataatttcacatgtgttgaatatcgaccctaatttctggcctgttcaacaaaaaaagaaaattgttggacaaggagtgtaatatcccggaaaataaataatatttaaataggcatattttattaaatacgtaatgatgttggtaatgaaggaagattatgatcttacttagggtaattattgagaatttagtcaatgaaataaatagcgtaatttattaattacggagattatattgggataattattgagaatttatttaataaaatattgggcccgaaaattttggttagaaatgtcacgacatttatggaagaattattttgagaatattccgaactaggttagaaattttagaatgtcggtttaatggaattagccaaattacaaaaacgccctaagttattttaaagtttattgttttttcattgggggtaaattagtcttttgccctttttacttttcctagggctgaattataaaaaaaaaaacaaaaaaagcaagctatgaatagcaatcttccaaggcaagtaataaaacaaaaaagagaagagccaaggtctccttctcttcttccttcgagcaagctaaaaccagccaacttagggagatttccttcagctattcttcctcatctcaagtagaatctaaccccaactcaacctagaatcttgaggtaagcttctcccttatgttcttggtgatttcct

SEQ ID NO: 145017 - DNA, 610 bp, Cannabis sativa
agctgccgtcgtctgagtcgaacttccctccgatacttcaagctcctccttagccctctcaactagtgtcaatatgggaggaaaaatagcgaaaggacacatagccagaggtggtgcaacatcgacacgagaagtagcataagttccaaggcccaatgcagcttgttcaaaacaagggaagttgcagacctctgaaaaatgcaatggaggaagtgtagtaggctcgaaatcacgaaagctagaaaaaaggttcaaggaaagaaatgcaggatccaatggctgcaatcctgagaaaatgttagaagaggaaggtgcttttgagtaaggtatctggtttttgggtagagaagacataatgtaggaaggacgaacaaagaacaatgtcaaactaacccagaaaactaagataaagttgaagaatattctgagatagaaaaggaactcaacgagaagcctatttatacaaaattacatgcaaaatattaaccataaaaaaagtgggataaacgaagagtcaccactttgttgttttaaaaaacacgtgccaactaaagcacgtgtactcaaatctcgaaggagtatatatgtcgtcccacttcccaaaacaccc

SEQ ID NO: 145018 - DNA, 708 bp, Cannabis sativa
tccttctttgcaaaaattttccatcgcatatcttgcaaggtaatttcatctacctctttttcactttcaagtgaggtaaattcaggatcttcttttgttaacaaagtcatgcagcaatccaacacactgccatcacaaccagttgccttgtcctgtaactcttctggtaaaaactcctccaaagttactaaatttcgtttcggttgttcgaattcgtttcttttggaaacaaccttttgctttccaatccttttcttattcttttgatcctttatatctcgtctaccccaaaacttgactccggagtttctagatggtttttaagatggaatctttgcaggttttctctgagtacatgtctgccatatactttctaaatcctcttcactatcataccagtctttccaaatttctagattaggctctgtcatgagctcatataacgtaggaatatttgggtttcctggctttggcatgtctgagtgggcttggactactgtaacttctttgttaacttcaaatgccacagaaattatgtccctttgtgtgggatcatttggtatttggtcattctcaattaaggaggttgtaattgtcgccgctttcccaagagaagattcaatctcaatctcttttctcttgatcatgccttcgataatgtttttaaggatgtagcaatccaacagtggatgactcacaatttggtgg

SEQ ID NO: 145019 - DNA, 549 bp, Cannabis sativa
ggtgaaatcaatatggtcgttggtgaaggtattgatgatgatccattaaccaataaacagacaatggcaagtccaaaatagaaacaatggtcagccggcatggattcaaaaatagattccatgaaaaagaacaaagtctggaaatatgtagatgcacctgatgattatcatccaattgggtgtaaatgggtcaacaagaagaaaagaggtgctaatgaagaagtcgaaactttttaaagctagacttgtcgcaaaaggttatacccaaagagtggactatgaggatacttttagttcggttgccatgctcaaatccatcagatacttttctccatagttgccacttttgattacgaaatttggcaattggatgtcaagacaactttccttaacaaaattcttgaaaaaactatttatatggagcaaccagaaggttataagcttccagggcaggacgagaaagcttgtaaacttaataggtccatttatggacttaagcaagcttctcgctcttggaataaaaggttgatgaaataatcaagacctacg

SEQ ID NO: 145020 - DNA, 504 bp, Cannabis sativa
tatctcacctataaatatagggtctcggtccccgagctcctcacgcattctgatttcattcaacaaatgccatctaaagagagttgagagagcgaggaagcctgaactccaataccgaagctatcgcagggattgaagctcaaagatcaatggcttgaggtatatcgatccttcattgtatatatattatcgatatgtttatagtttttccgcattacatatcgtttatatatatgctatatttcatatactatattatagtctaacagttctatctgctatgactactactgatgaacgttctggttctactgctgacattaacaagccttttcgttttgtgctaatgggtgaagacacacatacttggcccaccacacgcgcgtgcgcattgtcggattcgagccggttggtgtgacaatatattattcaatccattcgtctatataatgcgattgaccggcaaattccaactgcttgtacactcttggggagtgccgcgaa

SEQ ID NO: 145021 - DNA, 752 bp, Cannabis sativa
atgaactatattgctttgaggagagtcctgcgcaatatgtgaatatctgcatcatatattcatgagtgattctaatcactacgtcaaaaaaatataaatatctagatatatacagtccacatacaaaatgtttagtaataaaataaagatgaagaatataaatgtttagtttaccgtgtagtggtatttaggtataaagttatcattttatatttttaatgtaaaaattttaataagatttaggggtatcaaatttacactcccaaaatttatttctacacccccattattaattacaccccatttaatttattaaaatttcatttttttataactacaccccttgtatttccaaaattgggttaatctttacaccccatattcatttaaaattaaactcattttacttccatctctttcaatttgtatgtatgaataatgttcatgatcgactccttttagttataaacataatttttgaaagttgaatctttttcaccaatttaattaattcaaatggaaagagacgtattaccattaacggattatattgaaagatgaaaagaaagtttagatttttgagaaatttagtgatgactgttaagttaaaaagaatttggctaattaggatttttgccccctgaactttaacatataccaaatcatgtcccctgaacttttacagttattagaaatgtcccctgaactattgacattgttagattgaagaacttttttctaattttagtaaa

SEQ ID NO: 145022 - DNA, 1130 bp, Cannabis sativa
  modified_base (707)..(712): a, c, t, g, unknown or other
tgcttctcgcaagaattgacgtttaccttcagagatttcttgcaagaaacgcctgtagcgactagcaatatcttcctgttgggttctcactacatgttccctaaccctagcatcgttcaaatcttatttgcaggtcggttttgaagggttgggtttatacgggatggttaattctgtagggaactcaaactctaaaacttctggacgatatattcctgaactagagtgggacattattgcaggaaaaaagcagtcccaatccctggagagaattatatcaaacccgaaggtaaggagttggatatcttaaaacaacctacatattttctgaaccctagtatgaacctagatacaatttaaaccctaaaaactaccaaggccagatgagatgacaatgatacaaacaaactaagtaacaaatccacacaatgtaacaaacatgagaaagaagaaagaaacttattgtttgaagttatggcttagggcaatgactagttactccgtctacaaatcttcgaacgaagcaaggatcactttgagaggatgaagtcggaagaaactcgcaggaaaaaggtcaaggacagagatggcatgcaagtcctcggacgaactcaacggtgatccttgacgaagaagcttaagagttttttcagactttctaaaattgagggaataatgcaaaggtggttccttttttcttactttannnnnntaatagtggcttcgttagatcagataagggcttgatcctacagacatgattcaaagtagaagtggaaaagatggtatttaattctgatgtacctcgaaatcgcacaatcgctaaaatcagaggacatgcgtcttttcaaaaagaggagcatgacaaaaataccctttgtaataattaaaaagctctttttattaaaaaaaaactttttaaggggcaatggttatacccaaaatttggtaagcacaccagaagaggacacgtgtcgagctaggaagaacgaagatctcaaacatgcaatcataagtacacttggcatggaacaacacgttagaaatataatttgtagagtatgtttataactcggttggctgaacagtcttatgcgagacaaaaatgtacgaactactaacttatgtat

SEQ ID NO: 145023 - DNA, 1456 bp, Cannabis sativa
atcccccgccactaataagtgggcggaaaaaaatctcgcccattcaataatttaaaaattaaaaaaaaaagtcgttattaactattagcagcggactctccgccactaatagtctgtcgctaattggtctatatatacctcatcagacccacaacccacatttttcccttttcttcttcaaatccctaaccctaaatcagacccccttttccgcttcatttcttcgtgcggctactccatcggacccccttctcctctcataggcgaccaccaccacaacctttctctttgcgtgcggctactccaaacaggtacagacccaaacccttcttcctcttattttcaatgtatttttctgtgtggctttttatttgtttctttggcttttttttgatttggtaacgagtttatgtgtttctttagatctaatttttttgtgcggctttgtattaattttttatgattattgatttggtaacgggattttctgtgcggctttgtcagagaaaaaaatttatggttgtcgaaaaaatttgtagaaaatatattttatctgtgtatatgtatatttttgaagagtaatatattttcagtctattatatatatatattctgtgaatatatatattttatttgcgtatatatatttttttgaagtataatatattttccagtgtgtatatataattttttttatttatatatgtgtatataatttaaataatttttgtggatgtatttatataataaatatattttgtacagtttatttaatatgcattttgttgtatattttttttttaatttatttctgtaattaaaagtatttatttttttattttcagattatacaaaaggatctttagtagcttgaagaaggtgtacacaaaatttctttgtgaaatgtatgtttttaataatgtatttttttttttttattttagattttatgtgaattatctgagtttgttgggtatgttaaaactgtaatattatcataaaaaagtgagagtaataaaaaaattaaaaatatataattcaatataaatttgttttataaagataaatttttaagtttaggaattaacttaaaaattagtttatattttaataaataatataaatttttaaattataatagtatgtttaaaaaaattattaagttatgtttatataattttagaaaggaagtttagtaatttgttattttttaaataaattaatgaataatttaaatattaaaaattaaaaagttaaaaaagaggtattaagaggtatttatttattttttttatttttaatataaattgtaattaaatgaataaaacttttatttaagtttttaagaaaaaatttgttaacgtaattttatgctggtataattttattattataaaaaattgaaaataatgaaaaaaaaattaaaaaaaaagtataatttaatataatttttttt

SEQ ID NO: 145024 - DNA, 516 bp, Cannabis sativa
  modified_base (218)..(223): a, c, t, g, unknown or other
gtgggtgcaacaggtacttcttaatgctttcaaaagtattttggcatgcctcatcccaaataaatgggacatttatttgcatcaaccgtgaaaagggttgacatctactggatagatttgagatgaatcttcagatatacgcaagtcttccctgtagtccacgtagttgacgtaaattacgtaggggaggcatttccaaaattgctttgatttttgcnnnnnngatttcaattccttgatgtctgacgataaacccaaggaactttcctaatgttaccccaaaggcacatttttaaggattcatcttgtggttgtgttgcctgagcctgtcaaagactcgttttaaatcatcaagatgatttgtcatttcttttgttttgaccactaaatcgtcaacataacattcgatcgtattttgcatcatgtcttcaaaaattgtggtcattgcactttggtaggttgcccctgcatgcttgaggccaaatgacataattgtataacaaaatatgccttttg

SEQ ID NO: 145025 - DNA, 797 bp, Cannabis sativa
  modified_base (28)..(48): a, c, t, g, unknown or other
  modified_base (310)..(310): a, c, t, g, unknown or other
atcgagcctaaccatatcaggattaagnnnnnnnnnnnnnnnnnnnnncagtgatattgacttagaaacatataatagtaagtttaaaatatcttatccaagttcaatatcggtccaatccaatgtatactctatatatcctgttgacctcgcttttagccaacgacagtgagtcaattattaatcaattaagaatataattaaaatagagcaaaactaagtaagtaataaaggacgctagattttaaagaggtttggccccgttagtgtggtaatagcctacttcccttagattgtattagcttgaganaaagaataaagtgtttttctctctcaaagctcttacaatgaaatctctaaataattctcttagatctttctctgaagcaattcttttgatccctttcacagtgaagcagtcactatttatagggccttaatgcatgagacaaggtttccctttttcttacaatgtataaaataggaaagaatattcattacataattatgatacacaaaataggaaattggaacaggttgtcatattcctctgactcaatcacacaattgtagggaatgtcttcgtgcttggacttcatgagatcattctgaagtagttaaatcctgataagtatctcggaaagccagatctgtgcctgctaggatgatctacccttcaccctgttcaagtaattagaagctatacatgctgatgtataatatgaagtctgctcgggacatttatctctgcccaaatgcgagaaatgcaggacacgtgtcacttgtgtattctgcca

SEQ ID NO: 145026 - DNA, 722 bp, Cannabis sativa
  modified_base (393)..(393): a, c, t, g, unknown or other
tatcttcaattctttcaattctgcgggagccattcgatacggtgcttttgatactggttctactcccggaactaactcaattacaaattcaatctctcggtttggtggcaatcctggtagatcttcaggaaagacatcaaggaattcacacaccaatgttgtattcacaggtccagatgtcacaggttggctggtatccactgtagtgactatgagtcccagaaaacctctgctcatcagatccttagattttaaaagtgttattcttggtatgcccgtcccttaaacttcaccctcaaatactgtcaggttagcactgtcaagttcgaacaccaccatcttccgcttgcagtcggttgtttccccacacttagacagaaaatccattcccangattatgtcaaaattagacagttgtaacttaattagattggcaattaattcacaactgtcaatccaaaaggacaaggaccgaatccacctagtcgatactgtaaggtctcccaaaggtagcagggtaccaaaccccgaagcatacacatcacatggtttatgaaaaatttctattactctactcgacacataataatgagtagctcccaattcaaataatacagtataagaacaaccatttatagataactgacatgtcacaactgacggactagcatctgcgttagcctgagtcatagtaaaaggttgtcccaggttctgagtagtat

SEQ ID NO: 145027 - DNA, 520 bp, Cannabis sativa
aagataaataacatgtcttatttaggaaaactccatgccttaaataaggtaaacgacccaccatattgaacaaacaccgtgcctcaaataagataaactaaagtataatttatcattaaagaagtaaattattactgtaaaataaagtaaacgacatgttttatttacgtaatctacgtgcttaaataaggtaaactaaaataattattaaatataaaaatcactaccataaaataaggtaaatgactcattttattaagcaagttttttgtcttaaaaaagataaacaacatgtcttgtttaggtaaacacagtacctcgaataagatacaccaaaataagtttatcagcaaaaggtaaacaactatcttaaaataaggtaaacaacatatcccattaaggtaaccaccctactttaaaataaggtaaataacatatcttattaaagtaaataccttgccttaaaataagataaataacacaccttattaagcagattttctgccttaaataaggtaaa

SEQ ID NO: 145028 - DNA, 852 bp, Cannabis sativa
  modified_base (786)..(788): a, c, t, g, unknown or other
ttaactcagatgcaaagtccatggacttttgccatttggggaattgacttgatcagacaattgcccaagggcaaaggagcgtacaatacgcaatggttgcagtttattacttcaccaagtggacagaagtcaagcccctagcaaccatcacgtccaaaaaagttcaagactgcgttgtgaagaacataatctaccggtttggattatttccgtacaaaatagtttcggacaatggcaaacagtttgacagccagtcctttacttatttcggtgcgaaccatggtataatcaaaagtttctccgtagtggaacatccccaagaaaatggtcaagttgaagcagtcaacaagacgttgaaagatacaccaatgaaaaggcttgaggatgttaaaggaaactggctggaggaacttcctgaagtcctatggtcataccgaataactgagaaaacggcaaccggacagactccatttgccatggcatatggatatgaatcaatgcttcccatagaactcgagccgccattccataaaagattgacatatagctaagaagcaaatcacgtactccttgccgaatcacttgatgaaatcaaggagaggcgaaccacaataaacttaaagctgatggcccatcagcaaaaagtagctttgtatttcaacaaacaagtgaaggcttagaaattcttggtaggagatatggtcctaagaagagtatttctaaacaccaaagacagtacggcacgtttcctcgaacctaactgggaaggaccatatcacgtggtcnnngttctcaaatcaggagcatacaaattaggtaagtatgataaataaatgcaactcgttctggtac

SEQ ID NO: 145029 - DNA, 1286 bp, Cannabis sativa
caagcagcctatgaagagttcatctcctggtaatatttctccatctcaagctgtcaattccagattttaatatcgtgataatgagcgtgattaatggaatatttatgctacccgaaagtttgaaagtgaaaattatgatttgcatgctcatagggtgtatggtattgttaagtttgttcaataccatcattgggaaaatactcttactggcattgagggatatattgatggaattgtcaaagaattttatgctaacttgtctgatgattttcttgatgagattttgaattctttcgtaaagtatatgttagaggacattggttttcatttgctgaaaaaaaatatttccaaggctttgcaactgccagaagatgcgataaatgttataatgtttatggataacaatttgatgctcactgaactcactggtgcacgagttgaattgaaatctgggcacagtcttcgaattacacatcttacttatgctcatgcatctctcatgaggtttgcacttagcaattgggttcctaattccaacaaaaccgtggtatctcaagatgtggcctcttttctctttcgtatcacctcgggagcatccatcaacttggcttcctatatcttggatcagattgtgtcattttgaagaggtaaaaagcgaactcataagcttgtgtttcctaacttaatctataaaattttgtcctctcagatagatgtgtcctactctcatgaaactcttgagcctccccttactggcaccatattccaaccctcggagtattttgatagagcttttcccaagcgtcctaaagctggtgctggtgctgttggtgcaagctccagttctgctcctgcagatgtccaggaggtcaagcatgaggttcaactggtgaacaatcatcttgctaccatggaggaggttcaacaagagatgtccaagcagctgtcctctttgatcaagctctttagggcataagtttctctttctttttttatgtttttgttggacatatttctatattttcatgttctttgtcttttgcctttagataaacaaaaaggggaagtaataatttgtttttaactgcttgttgtctcaactctggaccctttttccagggggagttgtgtttggtacttgtgtttcattttggattaaaagttaggttgttgttttgttatttcggttttcaattgtgtttcttagggggagtttttgtttgctcttgctaactttgatttgcaggtacttctttgttaaaaaatattttgttcatctaaagtgc

SEQ ID NO: 145030 - DNA, 567 bp, Cannabis sativa
  modified_base (514)..(542): a, c, t, g, unknown or other
attgatgttgaataaaatagattactttgaaatggagttttatttagggcataaaacctaacaattggagtaagacagacttcaagctgtccttctattctgggaaggtgggttgaagatgtgccatgcctcagtaatatatcttggacgaaaaacatcacgcatgagagagtcacgttgaatatttaagaggcaaggttcggcttccacaaaggaaggctaaagttgcataaaaaatcaagcatagacttcgctcgaaaagatcaaaaggagaaagcaacacaaagagtaagaaagacttcaagcagtcctcccattttgggaaggagggttgaagacgtgccatacccccagtgatctttcttgcacaaaaacatcgtccatagaggagtcacgttatatttttatgaggcaagctttggtttctacaaaggaaggctgaagttgcataaaattcaagcttagatttcgcttgaaaagattaaaaggataaagtgttggaaattattttacnnnnnnnnnnnnnnnnnnnnnnnnnnnnnttattaacatcctaaataagaactt

SEQ ID NO: 145031 - DNA, 672 bp, Cannabis sativa
cagaatcaaaccataaatatgtgtcagcttgatagaacattctaaatacaaactctcactaaactagcacaatcttaaataataccacatccatatatgagtaacaagctcctgcaaagccttaagtgatatatccttaatgatcccgatcacacaaaatatagagtttgtccttattatgttctatagacaccttattactctaaacttcattttaataacaattagctcaaagtcaatgtgccttttgaccttatagagttaatattgttactaaaatgaaacctgattgatttattgtcacaacatatatctttaataactttcaataccattcttaattttgcaaccatatgtgacaaaaaaatctcacaactaaaaactttataagatcagaatcagaaatcttaatgatctccaaaattttctattttttttttgttatttatgataagtgaacatagaatattttgttctccttaaattccttagagcccatttggctgcatattaaaagttccttatatgcttacttaaatatctatccaaccttcttaatgtgtataagtacaaaaacatacatgcttgagcatatattagattccaatgtaaattaagaatcttctatatttcttaaattctaaggttgcttttagggcaataatttagaca

SEQ ID NO: 145032 - DNA, 1264 bp, Cannabis sativa
attacatcgagtaattcagcttctcttgtcgaggccaatcgggccagagcatctgcatgagaattgtaagcacgaggtattttggaaacaactatctttttaaacttttgtaataactcacaagagaaagatatttggccaagcgatctcctctagctaggtactctccattgacttgacaaaccacgatttgcgagtcgctgaatgcttgcaaatactcgactttcatctcaatagtgagttttaatcctacgatcagagcctcatattcggcttcattgttagatgcaagaaactcaaatctaagggtagcgtgtaccttcaatttgttgggacttatgaggattatgccaccccttgatccttcactgttagatgccccgtctacatacaaagtccacccttcacgatatggtacgtcaggatcaattcgctcttctgtgatgatggctactttgtatttggaaactcgagtataaagtctgcaagggcttgtcccttgattgctgatcttggtttgtaattgatgtcaaattggctcaactctactgactacttcagttttctacctgaggcctctagttttaccaaaacttgttgcaagggatagtttgttaaaacctcaatgatgtgtgcttgaaagtaaggtcacaactttctttacgcgaatactaatgcaaactctaatcactccatttgtggataacgggtctcggcatctaggagacacttgctcacgtagtacactggatattgtctacctcgatcttcaaggattagtactgaactaatcacgtattcggacactgcgaggtagacggataaaacttatctagacattggcttagaaagtattgggggtcgccacaagtgcgttttgaaggcctaaaaagcttcttcacactttttagtccattgaaactttttatttccctttaaaatctgaaaaaactccttacattaagtgatttaaagcagcgactttacctgtaaggctttggacatcttttggtttgattggagattgcatttccaccaaagctttgatttttgcgggattagcctcgattcctcgttggataaacccaggaattttcctgagcccactccaaagacacatttaaggaggttgagtcgcattttgtatttttgcaatatttttaaatggcctctaagtgagtgacatggtcctttgcatgttgagattttacgagcatatcgtcaacatatacttccatcgtctcgccaattaaatctacgaaca

SEQ ID NO: 145033 - DNA, 1422 bp, Cannabis sativa
ctaactcatgacctagaacttactactgtggtttttgttttaaagatatggcgacattatctttatggtgagaaaggtgagatttacattgttttttaagagtctcaagtacttttcacccagaaatatttaatcatgaggcagtgaaggtggctggaactagttaaggattatgattatgagattctgtgtcaccttggaaaagccattgtggtggctgatgtacagagtagaagaggtcgcaggcaggttttcacgactgttatgatatctcctcaacttgcttcagatatggttaatgtaggaattgagttggtagttggaaagttgcacatcttgacactttaatataatttgttagagagaatcagaaagacacagttagaagattcccagctaatcaaggttcgagatgaggtgatggctggtcggcctaaagacttttcaatgtcaaataatagaaagtttacggtataaagctcaagtttgtgttcctagtgtttttgagctcaagaaagaaatcctcggtaaagctcataccacaccttattcactgcatccaggaaccaccaaaacgtatcaggtcctaaaaccctacttctggttgtatgggatgaaaagagatgtggtagattacgtgttaaataatgtatcaggacttaaaaccctacttctggtggtatgggatggaaagagatgtggtagattacgtgttcaagtgcttaacctaccagcaaattaaggttgaacatcaaaggtcggcagggttattgcaacgtttaaccctttgcaagtggaagtgggaggacattgtaaagaatatcgtaactggttcacctagaaccactaaaatgtatgatttagtatgggtcataatggaaatattcacaaaattagctcactttctgcaagtgaaagttacttatgcagtggaacagtacgctgaactatatgtaaaagagatagttcgtctccatggagctcctaaatccttttgttttggacaaagatcaaaagtttacatcaagttttgggtgagtcttcagagagctatggatacaagctgaagtttagcacaacttttcaccctcagattgatgggcaatctgaaagaacaattcagatactagaagatttactacgagcctgtgtcatggaatttgagggttcatggagtaagtacttgcctttaactaaattcttctacaacaatggctaccagagtacaatagggaatgatccctacgagattttatttggtaggaaatgtcacctccctattcattgggacaaaactagggaaagggagtacttagatccgaaattagttcaaaggaccaatcaagctatagataagatcaaggctccgatgcttgcttctcaaagcaggcagaaaagttatgttgatccgaagcacagaga

SEQ ID NO: 145034 - DNA, 933 bp, Cannabis sativa
  modified_base (434)..(436): a, c, t, g, unknown or other
gggacaccagaaaaacgacatgtcgtttttgagctgttttctggactgaaaaatgatgtgtcattttttcacgtctcttttgcccagaaaaacgccagtgggtctgaaactcgggtccacgggacccagttcgtgacctgaccatatctccaaaattcggccaccaaatttgacgtcgtttgaggcattttgtcccatttttaatccattatcattttccaacccatttactcaaaaaatacagaataatacatcaaaaaatgatgaatccaaaatgggtttctccattgttaaagctcatatatctcaatagaaaaagtaaaagattttttacaagacatatatgaaaaaatttagagggataatactcatatccacacaaccttaaacacattaatctaaaaaatcaccacaaatttcagatttgagaaaannngtttgtgaaaaattttgagccctaaaatcaatatgtatggcccttgataccaattgttgaaaaacaattacagattatgagcattcaaaagcatcagccaacaataatccataatcattaaaaccaagatttagtatttatttagagcatcaaagacaaaatacacatacctctcatactatctcaaggagaatcaccaccaagatccctaatcttgagcaaaaacctagagagtacttgtggagctaacccttttgccttttaccatacaaaccctagtgacccatttaccacacataacacacacatatatatatatacatgttattacccttataatcctaaggggttattaactaatagggcttttggggtcttttatggtatactttaatttaatgggttaactatagtattaagggtgctctcatgtgcctctaatacataattaagttgttaaccatcccattatagttattagcaacattaggcacata

SEQ ID NO: 145035 - DNA, 833 bp, Cannabis sativa
  modified_base (648)..(648): a, c, t, g, unknown or other
tattccgctgcaaccaatgtaacattttctaaactcttatgtgtttaatttcgttgttttagagatattcatatttaggatgttaattcaacatgcttgtttgtaaatctagatcctggtaggatattcccaacacagctcaatacttacatcttaggaacacggtagtgcaattgagagggtgcgctaattatagaaatggaatctttagcttctataaaatacttagaagtgaaatgatgatttccttagaacttggctagttgacataaatagaagagctcttatttcagtaattatattagtttaagaaatatcatttataagaaactaagtgttttaagggtaaaatacatcgaagagtaaaacagtaattttagtccatacttaatgtaaatcatctataaaggatcattgattatttagattgcaataatagataacttatagtgtatctatttttggttaatagagtgttcaaatcaagagtaaaattctgaatctatagtggagtcgagaggaattaataagatagggaatttactcgataaattctagaactacttattgggaggttaattatatgggccatggtccccacactatctgagataatattttcttgtagactcaattaattagttttanttaatcaattagaattctaagtaagactatgtctcaattatgagttccagtaagcaagggcaaatttgaaaaaaaaaaaaaaagaaattcagggtttatttgttaattaaaagattttagaaagtgtaattaataaataagttaaataataattttatttgataatttatcataattattaaata

SEQ ID NO: 145036 - DNA, 660 bp, Cannabis sativa
gggagatctacattttcggccatacaacagttcatagggagccatccctatcgtactctggtaactattgttgtatgaaaattctatcaacggtaggtattatctccaagagctttcaaaatccaaaacacaggctcgtaacatatcttccagtatctgaatcgtcctttcggactgtccatctgtctgaggatgaaaagctgtactgaactttagtttggtacccatagcccgttgtagactttgccaaaacttcgaagtgaacttcggatctctatctgaaattatggattttggcacatcgtgcaatcttactatttccttgacatacaaatctgcttattgatccactgcaaaggttgctttaaccggtagaaagtgagcagacttcgttaatcggtccaccacaacccaaataaaatcaaacaaacccgtggttgtaatccaaccacaaggtccattgcgatatcttcccacttccactcaggtagggttaaaggctgcaacaatcctgctggtctctgatgttcagccttaatctgctggcaagttaggcatctcgatacgaattcttccacattctttttccttccgctccaccagaagtagggtttcaaatcttgatacattaagtttggaatcttatttcagaataactta

SEQ ID NO: 145037 - DNA, 903 bp, Cannabis sativa
tatatttagctgttaccgagacatctatcgggacactgttagcacaagaagtcgaagggaaagaaaagcatgtgtattatcttagccaaaaactgaaaggcgtagagacagattacccctatgttgaacaataatgtttggctttggtatacacagcccaacgattgcgacattacttagtagcacataaagtaatagtgatgaccaaggcagatcccataaggtttatgttaaacaaacccataccttctagtagaatttagcgagtttgataccactttcatgtatccaaaggcacagaaaagtcaggccttatctgatctattggcatatttacctgataatgatgaaaatttactcatggatgaaatccattgggagtttccttaggctatatatgatttgtaatgagagaacacaagaatggtgggcaattacatttgatgggtcgtcaaccgctaaaggaggaggtgcatgaatagtattagctgatcctacgggtaagaatcatattcaagcttataagttatcgtttgattgtactaacaatgaagctgagtatgaggcacttattctgggaatgacggtcgcactaaaactggaagccagcaaagttgtgattagaggggactccaaacttgttatccagaaagtcaaaggggaattcgctgtgaaagagccatcattggcaacatatcgatcaatggtccaagagctagcaaagaattttgaggaatgtcaattcgagcatatgcctcgaacataaaataggtatgccgatgcttcggctactatggcttcaaaaattgaggtatcagaaatccaaaacttgacatttaaaatagtcaatcaaaagtgttcaatcacctcggggtatggaaaagagtctgccagcaagaagtg

SEQ ID NO: 145038 - DNA, 950 bp, Cannabis sativa
taataagacaaacacataaatatgttttgttcatccttttcttaaagacagcaaacacaaaatatttaagcagggatcaatacatacatagatatatgcattcaaaactacatcttctaagtattaagactctatatccaaaagagttttagaaagtacttgtggaggttacaatctctttcagcctaacaattttcttgtgatcaagcttcttaagaattttaatctctctaatggttgtaatatgaaactataatttgcaaaaaagaaatataaataacgtacctattctttttcattgtccaatagtttctccggtctttttatctttggccatgtacacttgactgcaaaaagataaaaaaggaagctaagtaatcccaaatccttataatcaatattcgataatttgaagcttttagcagcataaagcaatcaacaacttcaataacatcatcacagagttcatagatttatgggtgaacactacacccagccaaacaacaattcacggtcatgaatataattaccgacctagtaaaatgaagtagattcaattttttcggaaaatatcaggaaggggaattaaaattacaaaaatccagaagccctttactacaacaacaacaataagaaacaaattgaagattcatatttctgtgattctctaaggaagaaaaggaaagacaaacccataagtcccttcaccaatttgctctgactcaccatttcgaaaccataacttccatctataagaagcaatgccaatttacaaagggaaattatagcaaatgcctcatgtccttattttaaataattgtagcaaatgccctaaattataggactatgttaataaatatttatttaaaattatttattatttatattgtcttttgtcacataaaaaaatcattaatttttttttcttttttttttttagaattagaagc

SEQ ID NO: 145039 - DNA, 591 bp, Cannabis sativa
  modified_base (385)..(397): a, c, t, g, unknown or other
  modified_base (522)..(544): a, c, t, g, unknown or other
gcactaacataaaactagaagtgcctttcaatcaataaattgacttgatatccatattaagtgtagtttgtttgactaaacacaaataatgggaaatgtacggctgtgggaagcaactgctttctccaccattacttccttcgtgttcataaacattatgtaatatcacttttctgtatctattactcctttagggatactgaattctttactacttgtagagatgtgtcttctgtacattcaaacacatctctaattctatccagaatggaatagagataaaataagttaagaactttcttcggtttgaataactttctagttctttttaaaacaactaagttatttagcttcactggtggaaataaatgttgggttttgtgcnnnnnnnnnnnnnctatttcaatataatctttatcattgaattatcaataaagaaacattagtattttcatcatttatttagtgtatcacttggttcgtgtggtcatttatatgtttgtttgatttataaattcatcnnnnnnnnnnnnnnnnnnnnnnncttgtttattgtgtcgtcagcactactgacctcgcttttagccaatg

SEQ ID NO: 145040 - DNA, 520 bp, Cannabis sativa
tttttattaacattatcctttaattaattactatttaccgagatgtttggaaactaaatatttgagaactaaagaattaataaaatatagaataaagagatggagattttttatgtggtttgggtgttaattaaccttagtccatgagtcagtctattagcgtcttaggaagtttttgatgtgtttataatatttttgtaagaaatcccaactctgtactctatgtttctcttgaagaagaagaagacgaagagtgatattggtagagtttcagctatgttcgttctgattcccccttcgtatggaaatagaagggtactaggctaagtggcgggtatggacatggcatgcctagggtttttgctcaaagcccactaatggggtaaattacatgcaaaatgagatttgactattgggtcccttagaatccattgtgcccatgcgtcctgcagttggataattagggaccatttgtacgaagcagacatttgttacccaaaggtttaatctttaaaagtag

SEQ ID NO: 145041 - DNA, 508 bp, Cannabis sativa
atggtttgatatttttaaaattaatatttacagttaaatttgcttagtaactattcatgggtaatacccattaaaaagtgtttatattaagaagtgttctaggaatatagataaattttatcattaattttctcctctacattatttatggtgttttcctttggtattgatcaaacatatatgtgagatgctaaacgaaaattaagtcaaacataaaatcaatattatataattaagattaaactcacaacataaaatcttacatttaatcacaataaattttttgactaaaagtaaaaacttgtgattaattataaatcacaccattcttatattgtgaataaaagatccatggttaaaagtaaaaaattataggtgccgtttggtaacatttttgttttctaattttttaatcacaaaataaaagtaaaatttttgtaaaacaaaaatgctttctctaaccacttttgtttttcaattttaaaaatagaaaacaaaaatatattct

SEQ ID NO: 145042 - DNA, 999 bp, Cannabis sativa
aaaaatcagaaaaaaaaatgtagaaaacaagtattgttgtgaattggagacatttagagatgtttcaagatttcgcgacatctagagatgttttgagacatcgtcataaacctgaaaaaaaaatgcagatcataagcgctagatgggtcagaaaccaggaaaaaaaatgcggtggtcgtgggttgtcttgggtgcttctcgtgggtcgtcttggtcggtcggagctcgtgtcagtcgaggcttgaaaggtttggggctagatgggaataaaggggggaagttagagagagagagtgggagaagagactttttgaattgtaagggtaattttgagattttagtgtgtttggagaatatttagagtatttatttaaaggtggtatattaaaagaatagtctaaatttttaaatatattttaacaaattttcctttctaatttggcccctcattagtatacgaaaatgcacattttaaagcattgatcatgtaataaaattaagttttactatttattttcataagttttaaatgaaaattttattaaatatgaaaataatattattacttaacttttgtattatttttcaatgtttaaaaggttttgaagcccaaagaaatgaagctccaataaacttcaacaaaacccacacgtgggaagcttcttaaatcatcatatgcatatatatcacttgcgtcatttggatttcaattcatgggtcgtaattaagtaagtatagcccaactcaacatttagttcaccatcaattgtgacgagcaaaccccaaccaactgctccacttactctatgcgcatcactatccagtctccccacttgcacataagcccaacttcccaccttcctccgaatttgaagccacactttttcttattttattaatctctcttattactattttatctatactcattttagtgacaaaaatgagtgtattagaatagtaatattggtgaggttagagtgtagcttttgtaattct

SEQ ID NO: 145043 - DNA, 588 bp, Cannabis sativa
tattacggtgattacatcactgactaaatttgtatttattagcagctaccaatagatcacatataaagcatcaatttcttatttacacattagcctaaaatgactttttattatatactacatataatttttttcaacacatctaaaataatacaattttctaatttttattcttatttttctcaaagaaaaagtaactaaaagtctaaaaatatgtatatgatatagcatgtgttaatctttcttttcagtaatgttgattttcaattcttgatgaaaaacataaattagaaatatatatatgatgaaaaattttaactgtttggagtttgatatatatataaattgagaagaatatggtcaatgtgtttaattgaattaattattcctacaaactatggataatttttttaaataaaataatggatttacacaaaaagaaaataaattataaaagtttaaaggaaaaagaaaaggaaaaaaaataataataaaataatgagaatatttttaatagaaagatgtgtgtacatgtgtataaatgaacttttatagaataatttcttattaagaaatttaaattatttt

SEQ ID NO: 145044 - DNA, 886 bp, Cannabis sativa
agattttcttgatggtcaaagtaagatgaattacagcctgtccactaaaacagttggagcaactggagctcctattacacctagaagctattgttggttgttggctaggctcgatttgtaccaccgggcttagccagctaagtctaccactataacaatggatttgttatgagttgtaaagtggtgactatttggaaatcaatacataaggatgtgagaactaaattcttgtttaaagatcataccatgttaaatggctcgtttaagcctggaaaaggtaactaaaaggacactcgagttcaatagatttaatcccttttgaggaaggacatcaagatagtgatgactgtaattctcaaaatggtcaattcaaagcattatcgttagtcaatactatgtgagagatcagtgggagcaatgatatgtttatattattacttgatatagtacattgctcatattttatgatagtgatttatgctggagacgattgaactgttatttgataatctctgaaagagaaagaatccttgatgaactttatatggtctaattattttagattctttgtgataagatcaaaaacaaactaaattgtctcatagtttgcattgactcactattgttgtgattaatgtttgatttcattgagaatttttttaaatagtttaaagtatgatttgttatgaaaggcctaaagttcatgtatattagtaataatgagagattagtattgaaattgtcccatgcgcatatatgcttattccaggcagcctagggttcgctaagtacatgcattcctattgggatatttgttgcaggcatgctggattggtacttgagctatcgttcttatggtacgaaggatttgttaacaatcgacaaa

SEQ ID NO: 145045 - DNA, 657 bp, Cannabis sativa
ggggttttaccacccaattttgagttttgagggttaagttaaactaaaataaaagttttaggggttttgtcgccattacccatttattaaatttggaaaagttaaaactgacttccatcaatcacatcaaccgtcgtcctccactcttccatttccttcttcactttcttttaatttttcgtttttcattttctccttccttcgattttccattttcgtctctgttggttgaaaacacacattttccattttctttttcattttccatttcattttcatttcagcttaggtaaaaaccagattttacattttcttcactttttatacttcgttcttcattgtggtgtacattagtcgtcttctgccattgttggggttgttacagtcgtgggtgtcgacggtgggttgtactagtaagtttctccgttctgcactttttataattcgttcttcactgtgggtattaaaaaataaatcttttttttgaagggaatgtggtgttagtccattttcgtgtacttaatagtttcattttctctcaggtgtcgacggtggggtgttggaggtagtttccatttctgtgttgaggtatttctctctctctctctctctctctctctgtctcccccgtgcatgtgttctgattcttagtgtgca

SEQ ID NO: 145046 - DNA, 868 bp, Cannabis sativa
ttagagttatcatttttatattatattattattataatattttttttttaaaaaaaaaaagtcaaaaacgttaaggttgtatactgtattattattactataatttgagttttatggagttatctttgtatttttatagaattaaaattaaaaaatgagagaattaaagagaaaagagaaaaataattttaaagcaattttatatgaattaaaaattaaaaaatgagagaattaaagagaaaagagaaaaatagttttaaagcaattttatatgaattaaaaattaaaaaaatgagaaaattaaagagagaaaagaaaaatagctttaaagaaattttaaagtactatgtgggtgctttatgtctctcctctatatatatagatatagatttatatatattgattgatattttatgtatgtatataaacaaaatttacgattaattatatttgatttatgttttttttttgaatttattttttattttctaactttttttaaaaaatgttttatatttttataaaaaattaaaataatagtaaaatatcaatttgtagattaaaaatttttatagaaaaattattaaaataattgtaaaatatcaatttgtagatttatgctttaataaaatattaaaattcagagaattaaagagagaagaaaaaaaatagttttgaaataattttaaaatgacatgtcaccgcaattaaaaattaaaaagagaaaagaaaaattgctttaaaaacttttagagtaccatgtcaccccttcatgtctctcctttatctattctatataaagtgtgcctatatactaaaattcttggtttttgagaaattcatgggtaactttttatttatattaaaa

SEQ ID NO: 145047 - DNA, 1496 bp, Cannabis sativa
tatatttttcttaatagttaagtaatgtatatataataataaaaatataatataaatttatatatataaatataatttaacagtaagtaacctactgtaatatataataataataataataatactagtgagaaacacgtgcttcgcacgtgagtgactcttaaaattatttaggtatagctatttcaaaaaataattagtattttatctcttgaacgtacaacactataaaattgtatcatttaaaatgtacaccatgttaaaaaaatttaataaactcttctgtttagagagatataatatttttattagctatcattcttttttatcatctaaaatttgatgtggcattgttaattagtattttttttttctctcaaacattatctacttctaaagcatatttcttaaaaaagaaattaaaaaataaataatttttcatatttcttatttttttttttaaaaaaaaaactattacttaaagtgtattttgatcaataaatatattattattgatttagatgagaaacttgcatccttatttttttaatacttaagtgaagaaattcggtaagtaatacataaatatgagtttgtaaagataaaaacgtttgaatcaaactgtttaagtagatataaaattttaggaaaaaaattaaatatacttagaaatgtttttgaattttcaatactactaataataaataataattaatacaaaattaattttaaaaaaaattgtaaaaatgggcataagtaaacaaactgtttgaaccttgtttccagcatgttaaattattctcgatttattaaaaatttacaaaatgtttttaaaaaactacaatttacattgtcatataaaaaaaattaaaattaaaactatttgaatatcgaaaatacgaaatgagtgtttggtacacttaattttagagaatataacatagaatttccctaaattaattatattgttgttttattattattttttataatctatagttgtatgtttatttatttttttgataagtttactttgtggctttaattataaatttaatagaatgagaatatactgttatattttttttacttaagtaataattatttatcaatagtattattatagtagaaaagtaatcacatatataataaatttgttttctgttgttaaaaaataaagaaacatgttttatatcttttataaatggattatttaaaaaaaatctttaacatataatatttatataatgaaagagaaatacattaactccctcaaaattgttgagggacttttttgtaaattaattgttggaggatctaaaatttttgacaccaaaaaaatattatgaacatgaattatatgaataaataaaaagtttttttttacacataataaaagctatttgttcaaataaataaataataaatgaagactatttttgtaatttaactatgaatggccgaaggagaagtattctcctttttatagtagttat

SEQ ID NO: 145048 - DNA, 737 bp, Cannabis sativa
aaatattataatttaacaccaacagtatttttttttgaacaaatcaacaatatttattaatgctataaaaatatctcaaattaaagtagataacaatatgttcaacattaacactattaaaatgtctcaaaattaaactaaattcttaaaagcataaactaattattctataaaatctatattaaggtcttgggttataaagtcttgatacacattattatcattcgaaaatcccaacagctgtggcgaagaagaaacatatggttgatctaacgataaaccaagtgttaggttctctagctagctgagcttgattgagaaaaggagtcgaaaaaaattgttgctcctgcgatgaactcccaaatatcccaaaatcaacaaaatttaaatagagcagaagagagtctgatgggttctatataagaactgataataaattactaaaattatttttaaaataaataaatataaattaaccaattttttttttataaaaattattatttaaaattttaaattttttatataaatttaaattaatttttttatttaactcataaaattaataatataataacttcataacaaaatttattttaaattatactttttttattctttcattattctaaattttttaaattttattacaagtttattgttaataaaattttaccatcataatattacatctttaacatatccaaaaaattacttaaatcaaatacaatctaaaa

SEQ ID NO: 145049 - DNA, 613 bp, Cannabis sativa
  modified_base (569)..(570): a, c, t, g, unknown or other
taattagatttttaattgtaaattcagattctacacaaaattctaccaaaatctgaattttgtttcaatgaaaaacaatttttgaatcaaaagatatcaccaaaacaagattactccccgtgcgcaaaagaggctgcacatgggcgagggagaggctgcaagaagcctgtatgtggggcaaacctcggtcaggaggggaaaaattcggatagggccttgtctgaaggcctcttgtccgagcgagtatccccattgtgtgctcggtttcaaatattttcattcaaattcaaaaaaatcataactaattcataaaaaatccaaattgagttatgtaaagcctaaattcattaatttttttgtctaatttctagtaaaaatatttctagaacgaaacaaaaaaaattacaacatatactgggatttccatacaatcatcaaatttgcacataaaccatcgtgaaaccatccaaatcaacacaaacatcgttttaaatcaatatttcatgaaagtaaattattcccatgactctgaggcaagttgttagattatattttaccaggatctaganntactaccatgtatgttgtttaaaatcctaaatatgaatttcta

SEQ ID NO: 145050 - DNA, 764 bp, Cannabis sativa
tttttttatttatatataaatttctactataattattttaccatttaagccatttaattataatatttacaatttttttttttgtacaaaaattaaacttattttcatataaattaaaattatgtccttataataaatttttaaataattttttttttttacaattagatgatgaagcctcaaaccttacgagagtaaacagcatgcctaaccattgagctacccctcttacatctcactcttgaaccaactatcattctaagacttgctaagtcaagctgatacacccctgtcttaaaccaatgttaaagaacagaaaataataacaaatattactctttagtttagtaatttattagtgtaagaacatatttggttgttggtgtgaagagtggtgacttgttaaatagaactattggctcacttaatcaattaatgaagaatatatgaatttcttattctctctagaccttcccatctctctcaattcttatttctctactattttcttagacaagctaaaacaataattttgatttgatcatccaatgagagtttccacaatttcctacaatgaagaacccttcattgaaagcatacataatgaccctgtaaaggcatatgatataatcctaatactgcatacatatttttttcctttgatgaccaaacagtaaaaattcccaaagaattacataaatgaatacaattgcacttgcctttatttcttcaatggtgggttatatagaatcattatccattgt

SEQ ID NO: 145051 - DNA, 789 bp, Cannabis sativa
ttctattctgtagtccgtgaacgcgtggagcagttcccggactattgttacatatgcggccattctttcgccgcatgtttgatactctcccgatatctggtttacgaccagttgaagtcgatgtagacttctactctgttggtccccacggcctttgctaatctcagtcctgctatcaaggcttcatattcggctttgttgtttgaagctaagaagtcgaaccgtatggctgcctggagtcgaagtccgctcggggatatcgtcgcaaccccctctccggatccattttcattagaggctctgtccacaaatactctccatgtggggactgatggtacaggcgcgttcgcggtttcctcggcttaattacattcggtgatgaagtccgccaacgtttgtccctttatggagatgcgaggtatgtattgtaagtcgaattgacttaactccgtcgcccatttgaggagccttccggacgcctcttgcctttgcaggatttgcctgagtgggtgattggtcaacaccttgattgggtgcgcttggaaatacggccttaatttccttgaggccattaggaggtagaaaactagtttttcgatgatggggtaccgtgtctctgcccctatcatgcgcttgctgacatagtacatcggatgttgagtttcctcttcttcccagactaaggccgcactgactgcgtggttggagacggccaaatacaggaacaggtcctctccgaggacgggttttgacaggattggaggcttggccatgtgctctttcagtttt

SEQ ID NO: 145052 - DNA, 519 bp, Cannabis sativa
tctctctctctctctctcctttgctccccattcaaccaagggagctccccgttcatataacaagggagttcccctcttccaatacttaaccaaaataccaagcacactattataaccagtagttcctatcacactactatgtgttaatattgttattaatccaattaagtatcatgtctaatttaatataaatttttttaaagaatattactaactaatcacaagatgacatatttagaagtgctaaacactattagtgtccaacaacaatactcttatacaatatgctgatatttatagcacattgaattctaacctccctcttgccaataaattaattgtgccacaaatgattggtacattgttcctttgttgcttagtttaccctttaaatctcataattacatagaatataagaaaaaaaaagaaaatgtcaccgcttcccgaaagaccgagttaacaaagcgaaaccgcacgaactgtatcttctcccgcctccgttaacttaacgttaaccaa

SEQ ID NO: 145053 - DNA, 693 bp, Cannabis sativa
ccgttgggtcttggcggcaggccaagaatatgttgggcatctctggggggagcaattggggccaaagctcctgctgcaccccctggtgctccttgaggcagagttcctgctgccgaaaccagattgagatggggcagccggttcttgatccactcgtatagatgtcccaatcggatcaagttctcgatctcgtccttgagatttttgcattcactggtgttgtacccaatgtcattgtggtactcacatctcttattggggtccctccgggagctgtccttgtacaggggaggcggtctccggtagtgcgtattttgcctggtagcaaaatatacacgttcctgggagttcgttagctccgtgtactgggtatattggggagtatatccccttttttgccacttatcctctgtctggttgctgcctttagaggaccttttgctccgagagccttgagaaggaccggctagacttgttgccggagcggagtgcgacggggagcgtccattaatccccgagggatttccaaagtgggaagatgcgggggccaaggctgggccttgattgtatccgggagtagcgaaaaattgtatgtcgctcatctacggagcggctgctggcaaagttcctgggagctgagctccaagtacgtatcctgctatcccggtgggatagtatcccccataggccact

SEQ ID NO: 145054 - DNA, 1246 bp, Cannabis sativa
tagggcacaaaacccaacactgagtagaaaaggtcagcgtcaaataaatacagtgaagtaaatctcccaacagttagtagatgaaatgactcgagctaaaattgagtttgttgtggggcaattggctaatattaccctgcaatctactcttttggagcgaatcaaaaaagcacaattgcaagatccagagtaagtgaaatcccgagatagggttttatacggaaagactactgactttacagtggatggcacgggaatgctacgatttatgaatcatgtttgtgtgcctatgaatgatgacattgaaagagatatcttgaatgagtctcatacgactccttactcaattcatccaagatcaacaaagatgtatcaagatcttaaggccatgttctgctagccaagtatgaaaaatgatattcttgaatatgttgcaaggtgtctaacttgtcagcaagtgaaagttgaaaaccagaggcctgcagggttgatgcagccgctgaatcttctgaagtggaagtgggaagacatttccatggacttcgtggttggattgcctaggaccacgggacagtatgactctgtgtgagtcatagttgacagatttacaaagtcagcacactttttgcctgttcggacgaacttctccattaattagtatgttgagtcatatgttagagaaattgttcgtctccatggtgtcccaaagtccattatttatgatagggatccgaagttcacatcaagattctgggagaatctacatcgagccatgggtactcagttgaagttcagcacaacttttcacctcagatggatggacagtcagagaggaccatttagattttataggacatgctatgggcatgtgtgtttgattttaaaggatcatgggtaaagtaccttcgcctgatcgagttctcataaaacaatagctatcaggcaacaatcaggatggctccttatgaacttatatatggaagaaaatgcagatcacctattcactaggatgaagtgggtgaaagatagttcctaggtcccaaagttgttcaaagaacaagtgaggcaattgataaaatcagaatgcgaatgctcacagctcagagtagacagaagagttatgctgatccaaagtgtccagatattaatttttagatcgggaatatggtatttctccaagtatcacctatgaaaggcatcaagcactttggtaagaaaagaaagcttagcccaaggttcattggac

SEQ ID NO: 145055 - DNA, 762 bp, Cannabis sativa
attggattttcatttttctaatttagatttaatagaaactattgacatattaaaattagggtaagttcttctaggttgtgccttggacaaacgaaagaacacttaaaagattttactttctgagtcaaaattatatgaaaaaaattgatgtaatcatgttattctaacaatcacatgattaatatgcttttataatagtaagaagtaaaatcttgtgtatttgtgcattgaaaataaaaaaaaaatcataaaatttctctaaatgatcctttcttgttgtgatattaatttttttttttgttactctttatatttgtactacagcttcaaggactagcagtaatactcaaaatctcacactgttattgttaatttatttgttttgttagtttgctctgttgtcatccaactaactctataattaattgacttctttaatctgttgttcataaatactgacttatttttcagtgtatgtaataattcattcaaatcaataatacagaaacacactcttctctttcattctctctctctcaaactcaacatgtgtaaactgaacatagaaagagggaaatggaaatgagcttcaaaattatgaaacaaatagcaaagactcagaacttcattaatttttgcacatagaaaaactattagaaattgataccacatttctacaatactaaattaagtctagaattttctacacatttgtagaaaaacatactctaaacttttagataattgtagaataatttagaa

SEQ ID NO: 145056 - DNA, 672 bp, Cannabis sativa
ccgcagccactgggcaatgcccagcaaaaaaatttcttttctctttttttttttcaagttgaatagtacaaaaattaaagaaaattaatattcggtttacaagttcaataaacataagccaaaaagaaacaaaaataaagtaataacatctaaagaaaataagaaaattcaactaaaacaccaagaaaatttgggttgcctcccaatagcgttgtctttttcgtcgtacagccggatattgactgagttcttcaaagaggcgtcagaatcatggcggacttggtttggtcaaattgacctcccaagtaaagctttaaccgctgcctgttgactttaaaagtctcagggctctcacctttcagttctacagctccatagggaaactccttgaccactgtaaatggtcctaaccaccttaactttaacttaccaggaaacaatttcaaccttgaattgaaaagtaaaacttgctgcccaggttgaaactcctttctgactaagctttggtcatgccacttctttgttcgttctttgtagatcttcgcattctcgtaaacctcatttctaaactcttccagttcattcaattgtagcaatcttttctctcctgcagctttcaagtccatgttgagggtcttcatagcccaaaaggccttatgttctaattccacc

SEQ ID NO: 145057 - DNA, 569 bp, Cannabis sativa
tggaaggagttagagttgaaaatcttgatcaggtgattaatgcatttatgattttttttatcaaagtctattaggcagcaaagttaattgcaagaagaagtccaaaactgtgtgttaatgcagggtcctgttgtctccagggagctgatgcactcttagctgagtatacgattgatgaagtgaagaaggctatttttgatatcccggggaacaaagccccaaggcccgatgggtatgggagtttcttttttcaagataattgggagataataggcaaagagacagctaaagccattatctctttccttcattcgagccagttattaaaggaattaaactccactattttgacccttgttcccaaaagcaagtgtccaaacactgtgggggattataggcctattgcatgctgcaatgtgctatataaggctgctaccaaacttatttgcaccaggcttaagatgatcttaccagagttggtggcatagaatttgtaaagtcttttttttggctagttagatgccaaaatattttttatttatggtagttttctttgtgtttccaatccg

SEQ ID NO: 145058 - DNA, 1204 bp, Cannabis sativa
atcctagagaggatgtaggcatgttcagagatgctagaaagacaactaccacgtgcaattgtagaaaggcgcaacagaatgtttggaacttgttggcatacgaccagtttgattggatagtccgtaatgtatgcttggtacactaggccaagtttgcctgagtgacatcgtaagccgtaggaggcgcttttgttgaaaaggaaccttgttggcatgggtgtgaaagtagtgcagagaccgtcagattcttgtttgtcatgacagaggttgagagttcatgactgagatggttcaaattaggatagatatagaatgcttcagttgctacatggtgtgtcaagagcgacgcacatggagaccaaaggggtagatgccgcaatcatcagaggatggttgtacttggaggtgttcgcatgtgacttgtatttgatccatatggaagcgccgagacagttgagtgggatgtgtgggcttgtaaaactgctagagggcgaagtcatacaaaggcatcgatagagatgcaaagttgtggactgaatgcatcaaagaaaccagcagggctgagaagaccgagcgcaagcgttgagattgcactagagtttgagtggaagccagagggctttgccagagagacttagtagtcatatttgcttgcgaaggtcatgatcagtgctagagtttgcatgaaggccagagggctgcatcattggaacttagtacatcgtgggagccagaagggcgtgatgcaagtgtgaatcagtgggatggttgagcggagaatgcatgcatatggaaatcgacaggggtgctatatgagatagtttactcgagattcacatcctgcgggatgcacttttagatggtgtgcatgaagaattagggcaatcaggcattcgtggcatgtgttgtcgaggacgccaacagatgaagtgggggagggaccttcacggttcactcaacggactagttattcattacaagcatcaagatgggtatcatggagattgattgttgttcaggatgtaaagtcaagaagactcgggacacgggcagtgccagttatctagggtgagagtctatgagactcaggtactaagataacaccatggcaatgttggcctaaggtgaaagtcagcaggactaaggtactaaggcaacattgaaatctcgaggggtgaaaagttagaatgaccgaggcattagt

SEQ ID NO: 145059 - DNA, 528 bp, Cannabis sativa
cagacatttgcgcttgcttgttcatgagcaaggcccctgtgttctgttcattatggaaactaagttagaatctggtaatgttgatagatttcgaaataaactacactttcctcatggcattgaagtacctcggcttggtctaagtggtggacttatgcttctatggaagtctcatatcactctctctattaataattattctccaaatcatattgattgttttatggaaagtaatgatggtccgtccttacactttactggtttttatgggcatccttgtgcttctcagaggcatcttacttggactttattacgtcgatgcttcgatattgcacctctgtctccgtggttggctttaggtgattttaatgagattctttctcatgatgacaaaattggtggctccaccagaaatgcttctcaaattactgcctttagagccactcttgatgcatgtaaactttctcaaataccttttgaaggtgaaagaactacatggactaataagagccaaggaaatgggaatgt

SEQ ID NO: 145060 - DNA, 794 bp, Cannabis sativa
tcttactcatctgttaagccttgttaacaggtgtatgggcgcctagatacaagtcggtattatatgatatgctatgtttttcttactgagtttgtcacaatttttcttccatgtgcaggtaaaagaaaggcgaaagttaaacaggtgtgagcctaggctgggatgaggttgtacacgtcatggtggcgcgacctggagtgttctgtctcgagacgtctggggatattattttgtagtcgttgtgcgaccggttatgtatttttgtatattttgtataaaagtttaaaaacaggatctcgatacttgtaaatagttttgtaaatcataaagtttaatatgtaatataaaagttttaatttgacacattttttgagaaaaatctttgattagcaaagacagcactgtagagtgccttagcattacggcgctacactaaatttgtttaagtcaattacttttgtaatctttgatactttactaaatgatttcattcgctgggtgtggccccgtggactagtagtgtttgaaagaaaactgataccaagtacaaatctcttgtgtcaagtgattgaattttctacaattatttttatattctgcaacttctagtttgtctttgcagtaacagaattacattctgttgctgcagacgtatacatttttatatttactatatttctgtaagaaatattggcaattgtaaaaaatctcggtttttcaaaagtcatcggcttgactttttgagaagcactcatcaaagagcggtttttgcccatagagagtgacatatgatg

SEQ ID NO: 145061 - DNA, 550 bp, Cannabis sativa
cgtatttatttacgtggtgcgtaaataacccacaatttcggggaaatattattgtgggatttgtatctgcttgtaattaactaccaccctatgttatcataaatagggacagaatgtactgaaaaagggacgaaagatccttgagagaaaagaaccctagtttgtatcagaataatttaaataagattgactcggggactatgtagtattttaactgcaaaaccacgtaaaaagcttcgtgttctattttcttcttttattttctataatttctgtgtaaaaatatgcgttaacagtttggtgctttcattgagagtctatgtgaaaaaagctcagaaaaagccctcctaaccaaaagacaaatctttctccatggctgataatagagaaaatgttgatactcatcctgaagagactactcaccgtcctggaaaagagccaatgggctcactaaggcctcccaattcacgatctacacggtccacgcattcaagaagaacccaacatgaaggtggccaaaatacacggtccatgttgggttttgtgccct

SEQ ID NO: 145062 - DNA, 936 bp, Cannabis sativa
ttcagtggcagagccaacccaataatttagtgggggtaatttttttttttttgaaccattaatgaaaaatataattttattgaaaaaaaatataaattttgcgggaataaaaataaatatatgtgaaaataaaaataaaaaatataaattttataaggatataaataaaaatatgtgccataaaataaaaaatataaattttataaagatacatataaaattatgcaagagcataaattaaaacaattatttttctgcagttaaaatgtaaaatgttaaaaatttatacacaaaatttacatagggaaaatgacctcacatgggcaccttgcctctgcgactaaatacttcataaatgtgttgattttgatcgaacggaattgtaggtatagtaacatgaattccaattaaggtttctgaattaattatttcattttgttgactctttctattatttattatgtgaaagagtccaaagagattaaaaagagaactagatattcttttttgatcagtatgaaaagggaaaactacgtactcctttcataaactatgttcgtgttgcatataaatgcttaaattaaaaaaaaaaaaaatattcgtgttacatattcatttttaaatattttaaaaaagaaaatttttcatttttacactttaaaatagtttttttttttgtatttttacggaattctacataaaaacttatactgcaattaccgctgcaacttaaattgcaacaaaaaattgtacaaaaactcctattgcaactagcgcggcaaccactattgaaacccacatcgtaaatttaaaaaaaaaaaagttaaaaaacaatatataaagtaattcgcctttaaaaaacttgtaaaaatacaaaaatgagtgacaatatcagaacaattattattaataggccttttatatatatatatatat

SEQ ID NO: 145063 - DNA, 616 bp, Cannabis sativa
gggcataaaacccaacaattgtgtatgtatagatttttcaaacataatagatttttgtttttgtagatggatgcgtagatttgtaagaaagttggggtagaattttgattagaaaagaatgaaaagtgatggggtaaaattaatggtagaataattataaaagaggcaaacctaataatttttttttaaaaatagtaaaaactaaacacatcaaataagaaaaagtatgttgtataatttcgtcaaacaacaatgtatcaataagccccggcattaaaacatcaaacaatcaaatttgattagtacagcgcccacatttcatttttattttttttacaaataatagaaagatatataatatatggtgtctgcacatttgataccatgtgttttatctaaatacaagttttgtaccctgtatttttaataatgcttatttggtatcttgtattttacaatcatacgtatttggtaccctaaattcaaatttttttgataaaatttaatcaatataatcaattttccaaaattttatgaattctgaattcaaatttctttatttgattacatataattgagaactgtttggttaaattaataaaactatattgattaa

SEQ ID NO: 145064 - DNA, 640 bp, Cannabis sativa
ctggggcagtaaaaatgttatttttgccgtgtcccagtatatttgtaaagttttggtcaaaaaacagtatttttgtaaaattcccttaaatatatgatacaataaaaaattaatttttttgttgtaaataaatattcaattttaattttgtgtggtaataatacttaacatattttttaaactttgtaattatctgacagttagatactaagtcattatctacgtgttattttcttatgggtatatttcaactatttcttaaaaaaaaaattaataacttagaccaatgaaagattgccacgtggaaatttacttaacgcgagttacacttaagtatttatgccgcaattactctatgtgataaacataatttaggtctatattacaatgtgctaaaggctgattcgttatatttttatctgttttagtatttaggagagttttttattctaattttttttatgatcgtctatgtaatagttctttagaataatctgtaaactttaaaaaaaaaattgaataatttacaatgtaaaaaaataagatttatatattttattgcacaaacgactatttttatttgggtaaataccattttgaaccctgtgttttgcaaaagttacagattggaccctgtgtt

SEQ ID NO: 145065 - DNA, 518 bp, Cannabis sativa
caacatgatcatcttcgatcatttggttgcttggcatatggatccactttagattcaaaacgccataaattttcacctaggagtcgggcatctatttttattggctaccctatgggaatgaaagcatacactctcttggacattgaatccaagcaaatatacatttcccgtgatgttgtattttatgaaaaaaaatttcatttcttaaactctacatcatctcaagaaattgatatttttttctcacaatctgtgttaccaaaccagatttccatcactaaaaatcagcatactgctgcacctatcaaacctgttgatatccccaccatccagcattcacaacatgttgtaatcaacaacatggctactgaaaatgacactccaaaggatgatacaatcaccaacaccacggctactggtttggctcataaaccagatgcagacaaccccacggttcctgctacagtcccaccaaaggccactgatatggctataaccaacatcaatatctcccatca

SEQ ID NO: 145066 - DNA, 524 bp, Cannabis sativa
cccacccaatcaatccgaactaactcgaccaactcgattaacataattttttttatatatatttatatgttttattatatatacttatacattatataatttatatgactattaaaaaatataaagttcaaactaatatattttattatggtggttgatttgaactttgaattcaatatatatgtatttgtcttattattacaattaactaaaatataacaattgaacgtaaaaataaaaattaaaaaaatattagtggtcgatttggatggattaacctggccaaacttgtcaattttattgggtgggttattattttcttttttcttaatagggtgtgttgcacttagatttttataacccgatctttatattggattgaataaaatgtagcataaaccgaccaaacagaccgacgtacacacctacccttaatatttgtaattattacacatatgactctaataaaaaaaagtgacagctaaaatacattgtctaataattttgttgcaatcgtacccttt

SEQ ID NO: 145067 - DNA, 520 bp, Cannabis sativa
agttgttggcgtaaattaggtgcattctaatttaagcgcttgcgtaaatcaggttgtctttgattcagatgttcacgaagatctggctgtctttattcatggtttctcacagaccttgtatctgagtaactctcagattgacagctcctcgtattactcctactttctcgatcattattacgtaggggtgagcaaaaaatctaagaaaccgaccaaaccgagtacaccgaccgtccgaacaccaaaaaaactgacaccaaaaaaccgaacactgaaaaaattgccttcggttaaaaccgctttaacatggtcggttttagggtcaatggtaaaccgaccgattaaatcgagaaccgaccgaatatatatattatatataatatatattatttttgtacatattgaatatacaattttattaaacacaattttactatatatttttatttaaagtctcaattattcattgctttattttattataatttgatgtctttacgtattatatacacacattcat

SEQ ID NO: 145068 - DNA, 940 bp, Cannabis sativa
tttggagtgagtgtgtgatgactgctgcctacttaatcaatcgcactcctacaccaaatctgaataataaatgcccctatgaattgttgtttaatgaactgcccaaatatgaccaattaagaaattttggttgcttggtttttgctagtactctcactgccaacagaaacaaattcacccctgggctcgaacttgtattttcatgggatatcccaaaggcatcaaaggttacaaacttcatgggatatattttccatgaaagaatatatcattttcatcgcctgaacataactaaagttattattgatcctttttccaatattgtttttccatctcaaagcatatctgatacttatgttcagaattttcctcctactgttcacaatgattcttgcactaaccattctcctcaggttaataattcaccccaggcaactaatgtgccatatgagccctcggttcctgctgctactgctgctgataacagcaatacagaaatttccactaatgctgcaatggataatgacatacagactccacaaacgaagctcaccatccactcaaacgcacaagcagagtcatcaaacctcctgcctacctacgagactatgaatggcattctgtcatacaagacaaacattccacacctcatactcttcacaaatttatatcttatgataaactttctgactctcataaagctttcatctctgttatcacagctctatatgaaccaacaaattataaccaaacttctcaactcaagatctggaatcaagcaatgaacactgaattatttgctcttctcaaaaataaaacttggacctatgtcaaactttctccaaataagaaagcaatcggttgccgttgggtatacaagatcaaactcaatagtgatggctccattgaacgacataaggctcggctcgttgcacaagga

SEQ ID NO: 145069 - DNA, 558 bp, Cannabis sativa
tttttttataatatagataaagaggcaaacacaaattcaagaagtgagctggttgcctcccccaccgaatatcatcaaaattaatactgatggcgcagcaagaggcagctccaaagaagcaagttgtggtggtgtttttcgagattcaaatggtgcaattttgggagctttcagttcttttcttggaaacaaaactccactcgaagcagaactatatggagttatgaatgccatacatattgcatttgtaaaccaatggcattgtgtatggttggaagtcgactcaattctcactgtgtcgatgataatgaataagcaaattgatgttccaagcacaataaaggaagagtggttgctgactttacaacgaattcaagatatgaatgtcatgatttcacatatattatatcggggggaagaaggaaatgaagttgctgatcaactagctaattatggttttttcactaggaataactttagttggttttcacaacctcctgattttataatgaaggaagctataagagacctcaatggtccaccaagattaagaataaa

SEQ ID NO: 145070 - DNA, 596 bp, Cannabis sativa
accaaactcctactacggattctaaaaacacttagagacaaaaaggagatgtactttttccctcctttgactcttctttttccctataaatccttggaactgtaatggaaaaaaggactaatgcactcacacactaaagtgagctcttatactgtaacttgaatattctctgatcaagagaacattcccaccataaataaaagtgatttgtggactacagtttattaatattagaaccatgtaaaaattcttcttccatatttttccaaatcattattacttatactaaattaatagttaccaaaaatctaggtcaagatgtattatattacaatagaattataatatctcgattttcttccattgtaataaaatatctaacagtaataattaatacattatctaaatatattatttttttattgtttaatacaatacaattcttatacgacctaccaaataagtccttcaaaatttgagctgaaaacttaacatgtctagaagttgatagagccacagaggttcactggccttaaagcacccgaagatgaatgttcttaattttacttgagagagaaagcattggtttggatttt

SEQ ID NO: 145071 - DNA, 979 bp, Cannabis sativa
gttgaattatggaaggtttcaactcaaaatgtttagtatttgtctcaggaaagataatgcatgatggaggattagcaaaaatgggagaaaatgataaatgagaattttttttttcttctacatttatttaatttggttccatgatgtcagaattttcaatttttttcaacccgcgacaattttctttttaccaaatgatttttagaattttgttcccagcaaatcatacaccaagtatcataaaattaaaataataacaaaaattaggagacactgctaccatatacgtgcgtaaataaagaccgaatttaaaatatagtaaaaaataaataatatgtatatatttaacaaaatattaatattaattataattaataatatatgaattttattatatataattataataataatattctatacttaaataatagatgtaatactatattaatattatacataaataataatataataaattaaatatatatatattaatttacgttaaacaacgttgtcaataataataataacaataataataataataataatatataactttatatataatagtttgtttcactactaaacgaagtataatatgtataatataataactagtagaaaaattataccaatttggattaaagtagttttcttcttgtagttttctggcaatggtgccaaaaagtttttggtaccaaaagtgatacattttacattcatcaactcgcaagttcacaactctttattgtagtgtagagattgtgaagaacgagatcgaacccataaaaattgcgtgagatcgaaaaaaaaatacttatttaatctaggctattaaaactctaacctagttctaaaaatagtgaggttttgggtagcaaaataaaataaagtattttaacggtaaaaatggcaataacaaatattttcagtgatatttagggatattatcaagggttcagaatccacttaa

SEQ ID NO: 145072 - DNA, 769 bp, Cannabis sativa
ggctcacgggtgctctactgtgcaggaaagggtaaatctattgctgatcagccatgagtgcgagtgctgggaaatgtatgtacatgttcaggccacactagaccaagcgagttggggtctactagtgatgaacttttgtaactctattttaccgcttaggtcggctagtggaaagacttgtaatattatataaaatatattttgagatcttgaaatacgtaacatttgactataaagttaaaattattacaagtcttattttcattctattttcgtttaaagtttaaatttctttcacttttctgcttagtaatcccgtttaggggattagggtttcttaatcaccttgggtagcgtgcctaattgttagggtgttacagtttggtatcagagtgccaaagtttttaaacttcctgtagaccggtcgaacatgtacaatcatcgttagagacaagctcaactcatggtgcagtaagtgttgagagtaaatgctttattgcttatacgattatttatttaccgcttttcattttaggcattatgtgagcatttagagtatttatgtgatatatgatgccatgcttaaaattctatatgttaagtgtttatttatatggaataaatagttgagttagggtttaaggcaataagtgcgtaaatgtggtattggtgcttatcttgttgtggttgttgattacaggggtacttgtaaaaatggaccctccgcaatcatctagaccacatggcaagcaagtagagcctggtgtag

SEQ ID NO: 145073 - DNA, 505 bp, Cannabis sativa
  modified_base (436)..(440): a, c, t, g, unknown or other
caacgatcttttatatcttttgaactctagattatattcataacaccaataatctctataacacttaggggtggaagaagctattgatatatgcagttcaaacattttttctttgaacttgagattatacttaatacaccacagtatctctatgacacatattttgactagacatggatatagtataatgaacaaattagcaaattaatttgaacttattcttgatcctatattttgttccaattaacttgttattgtagtaatagaaattgataccaatgaagttcttggacatagtatcacaataccttatctgagtgggagaattttaaaattccaagcccatctttatttggatgatactagtgatagattactatgttatgatcatgataggcactttaaataaattgagaaagtaaatctaaccattcannnnnatagaaataacttatcagaattatgaggataagataggagaattttgcaaagtctattcgaatga

SEQ ID NO: 145074 - DNA, 1204 bp, Cannabis sativa
cttatattgataactaattagattataaagagttttatttagggcataaaacccaacaatccattggtcaactttgacgaacagattgaacataaaaaaatacaactgaactagaacctaaccatctcatgattgagattattcgatctaagataaactaagtgatattaaattgaaaagatactatggtaagtttattatatctgatccaagttcaatatttgtcccttctgatgcatactccatacatctaacccaagctcacttaaaccaatgcccttgaaaggacatatgttaacgctaatttttgttaaccaaaatgtgagcctcacagtgataatttcacacagaaaaaatgaaagtagtaaagtaagaggtatgaacacaaaggattttttacgtggttttgtattaaaattttgcatagtccacaagtcaatcttattagatttctgatagttttttaggacttgttttgtatgatttttccgtccctcttttgatcttacttgccactatttataattacataataggtagttaattacaaagttgattgtaatctttacaactttttcccccggaaatcttgtggtttgattacatatcacgtagtataaatgcggtcattatttgaaaatcacacagctgtaattttcctacttttactgggttaaaataattgtgtatttaaacacgtctttaattgtggtgttctgagatgcctcgataggagcttggttccagtgatcttgatagcaagctggagcccttttccctaactctctgaggtcgataatgtatgccttgttgcttctttatttgaacgcttaacgcttcattgtgacaatcgcaatttttatcaacacagagtttctcgagactcatttgaatgttagcttctgacttgtgaagattgtaagtctcactgagaagatgcctggagttaactaggggaagttacaagaatgggccttcctatagcgagataagcacctcgcttattatgtctcgagtccactcgactgttgtacttagtttgtgtattttacactaagtgttatcacagtcgatatgcgtcactttcgtcttcccagatgtaacggacttgatgccttgctgtatgaattcaatgacatatggtttttcgttaatatactaagcaacagtttgtatatttttttctcgcataagaccttacagt

SEQ ID NO: 145075 - DNA, 527 bp, Cannabis sativa
gtgtttgagcataatcttttgtaagatgtctaactttttagtttatttataaaatcactttcattcaaaaaaaaaaaaaagttaaaaataatttttttgaaaaatatatatattattgattttgaaaatattacattttatttttaaataagagttcaaattcttattttttcatatggcctactaatgttcaaaactagcataacgtgcgcttaaaatagattgtttaacagttgtgtttatttttactaaaaagtattcttttttcaataattttttatcataacttaaaaatttaacgagtttgttgtttagatttatatttattagacgagtaatatagctacatacacatgtttttagttataactggcttaaggtatctagggcccacttagtttagggacttaaaaaaattctctttaaaaaagaataatctacacaaactattttttttataatacttttagataattttgcgttcaaatatatatttctttttacatttttacgacgtcttatataaa

SEQ ID NO: 145076 - DNA, 505 bp, Cannabis sativa
aagtgctcctcttggtcggccaagcccctatggaggccagtctggcttgccatggtgcatcaccaaggttggcgagccatagggccagccaagggtggtcggccagctcttgagatggagttggtctgtcacttgatgcccatttgagtgtcgggatctctatttgacaggtggtgatttagccttcttattggtgagatatactacaacgtggcactgatgttgtccacataagcatgcgacatcatgaggaaaaaaattgggatgaaatttgccccccaagtccttgtgcggacatctgcacatataagtactttactagctatgttgatgttatagggactggtgtaggctttgctaaataaaagttgatgtgattttaaaaactttatcttggctatctaatctcattacagtagagaaataactacattaattgcctttatgatgtgtagatgaggtaagtgaagaaaaggggcccacatgtactacataagtgactttt

SEQ ID NO: 145077 - DNA, 715 bp, Cannabis sativa
ctgtttttttccctttattttatcaatttttctattgaaattataatgtatgcattattttattataaatacactttttttcttttatatagtgaattaatgtatatgtcatttgcagttaacatcgaagttattattgcttacatttgtgtcaattaattaatctttaatatattattttaatctttatttgtttaatatgtaacaagatatttattttaaattacttaatcaaagtatgttttgtatattgttacatgagttagctagcgatcattttattacttttattattaattacaattttaagttagttatcaagttatttgacttatagaattattgatgttattggagttataataattatttaaatgatggactgaatactcgtggatctactacagacactaattgcaattaacaagataagttcttttcacattttcttttttgtttggaaaatttgaattaatatgcttacatcatcttaaaatttttctcctaaacttatacttaacataattagttatatatgacacttttattgttttccccataataccctccccaattacatctacccactccaaccctctcatcccatcaatttcacaccttccccacccgaatccctatcttccaccaccaccaattttttttttcttctcttcactcattaatacactagaagctacaaccttccacactacaa

SEQ ID NO: 145078 - DNA, 538 bp, Cannabis sativa
caaccctcgcatcatagtcataagaaagctccactcaacccgatcatatgctttggacatgtctaactttaatgccattttcttcccgttaccaaatcttctcgtcttcatacaatggaggctttcatagccgataatagcattgtcttgaattaaccttccacctacaaacgcgctttgtacttcggagatggcttgatgaagactatgtttcatatgtcctgctagacacttcgccactatcttatagaccacattgcataaactaatgggtcgaaattctgacatctgggtaggctttggaagttttggtataagacatataagggtgtcatttatatcttcaacactctttccctcattgagtattcccaaacacacagtagtgacctcttctccaatgatcggccaaaattttctataaaatagacccgacattccatcattgcccggggcttttgtgaggatgaatagctctcatagcctgtaacacatcgtcctttgtaaaaggagcagtaaggtactcattggtttcccg

SEQ ID NO: 145079 - DNA, 634 bp, Cannabis sativa
ccgccaccccctttctcccccattcctcatccatttcagcctattttttttaaaaatcttccattttcgatacttaataccatacacccaaaaagttttcatttttcaccctctttaagtatcatccgaacccagctagaaatttgtgggtttaaaatccggccacaattttttgttgagaaaacattgaatcttaacatcctttaaggtataaatatagtttctattaatttttataatgtacattgttttatttatggtttttgtaaattattttttgggttattttgatattagtaatattgttgtgttgtatgtgcatagtgcccagattttttgcgggattgttcgtcggattgcagttataaggtaaaaatttaaacctcaatatatagtatatatatgttttttttttgtattttattgaatatgtgtgtatatattgtatgtatatatggtgtgtatattttttatgtaaatacaatttgtaattgtattgtatatattctatgtaatatatatatatatattgtcaatgagaatgagagtggaggtatttaattagtttagaaataaaaattttaaaattgaattattgtgggatataattgattatatatatatatgtatgtat

SEQ ID NO: 145080 - DNA, 566 bp, Cannabis sativa
ggacaagcaccttattttttaatagtaaatattgctatgccaatttttttttattattgaaacatgcgttaccatttcattaatattactattactatcgtcatttttttttttgcaacacctacatagcatcgataaggatgttctctatttttggtccctcttgttctctttgtgaggcgttgaaaaatgattgttaagggtcgacttgggtattgggtggctatggagtttcagtcgacaaggacaaaatggtggcgaggtgcttcaggcatgatagtagggcattggttgggttccatcgtttggttttagtgccaagtcgatctcatgagagtgttatgactcaagattgtggctcaaggtgctttgtggattcagatccgaatccatgggtaaaaatgtgtttagtttatttttatttactatagcttcgactgttttgtttgtgtagttttgtttagtaacacgaaacagagaaaagattgtttattgaattagaaaggttttcaggtgattacaagtgtggcagaacacaattatatatagtgttaagaaccgacata

SEQ ID NO: 145081 - DNA, 563 bp, Cannabis sativa
ttgaagtataactactatttcttgccttgttcatagtatgagttacattatttattaattataattattcataaggaaaagtgcatcacatatggtcgatggagtggatggaaagctttggattagagatcacgaatgacacatttataatatacatagattcacttaaagcccaaattttcttattaatttatctatgtatttacacattattttgtttataattttataacttcactgttattgtttttaatgtattttactaacaattaattttattttaaattttacaaaatatattacctaaaatatactaaattaatgggacgtaacataaaatattattaaaataaaactaaatataaatgccttgacacgtaacactcatttaaccgttaatttatattgatttatagcttaattatattttttattatgtatatttattgtctaatatgaaaacaggtgaataaatgactacaatatatacaacaattaaggatattattccaactacagaaagttggaagattaaaataagtgttagaaaaatctggaaagtg

SEQ ID NO: 145082 - DNA, 626 bp, Cannabis sativa
  modified_base (350)..(355): a, c, t, g, unknown or other
  modified_base (571)..(589): a, c, t, g, unknown or other
gatcaacctccacttgctcgctttgttctcaaagtctccaattcagctggtgttcgcagaccttacatctctcctggtttgtctctttgttgatttctaaagtacattacttttgtgattacatgtttgactttttgtggtatctgatttgatgaaagagggaaaagggtgttcttattttttggaattaagttattgtaattcaagtttcttgttttcattatctgatcaaacagtgtttaatctttataatgtattagtttggaagttagtgtaacgcccgtatttaaacatttttaaactcaaaaaaaataacttgattatattataactttatacttatatgggtnnnnnncccgagtatcaaaatacaatttaaaaagtattttactaatatgtacatataatattttcttttataaactcgcgatcatgcaactttaaaatacatactcaaaataataaaagaccgaaaccctccaggttgcactgccgcgatatatacaatcactgccgagctccgtctcactgtttctccagctttgcttttcccttacctacacaaggtagnnnnnnnnnnnnnnnnnnnactcagtaagatatgcaaaacatatatataagtaatg

SEQ ID NO: 145083 - DNA, 829 bp, Cannabis sativa
aataagtgataaaaatacttctgtctctttattgatatttaaatgatagagattacattgaaatagagttttgttcagggcataaaacccaacaataatcccttttttgaaaaatgtgtcctttgattttggcagttgtacggtttcgagggtcattatgaaccgtctttatatcttccgcctcactctcaaccgttagatttgccaaccttcagccttcttgttaatggactttgagtataaaatggtggcttgagcttgccatttttttttttgtgagtttcatcttgagattggagtgtcatctcttgctaagatgtcccatctaagtttagaaacttaaccctccaaattcataacaccaggatgcactaaccacttttcttctctatacgttcccaagaacatcaaacctcaatttgaattggaaatgaagtattctaaggctaaggagcttctgatcaatccaaaccaaggaaacgccattgatcgttacgggtgatcttcgcaagtgattttttagggtaaatattatctcttgtgaatggtggtttgaactggattatacatattaatattttttttgttgctccaatgatcttttatctctgtctccacaggattagattttgagagcgatcttagaggtcctccttaggctgacaaggaatcgtggaacaaggaagtcctagttggcgtggtcttggattctaccaaagaacccaaccaccccaagacccaagcttgcacaagaagacctttgtgccaacctctctctggtattgagaaatttcctgaggctgggaatgaggtcttggctgcaggaaat

SEQ ID NO: 145084 - DNA, 563 bp, Cannabis sativa
aaaaaaggagaaaaagtgaaaaaatacaatgaaagatttatagcatgtcacctcaactttgtttgggctcttttttatatatatacaagattaagttcatcaattgttcacatcgaaaataaataatactaactttaggacaaattaaactaaaaaatagtgatctatataatataaaagtatataatctatacaatgagttctaaaccaattgattttttttttgaaaatagctctcatattactaaaagtataaaaaataaataaaaaatgagaaaacaaagaaaataaaagaaaactcatataagatatcacattattctctttgtgtttctatatatatatttatttatatatatgtatatatattgatattgatacattgatatgaaattaaaaaaatagaaagaaaaaatatagaaatattttttattttcctttattaaggtaaaaaaagaaaaatactaatttttatctctgatttgaccatttaaataacttaaactaaacttaaaaaaaataataaaaaatactaaaataaaaaaaatcaatttgtataaata

SEQ ID NO: 145085 - DNA, 757 bp, Cannabis sativa
ttgggagaaataaaaatataggaataagaatgagaattgaaataggaaaatttaaaatgcataaaaaaaaattgataaaaaaattattaaattttttcaaattttgaattggaatgagctttcctgtccatttcaaaatggaatagtcattccaccaaaatgatagaaatgtcattccatcggaatggtattccaatagttttaaatgcaaccaaacaaataaatagaatgaaaattgttttttttttctattccattccatttcattacctcaaaccaaacgccacctaagagtgttcatttgatccgatttgtataatttagcttattgtgcattcgatctgcatcaagtgtgaattttatgttttagatccaatctaatcctcatatcaattcaaatcaaatcaaattcaattcacaaaagtgcagattagatcagttattttagaataattactttttaatatataatttttaattttttcaaaaaatatatattttttttcacataattaataacaataaaaattaaattattattgttttatgtctccaataacaaattaaaataaataaaataaaaattaaaaaaaattaaagcaaaaaaaaattataagtataaagaaatgttaaattttgttttatattatatttttcttgtaaataaaaaataaaatatacatttaatctctatattttgaaatatatttatatcatatgtattggatttttcaattattattttttatattaaaat

SEQ ID NO: 145086 - DNA, 698 bp, Cannabis sativa
cagattaccttctcttctcatcatttgatttaaaatattattttaagaaaaaagtactaaaaataactatataaagagggatagaaatataatgaagaatagagagtatcacatgagaatgaggaaggaaaagttacaatagccttttcatcacttttcatgaatttatcattaaaaaattacttttttacatcaaataattcatgctaatgagtaaatcatgaataatgtgaagacatcgataacggtaaagttgtcgacataaagaaaaaaggtttgtaatttgtatgtctccaaattatggagaaatattgaaaatcgaagtcttgatgctatttattgatgttactgtcaaggtgccatgcatacataaaaaattaatagttacttaaacttaaagcaaataaaagaaaaaagagaaataaataaataaatgggattagagatagatggagaatcttcattaaaaaataaaagacaaaaaataaaaagaaaaaagaaaaagaagaaatagtataagagaaaaatgtatataaaacaacaatctttattagaagaaaacaaaaagaaaaaaaaaaaagaacgtgagatatataaatatgaaggaggttctaatggttacatttttattgtaaccacatagttacattttttttagccattggatcactattaaatggttgtgattaatttggaaa

SEQ ID NO: 145087 - DNA, 1242 bp, Cannabis sativa
ggttcgggttttgctttaggtccttgtccttgtcctagtcctagtttggttctagttccatttgcgattctgagttcgactttgggtttagtttcgggtcagagttcgagtcctggtgtgagtttgggttcaggtccagatttcagtctaggtccagatcaggctacggatgtgggttcgcgtgctgggtctttgtctattttgggtcggagtcccaagttccaatcccgatctgagtttgttttcagttctatgtacaagtccttggttctgatcctagtctgggttcgagtttggatcgaggtctgggtgtagctttgggtcagattctaggtttgattgtttgagttcgggtccgagtctgtgtccgggtttgcgtccaggtctggaccccgatctggatctaggttcgggtctagctcaaagtttggttcccgagtgagtgcgggtccaagttttggtctgggtcaggatcgcggtccagatctaggtccagcattttgatcccagtcagggtcttggtttgagtccaggttcgaatccggatccctatctaggtccaagtctgtgtttgggataaggtcctagatttaggtccaggtccaggtctcatttttggtctgggtacacgaccgtgtccgggcccgagttccagtcttagtttgggtctaaggctaggtctgtgttcggttctaggtctaggtccgagtcctggtcatagtcctagtcttgttctagggtcttggttcgacgattcttgttcaggttataattttgggtcccaggtctaggtctgggttcgggtttggttcttcgtatgggttctggtcctagtctgagtcctagatctagacaccgactactagtctggaacaggccccgttacacaaatcccgagtcaagatctgtatcactatcacgggtatcggtctggttttggttcaggtcccaggtcccaattatgagtttgggttcgggatcgagactagggtgcggttctaggtcccgacctttgttttgtgtccctaatctggttctatatttgggtctgagttgaggttcaggttcgggtcccgagtccaggtttggattggaatccgggtcaggctcccaattcaggtctaggtctgatgttgagtccgggtcctggtctggttacggttcaggatctagctccaattttagttatgattctaagtccatgtcctagttccagtcccggtcaacttccagttttggttc

SEQ ID NO: 145088 - DNA, 847 bp, Cannabis sativa
  modified_base (64)..(68): a, c, t, g, unknown or other
tgagattatctaaacctatggctagtggtatacatggtagtttacttactctagtgcaagcaannnnntttagtaagatgctggagcatttttcaaatagctgattctataggaagtcttttgattcgtagatatagagtttgtttatctaaggaacagttttaactattccagaaaagataaaagttatggaaagaattccttaaggatcaacagtgagaggtctcatgtatgttttgtaatgcattagaccagaaacctagtcttgagtgggagtaatgagtaggtatcagattaatccaggaaaggaatattagaagataatcaaataaatcttaagatcaaaaagagaaactatatgttagtcaataagggtggtattttaatactcttagactacaccaaagtaggtttctagacgtgcgttgatattagaaagtctactgatgagatggtgattactctgcgggtggagcaaagatttttggagaagtgtgaaaacttatctgaagtctctaactctaccagtgagactaaatgtcaaagttgcaggaatgatacttattcagtctatggaaagttctataaagtttttggcattgtaccaataacgaattaactactagtgttatttcctaactaacacagaattagttgccaaaaagtaaagaatccagtatttctagaggagtaaacatatagagaggaattttacaatattaaggattttattattaaggagatgtaatggtggaaaaaaagttatactaaatacaacatgtcagatcctattacaaagacaatactacatactacacttgatctagatatcaaggtgttgagatta

SEQ ID NO: 145089 - DNA, 1062 bp, Cannabis sativa
  modified_base (324)..(350): a, c, t, g, unknown or other
tccattttggttcctttcttctatggccaggataacttcctcttgcttctgctgcgctgtccgggcatacctctcccaagctttgcctgaatctccatcaatatgcggacctcctacgatgacttgcagatgtccatctaccggtggaggtagtaaatcttgtttattgtcgttccttttgaccctcggtccttgacatacttgtgcaggtgtggattgcttttccttattaggaattcaatttcccacttcaagttattgcattcatttgtgtcgtggtcgtagtctttgtggaatggacaaaactttgtcatgtctctcttnnnnnnnnnnnnnnnnnnnnnnnnnnncttcttatatggggccagcgactgagtagccgtgtaaacactttctatgtcttcagttaagatagtgaatgtagtgtactttgcttgattctcccgtggagcttgctcgaatttgctggagaactttcccttcttcccattcccttgcctgttgttgttggaacgtttacctattgagttcgaattatttgggtaatgggggagttgagcggacgttccagtcggaggagctttcgacttgccaggattttgttttgctcacctttcgctcgttgagtggcttctttgagcttgatgaagccttcaacacggtcaagaaattaactcattgagtctaccgggccgttcttccttatgtccttccaaatttcatcgaggacttcaataccccacagtatcgcggaaatttttccatcattagttacccgtgacactttggtctcctccgtcatgaatctgctgatgtatgctcgtagaggtttgcctagtctttgcttgacttcgacaaggtctcccagatgcaacagaagttggtgagaggaggagaattatgcatggaattctgaagagaaggctttccatgaattgaactttccgggggccaacttgaattaccattgttgggcggcttctaaaagggtagcaggaaagattctgcaagacacgtcccctcgtgtcccttgcaaagccatttgcatctcgaaatacttga

SEQ ID NO: 145090 - DNA, 1420 bp, Cannabis sativa
tgaatggctctacaatcgacgatgcaacgaacattgtggtgatctttctgaatgcttgaggtcgagaaacaaatttgacgaaactcgcaagaagaatgttaaagatagagttagcatgcaaagcttcgaaaaatctgggtttggtttttgcagaaaagctcaaaattttttgagagtttttgaaatggcaaagataatgaaaaggtggttccttgtttcgttttataccattaggttgatctccatcagattaaggagataattgatccaacgggtaaaatttaaaaggaagtggaaaagatggtcattaaatgctgatatgcctcgaaaccacaaaaccgccaaaatcaaaagacatgcattttttaaaaatggattatgacaaaaataccctcagtaatcatttaaaaatcacttttcactgaaaaaagacttattaaggggcaattgttatacttgaaattcggctggcacttcagaagatgacacatgtcaaccttggggaatacgaatcaacgaataaaatggaaattatgttaaaagatattaaatggaatctcataaaatgcatagttaatagagcatatctataactcactgactgtatagtcttaggtgagtcaaagatatagaaattattgatttgcgtttgacgagaaaccatttcacgtcagaagatacaatcataaggatgacatcgataatgcatagcgaggcgtcaacctcgctacgtataaataggtgttgacgagatgtgttgacaattagaacacttagcattatattaactaagtataacagctggaagaacctaagtgacggataaccaggcatccatcttgctataggaaggcatactcatggtaccttcactaataagctctagacatctttcaaggagatccactgctccgtcaagtcaactctcttagaaagaagttgacattcaaatgatgttggttgttgaagttcaccttgtcaccaagaactgcaattgtcagatggagtgttaagtcttcacacgtagaaatgacaggatttacattatcaacctcgaaaagacattggaaaagcttcagctcactgctaggattattgttgctattcaagttcccaacgagatgccccagcgagatacccttagcagcgtatctaaatctacgtcaacattgacccattaaaagaagataaatcacagttgtatgattttcaaataataaccacatttatttacgtggtgtgtaattaaggcccacgatttcaagaaaatattattgtgggattcgtatctaattgtaattaattgccatcctatgtcattataaataggagcagaatgtacataaaaacggacataaaatccttgagagaaaagaatcctattttgtatctgaataatctgaataagattaactcgtgg

SEQ ID NO: 145091 - DNA, 573 bp, Cannabis sativa
gtatacgccgttatagagtttgggggtgccctactcatcatgtcttaagaaagaaagatggaaaactagaaaagcgaactaaagtttacatgtttgttggaaattataaggagactaggcgtggactacaatagtcgcaaggatgataaagtgttcatttctacaagcgccactttccttgaagatgactatattaagaatttcaagctgcaaagcaaagtagtattggaggaaatagtttcagatataactctaaacaatgttccatcttcttctactcaattagaggataatcccattcccttggttgaacaaatgcaagttgatacaactgcgcaatctaccactaatgttcttattcagaaggtcacgactcctcgtcgtagtgggagggtttccactaaaccaactggttatggcttggatggtgaaatcaatatggtcgttggtgacagtattgatggcttacaaagtacttctcagcaccttgtgttgttcttggaatggaaaaatcactggttttactttgtgacaacactggtgcaataaccaacagtaaagagcctcaaagcc

SEQ ID NO: 145092 - DNA, 922 bp, Cannabis sativa
ttggcaattttccaattcaaccaatggcacacatacctagtgggatcataggcatccttactcctaggtacataataactagcttcagtattggtttcctcattcccagtttctggattttgatcatcatcacgttggcttcttcttgaacgtgttgaccatgttgaacgtgttgttcgtgaattgggtggcctccgtgagcccataggcttttttccaaaacaacgattggtctcttcaagacgactcatgttgttttccccattatcacccatggagaataaaaattctttcttctttggttaggagggactttttagagcttttatgacgtaggctctcaatgaaagcaccaaactattaacgtaaatttttgttaacgattatgagtctattttcgtaatagatttggcacataaattataagagatctaagaaaaataatagaaacagaattaacaccaggtttttacgtgattttgcagttaactctgcatagtccacgagtctatcttattcggatatttctagatacagtatttgggttttacaatcagtatactccctttcctctctagggtttttcccgtccctttttctgtattatctgtccctatttatagtaatataggttggcagttaattacattcaaattctaatcccataacaatattccctgaaattgtaggctttaattacgctccacgtaaataaatgcagttaatatttgataattacacagttgtgacttaaaccgtctttaaggaggtcaatgctgacgtggattaggacatgttgccaaatgttcttgctgaggcgtctcacctagtacatgaacaacttggtttattcataagtcttccagcaatggcatgagtaccagtgtacagagcaaacttaagaattgctctttgaccataa

SEQ ID NO: 145093 - DNA, 602 bp, Cannabis sativa
gataatgaaccctgatattcttcccaaagaatattggaagagagagaaacaatactttcatgctgcaaatggaggtattttttttgcacagaactcatcagcaagccgattcggttgcagttcttcccagggtgttctgttactcacagagtcattggatcaaaattacctagaaaagattaattgttggatttgatctttacacaaagaagaagggtttgcgtattctccctagtggacttggttacaaacaacattttgctccatgggaagcaataccaaactatttcttaatgccccatgacccatttcattagataaagaaagagctcatcgaagtctcatgtgccaataatcatacagagttcctgaagaaatgtgaccatcctctttggaaaaatcaacagttcttcataaaccttcattttaagcttaatgaagatatacaccctacaaaggctagtcacccaggcatgaatccaaaacaccaacaaatggcgtccaacgagtgcaaagagctagagcaacagggtttaatagagtcaacttcctctccatagacatgtcatgcattttatgtcaataatcgatcagagcaagct

SEQ ID NO: 145094 - DNA, 777 bp, Cannabis sativa
ggatgggtggatcattttttttgttcatatattgtcgtggaatgtttgtttgtgttatttataggttttgaaaattttaagtttacgttttgaagctgttatgctgccaaaattttggtagatagttagataatgtaaaattaattaatggtttaaatgaaataaaattaatttattattaagaataaaataataaattaattgttgataaaaaaaataatatataagataaaacataaattttaaatatataattaaaaattttgtaaaataatattatatttttttaaaaaaaataattttaatttaaataatgaatgattaaaaataattaaattataacgtgtaacatatatggtgagtacgagatgtcaaagagtttacgtgactggcagtctgattgtaagaaaaaatagatagaaaatattgaggagcttggacaagagaaggcagacatattaccgcctgacgaagtaacttagaaggtgtggagtgattgcattgcttactggagcacagacaaacaaaaggtacttaataaaatttttaattttagtaatgttttatattatatagtcaataataaataattaattgtaagaaaaaaaattattaattttagttaagaccagcaaaaaataaagaaagttgggggtgagatgaaacttcaaggaggcttgaaatcaaagcctgctgtatcacatgttgtcgctggggtaagtttatataatacattatcattgataagtttttttttgtaaaaatacaataataata

SEQ ID NO: 145095 - DNA, 724 bp, Cannabis sativa
agaaccggtcgaccggttgccctgtagggcaaatttctgggttttcttcaggttcattttttggcccgtggagttgcgtatcatctgttttagtttgtttatgggatgcttggcctattttgaagttgttgtgagttaacttatgcttggttttgagttagggtttatttttgaattttggattaaggtatccattgagtttcagttgtcgtgacataggaccagggattgcctagcttgtttttccacgcaagtcggcttgtacacttgagttctgaactaaggtcagaaaagtggtaagcacagtctgttgctaaatattaatggttgaatgggtatggccttaattattatcaagactctgattagatgtttgttgagcctaggttatgacctagggttgggaacggttattaccgttacgagtaattactcttgaaactacagataggtttcttacttatcgtttgcttcatcgggcaacggtagtgacatatagctcgtggttgacgagtggtaaaggggtactttataaagtacaagagttgtatttgcaatattatgtaaatgtgtatgcaagttaatttgagatttaattgctgaatattactggtcattattttattcacttttctttctgagtctctgtgactcacgggtgctttatggtgcaggtaagggaaagcaaaggttgagcagcatcgtagtagcaatgtacatatca

SEQ ID NO: 145096 - DNA, 593 bp, Cannabis sativa
taataaataagattctaacctttgaatcacctaaagcctctactacaccactgtaagagggacttttcttacacttccaagttgtcctccatcggcaaattctcggtactgaattgttaatgtgatctgtaagctctacatacttgtttgccactgttgggatacattcatacattaaaatctacacacacaaataaaagaaattattaataaggtatttcaatattcttgtactttacttagggaaatttacttactgctaatggaagaaggaagcctgaataggtgaacgtggacatcgtctgtgctttctcatgtactgatattgccttttcttttagtggctttcggagttgctttgacgtgtactcataagaatgagtcccccaagggaattggttgaatatttccaaatcataaaccaatcccaataattttggatcaatgttagcttgtttttttgtctccatgcattaagactccatagatgaacaagagtgaagccatctttaatatttcattgttaacttcattcttcttccgtgattttttcttttggttttggtcagactattttaatttgatctttaagt

SEQ ID NO: 145097 - DNA, 901 bp, Cannabis sativa
tgaataattatctagtagtcttttgtgccactttaacattaagtctcactagtagagtcagagactccagattggtttttacacttctccaaaaatcagtgctctacccctagattaatcaccatctcataagtagactttctagcattaacgcaagtctagaaatctgatttggtgtagtctacgagtactaaatgccacccttatcgactaacatatagttcctcttttgatcttaagatttatttgattgtcttacaatgtttctttcttggattaaactaatacctactcataactccccctcaacaacaagtgtctggtctaatgcatactagagcctacatgagacttctcactgttgatgcttaaggaattcttttcatgacttttatcttttttgaatagttaaaactattccttacataaataaaatatatgtctaggagccaaaagacttcatttagagctagtcattagaaaaatgctccagcatcttactaaagtaagttgcttgtactagagtaagtaaattaccaagtataccacaagtcataagtttagataatctctaaactatgatactaggatcatgaagttttgttaagtccattgaatagacttattatcaaaatttcccttcttgtccttgtaatagaaaacttttggttgctctatatgaatagtttaatcatagttctcttgactttgcttcttagttccttattaggactatccattgcttgtttaaactaacaatgaatttttatcataagtgtctttcaagtcatagtagggtgagttccttgaaaccctcccactacaaaagttaccgtgactttttttctaggaacactcataagttgtgtcaatacaacagaggcagtgggaccattttata

SEQ ID NO: 145098 - DNA, 655 bp, Cannabis sativa
gtttgtactcgctgtgtatttatacttagtcaatttatctacataaatattctaagtatagggggtatataacccactcactttgtactattgcttaatctatcaaagagttatgaattttttcgaggttttaaaatttttctaccttagtatttattacaccaagctgtaattaaaccacaatcgagatgataaataaaccaaaaacgcgagtacctgtgtactgcgaagatattatataataacataagtaaatatccccgaagggatatatgttgttcaaaaggaaaataaacataaatttgtctaagtacaaatcgcgagtacccttgtaccgcttaagaaagtttggaaaaagttatattaaagtataaagctaagcattgggagcagtaggggtagttggagtagtggcttcatctgcgactttactagcaacctcgtccacgacttcttcagtatccgcagcatcagcgtcctcaggaaacagatttcccccacctccttgggtctgcctgggtgacatagcttggaaagcctcagccatcacagccgcctccggcccaaggattgagaagtcgaagtctggaatcttggaaagggttgtgtaaatgtagtcagagaccgcctggtcatactgcttctttccattctc

SEQ ID NO: 145099 - DNA, 592 bp, Cannabis sativa
acttcatttcaaaatgcaaggagttgttaaccacaacttgtttacttagaatttaagaagcctccacatgtcctcatgtcatttagaaagaagaatgaaagccttcaaaaccccagagtttgaaaggcttggggtaaatgttatatgtgtttctagagataagagacatgtaattctaagatggtttagctcaagctacaacaggccttattatgagttagtctcacattgctaatctgtggaaataaattgtaatatataagatgaatgggcttttcctctcgttgccaattattttttagatagaacctcattcatcttatcccaagttagtatcagagccacttgtgatctgttgtgagcccaaattgtcaccggtttaaaaagccgtttgtgatccattgtgagccaaagtgctgtcggtccaaatagatactttcgttatcttccctttaacctctatttgggaccttttggtcaatgtgttccagttttcaatgttagttctttgatctgtttcaaaatctacaaattttccaacgtgtacacccacaaatttcccgatatttggccttgtaggattcttttaaat

SEQ ID NO: 145100 - DNA, 502 bp, Cannabis sativa
ctctccccatctgggcttgggaccctataagcttcaccagttttttgatgatcagcttgttgatcatattcttaattttcccatatctggtcatggttgtagtgatgatctaatttggagtaggaattcttctggtcttttcacggttaagtctgtatatcatttagcagtcacctctagtgatattccttcttcttcatcttttgatcagagtaaacgtttctggtctaaaatttggtctttctcggttccttcaaaagttaaacacctggtgtggcatgtgttatctaattctgccccagttgcctcccttttatttcttagacacattataccttctcctatctgtcccctttgtcatttgaaatgggaaactgtggagcatgctttgctggagtgcgtgaatattaagaaagcttggaaacattctccatattttgacttttatcttaataataaaagattaagtatttatgactttattgttagacaatttatatgt

SEQ ID NO: 145101 - DNA, 846 bp, Cannabis sativa
  modified_base (471)..(477): a, c, t, g, unknown or other
ggctagagttggtgaaggattaggctgtgagatcctttatcaccctggtaaggccaacgtagttgctgatgccttgagtaggatgggtcagagtcagttaagtactgtaaaataaatatcctaatagttcgcaaatgagatgacccgagctaagattgagttggttgtggggaaattcgctaatattaccctgccatccatgcttttagagcgaatcaaagaagtacaaatacaagttaaggctgaacatcagcgaccgtcagggttactgcagccactgaacataccatagtggaaatgggaagacattgctatggatttcgtggtaggtatgcctagaaccacgggacagtttcactctatgtgggtcatagtcaacaggtttacaaagttagcgcacttattacctgttcggacaaatttctccattgactagtatactgagttgtatgttagagaaattgttcgtcnnnnnnntgtcccaaagtccattgttttggataaagatctgaagtttacatcgagattttgggagagtctacatcgagctatgggtacttagttaaagtttaacacaacatttcatccttagatgggttggaaatctgagaggactattcagattttagaagacatctgcgagcatgtgtgcttgattttgagggatcatgggtaaagtaccttcccctgatcgagttctcttataacaacaactatcaggcaacaatcgagatggacccttacgtgcttttatatggaaggaaatgcagatcacctatccattgggatgaagtaggtgaaagaaagttcttgagtcccgacgttgttcagagaacaagtgaggca

SEQ ID NO: 145102 - DNA, 662 bp, Cannabis sativa
aacttgattaaatttcctacatcaattggtagttgagtaattttcttacatttctccaacaatagtgtctccaaattatgcaagttacaaattgtattaggtatctcttcaatcttttgacaatctaacttcaaatatcttaaatacttcaattttcctattgaatcaggaagctttgtgatctgatcatcatacatggatagtactctcaagcctcggaatgacttatgcaagtcctccatttttaacaactttagacaagcatcaacccttgaatcttgttgccacaatatggtgcgcaagcacttagctttatataactcctcaaattttgtagggtcatcgactttcgcacattcttgcacgtacgaaaaatgacgaaccttgtgagaacatttactcaaattattcatcatataacaaaactcaccagaaacaaatattgccaaatcatgtataagatcatgcatgagaaatatggactccttcttattgttatttgatggttgaaaaaatgacattgagattagatctttgaagtacttctttccaatttcttcaattctgactcccttcttaggaagtaaaagaccttcggccatccacaataagatcatatcttcttcattgtattcataatctttaggaaatatagcacaata

SEQ ID NO: 145103 - DNA, 1169 bp, Cannabis sativa
  modified_base (476)..(503): a, c, t, g, unknown or other
  modified_base (550)..(553): a, c, t, g, unknown or other
aaatccattagatgtgatccaatgaacacataaataccaccattgtatataataatatagaaactaattaaatattatttaaaataaataatatatcgtacaatttaaatgtataaaaataataattaaatatatgtaacatgccaataaaattatatacctacattaaaatatttgtattatgtaaaaaaaaaggtaaataccattttggaccatgtcttttgcaaaagttacaaattgaaccctctattttgttaaatgataaaatggaccatatactttccaaaatcgtaagaatagaaccctgagcttaatttttgacaacttttttttaacataaccaacgggaagacaattcctaacacgaacgatacaaaaaaaaataaataaatagttttgtcataacacctttagatgagattattattaaattttattttgacaaaaaataagttcagggtcctatttgtaccatnnnnnnnnnnnnnnnnnnnnnnnnnnnntttaacaaaatagaaggtccaaatggtaacttttgcaaaacacaggnnnnaaaatagtatttatcctaaaaaattatataccactattatacatagtaaattaaaaaataaatttcatctaagaataattgttatcttgttttttgcaccttgacgtggcaatagaaatgaatgacacgtgtctgatattttcgatacttaggtagagaaaaatatccctaccagcctataaatgactaaccagcatctataacagtcatgcatctgagcagaattattaggaagatgtccgaccaggtatggacatgtctatgctgagcgaagtatgagagatggtgattcttgagatcaatctctttgtgaccagacactaagacaatccccataatcacgagattcagtcagagaatgacggcaacacattctagtttcctatttctcacattgtaattatagaattaatgtagtttcctattttattcattatatcaaaaagggaaaccatccctcatgtataagtccctataaatagtgacctagcctcactataaaggggatcaagagaattgctgcagaaatatactttagagagaaaagagtgatctaagagaaagagttacttagagatcaattgtaagagctttcaagaggaagaacactttgttc

SEQ ID NO: 145104 - DNA, 528 bp, Cannabis sativa
gattgaatgagtcttatataaatgtttgtttgtagatcttacttcaagatccccttccaaatgtcaacaaagcttatgcagctgtgattcaagaagagaagcaaagaggaataatcatacttctgactgaaaattctagcaactcaaatgagaatgcaagacaatttgttgggcaattttctagacatggacctggaaataggaacaacaacagcaacaaacttgtttgtacacaatgtggagtacctggtcatattgttgctaagtgctacaaaattcatggctatccaccaggttataggttacatggaaggttccctaaagaaattcctaacaagcttggaaatcaacaaaatcgatcttcagcaaacttttatgcaggaagtgattggccagaaagtagttttgatgatcatgatttggcttctcaatgtcaaaggctgatggctatgctaacacagaggtttcaatcccaatctcaagctcaggcttcctcatctcattcaagtaatcctcccacacaaactg

SEQ ID NO: 145105 - DNA, 670 bp, Cannabis sativa
gtattaatagaaaggaacattgttgtgagtgcagcctactcttttttattcccttaaaatttagagctttgctgtaaattatcacctccttaagtggagtcttgcaattgagccatattttatcatagttattaaattaaattatattaaatctcttacaaaagaaaacttatgatggaccgatactcagggacggacccactagtactaatgtgggggttataactctcactaataaaaatattatcttttaaaaagttaaatataaattttttaatttaataattatagactaaaataatagaaaaattcccacaaaattaactgttgaatgatgggagaagaaattttaaggcgccagtaacacgctcacaatggagacctaaagcattgaaacctatgaatgagaggtttgggaaagatttttccatttgtagttctgacaagggaaatgcgcctctgatgaacgaaaaggctcctgcaaatttgccctcttcttatccgagcctatatcgagaggttgatgttgatatttctctaaaccttattttgcaagtggacctagtgggctaggatgttcattggatcacatccaatatttttaggcctatccagatccgatccaatcatatattgcatgttagattttaccatctgatctgatctaatt

SEQ ID NO: 145106 - DNA, 547 bp, Cannabis sativa
aatgaagatgaaccttgtgtttaccaactcaaggataatcaagtggtagtattcctggtactttgtgttgatgatattttgatcattggtaaacatattaagaaactgactaacattaaggaatggcttaacactcaatttgaaatgaaagatttgggtaaagctagttatgttcttggtattcaaatcattagatagcgaaagaacagatcagttgctctctcacaagcagtttacattgataaggtgatagataaattcttcatgaactacaccaaaggggcagtcatgcattctagacctggtgtctgtctatctaaggaatagtgccccactgatcgccaagagatagaagatatgagaagggttccttatgcttcaacagttggaagtgtaatggatgagatgctatgcactagatcagacattcgctatgcagtaggaattgtgagcaagtatcagacaaacccaagagaggagccttgactacagtttagtatattctaaaatatttaaagagtacaaggcattatgtgttagtctacaa

SEQ ID NO: 145107 - DNA, 691 bp, Cannabis sativa
  modified_base (480)..(484): a, c, t, g, unknown or other
aaaataatttccaacacttatgaactcagaagggacagtctggcaaagaagagatgatccattctgaaaatttatctcactaaagagccagaggattatgaaaaatgacaagcttgagatatccttttatacacaaagttcagtgacaagaaagctatggattgagaaattcaatggttgggagaagggaagaatatgaagagacgattcataatgaccctcaaaaccatacaaaaaccagaattaaaggatgcgatttttccaagaagggatcttaacgaaaatgcactttgtaattattaaaaagctctttttactaaaaaaaactttttaaggggcaattgttatactcgaaatttggctggaggacatgtgtcaagataaagggaatgtgaatcgatgcaatttctttttatggaataactaattaattacataagtatcagagtatatttgtaacctgctgactgtaaggtcttnnnnnaggaatcaatgtacaaactgacacttagtacattagcgagaaatcatatgtcactgaatgcgaatagcgagacatcaaggacagaacacattggaaggcaaaagcgacatatatcaattgtgaaaacattagagtacaaactaagtgtaaaagtcagatcggctcaagaacaagtaagagaggtgaccgtctcgttatgggaagact

SEQ ID NO: 145108 - DNA, 545 bp, Cannabis sativa
  modified_base (169)..(170): a, c, t, g, unknown or other
aagaacatctccaattgtaacatcttttaaagatgttaaaaatctacacatcatttaaaaatataatattttattttatctctcttccatattatttttggcactcttacttctaaaaacactcaaatgtgtaacactctttaaaaatactataattatgatctcacannttattatttaatatatatcttaatttttagctacaatatttttttagacataattttttataaaaaaaataaatagcatcaatactacaacatagcatctatgtaaatttttaaaataacatttttttcttttcaatagtatagcaacttaatattttactatatactatatctacctcactacacatcctctaaatttttaccattaaaaatgttctaggtagaaatgagagataaaagctagtgtaggacttgaaagtgctggacacacaaatccacgggcatatatgaatatgtacaattataatacaagaatatggttaaattaattaaaatataagattgacgttaattgttttatcaaaaaaaaaaaaa

SEQ ID NO: 145109 - DNA, 527 bp, Cannabis sativa
ccaaatgacacacaaagtgatgaagatacttctgtttctttattgatatttaaaggataaagattacatttaaatggagttttatttagggcgtaaaacccaacattcaacccgtcgtgcatgtctcctattgagcatgtgtttccccttgaactgttgaaggggttcatgatctgtgtgaatcacaaattctttgggccataaatagtgttgccatgtttctaaagctcgcaccaaggcataaaactctttatcataggtggggtaattaagtgcaaccccacctagcttttcactaaagtatgcatggggtctcccttccttcataagaacagtgccaatacctacaccagaagcatcacattcaatttcaaatgtgttagaagaataaggtaaaccgagtactggggcatgagtagggaggttgtgtttaagcagttcaaatgcctcctcttgtgcttcaccccattcaaaagcaacattctttttgataacttctataagcggtgctgcgatggtgctgaaat

SEQ ID NO: 145110 - DNA, 536 bp, Cannabis sativa
tcatacaaatatatttcaaaacctaataaattaaatgtatattttattctaacttataagaaaaatataacctaaacgaaatttaacatttctttgtacgtacattcttttcgtattcctttgaattttttatttattgtttcatttttttttttaatttattcttgaagacataaaataacactaatttctttaattttattattaattatgtgaaaaaaaaattatttcataattgttatcgcaattttagcactctgacgtggcatcacaggttggtgacacgtggaatcgactccccataatttgcccgaaaaagatgttccgaacataacaccgaacatatctccacggacaaagtcttcttagccgaacagtggacaatccgaacagcatgccaacacatagcaacttcagcacttgcattgtgactcacaaaagcaatctctatagctctgggatcgtatcacagagatatggcaagctgtcaaaatccctcaatcagtgtattctatatttaatgtgtaatcttacca

SEQ ID NO: 145111 - DNA, 684 bp, Cannabis sativa
  modified_base (510)..(528): a, c, t, g, unknown or other
gatgctctcatccatggaatgctctcattccacaaaaaattggatgctctcatccatggaatgccctcattccacaaaaaattggatactctcatttatggaatgctctcattccaccacaaaaaaatggatgcagtcatccatctaaatttcgatgccaaaaccaaaaaaaaagtgtgtattcttacctcattaagtggtgccagtcagttgatataaaacttgcgatacgtgcccaaaaaaaatcaaaatatgagcgtgggtgggctaggcccgcgcttagggcccactcattttaggagcccaaattaaaaaaatttcttttaaaaaatatacatatttttttttaataatatttaaaaatactatttatctttatagtaagtgcctaatatttttttttttgcctatagtccatttcaactcagggttggccctgcatatatatatatatataaatatattacctgtttccagttatataattcaaagactaattagtaatttttnnnnnnnnnnnnnnnnnnntaccaaattatgccccctgaacttttttgtccgttaaaaatctccttaaactattgagactgttaaatttaagaaattttgtctaatttcgttcaattttactgtttcattgattgtttatatactaaaccatgctccccggactttgatatctac

SEQ ID NO: 145112 - DNA, 522 bp, Cannabis sativa
aataataataaatgcattgcttaataaaaattttattatgcatataggctgagaagacacctattggatttgaagatagccaatttttcaagaatatttaagaatttagcttggtggagttagtaattgttaaaggcacaaatttattgatatgttttggaatttaatttataattatgattatgtggagttagaatataacttttataaggaattttgttatttttaacaattgtgtagaatttgattatatatataaaaaatgttatataaatacatacgagcaaaacaaaagagagatgaaaatttcaaaattaaataacagtggggtgttataaattaaataacgctgccatgagggagttgctagactagacaactatattgagtaatatataaatattagcacaggatagtaaatgaaagaatataatatgtagttaatttaatatttagtactattattattattattgaataattgaatcaagagagagaatataacattaattgtaggataaa

SEQ ID NO: 145113 - DNA, 557 bp, Cannabis sativa
aattgagtactattatgtagtatgattgatactttagtacactaaatgaaagaaaatgcgatatcgaaagtagcaattgagatacattgctgggggaatcactcatttccacaatcacctagcataaatgaaattaattagtagttacataaaatgattaagagaaaaataccaatttcaaatcactcggtattgcaaaataccttttatttaaaccatgtactaaaattttgacaatgttcatcttgcacctatttatagttcctcgacttactaggataagtagtcttgatccaatcaaaatgtttccttcaagatgtagttatatattattcttattagtacactttcgatttgaattgaatattaaaaactaaattaaacttactcaatgtacggttgaacctcatcaacattttgcaaaacgagtcggtgtgcttcatctcgatcagctcgacttacgtcgcaaacagaaacaccacgaccctctttactaatttcatcatcaatctgaggaagacacgacccaacacttgctacatttgacaagaagtctg

SEQ ID NO: 145114 - DNA, 900 bp, Cannabis sativa
  modified_base (502)..(505): a, c, t, g, unknown or other
atgtataattaggaaattaatatcatagtaattataccataatatctaaacaccccttattaataatttttgtaaggtgcaattctataaaaatattttcttttcataattggtttccttaaatattttgttcgggccctacccttatttcaaaatatatacaagattttatcgaggatacataatcttctggatgtatgcataatttatataaattttctattatattatagataaataaaaatagcatataatatatatgaattcaataataaatatatgagaataggaatatatatatatacctatacattatataggtatctaaaaaagaaaaagaaaaaaaaaattcttgaaattactccaatcaaataaagtatatatctattccatataaaatgtgactatgtaacagaattttaggtgtaacaataatttttgggtttctacgttaactttgacagaatatcctattacttaacaaaatattctttattaattnnnnaatattattatatatatttaaaaataaaaattatatacatattttatataaaaaaaattaaatttaaatttgaaattaaaattaaaatattatgtagatattttatataatgaaatttaaatttaaaacattataaatatttttaattttattattatttatttttatattttaaattgaaatagttgtaataaggaattgattgttttttgttttagttatgaaaaactgattcacacaccatatttttcgtaaagtttgcatatagaaaaatctttatatcaaatttacgaatccaacatagacacatccaaatttggttatgtgagttttggttaagaatatagtaaattacaatatatgtattatcagatacattacttaattaaaaaaaa

SEQ ID NO: 145115 - DNA, 653 bp, Cannabis sativa
agaatataatttaatataatttgcttagtccttagtcccaaggtcccaagtatatccaagtatattaagtatattcttggatagaggttctactgtagtaatgtaatggaataataattgtactggtaattaattatattatttgatttgatgttagaatgaatattgtaattgaaaattattgtatttagtactgtgtgggaatataatagaataaaatgtatattgatcaaaatatttctattacttttatttttataattataaaatatttaaataaaagataaaatagacttttgaatttattttatatttttattataatattatatcaattatataataaattgtaattgtaatggttattacaatgattttttattataatgagaattaccttatacaatgtaacaacaaataaagtaatgaacatattaattatcattacaatcctcattcctataaaccaaacatacccccttcaatacttcaattcaatcgcattttatcttctctttctttcccattgtttattaatactagacaagagttacgtggctattagttttatataagttctagtagtttttgtttaagaattcagtaactaagcaacggcaacaacaatagtagatatatctatttaagttttt

SEQ ID NO: 145116 - DNA, 1410 bp, Cannabis sativa
gagaggaagatatcccaaaaattgcgtttcgtactcggtatggacattatgaatttctagtgatgtcttttggactcaccaatgcccctgcagcgttcatggacctcatgaatcgagtattaaaggattacctagatagatgtgtgatcgtgtttatcgatgagattttggtttattctgaatcaaaagaggaacataagttacatctcagattggtgttgcaacggttacgagaccataagctgtacgctaagtttagaaagtgtgagttctggttatctcgtgtctctttcttggggcatatagtgtctaaagatgggatcatagttggtccagccaagattggagctgttcaggattggccaacaccaaaatcgactactgaaaatagaagctttttgggtttagctgggtattatcgtcggttcgttgagggtttctcaaagattgttgtacccttaatggagctgacccgaaagaacttaaagtttgtttggactgatcggtgtgagaaaagttttctagagttgaagcagcgcttgattaccgctctagtgttaaatttcccgttagataaggaaaagtttattgtttattgtgatgcctcgagacagggtttgggctatgttcttatgcaagctagaaaggtaatagcttatgctttttggcagttaaaggagtacgagcagagataccctactcacgacctagaactcgcagcagtagtatttgcgctaaagatttggcggcattacttatatgccgagaaatgtgagatatacactgatcataaaagtctgaaatacttcttcactcagagagacttgaacatgagacaaagacgttggctagagttggtgaaagattatgattgtgagatcctttatcaccctggtaaggccaacattgttgctgatgccttgagtagaaaatgccaaagtcagataaatacagtgaaacagatctccgaacagttagcagatgaaatgacccgagctaaaattcagttattgtggggaaattgactaatattaccctgcaatttactcttttggagcaaatcagagaagcacaattgcaagatccagagttagtgaaatcttgagatatggttttggctgggaagattagtgactttatagtggatgatacgggaatgctacgatttatgtatcgtgtttgtgtgactatggatgatgatattaaaagagaaatcttgaatgagtctcatacgactccttactcagtttatccaggatcaacaaagatgtatcaagatctcaaggccatgtttaggtggcgaggcatgaagaatgatattgctgagtatgttgctaagtgcttaacttgtcaacaagtgaagctgaacatcaaaggcctgcagggttgctgcagccactgaatatccta

SEQ ID NO: 145117 - DNA, 636 bp, Cannabis sativa
  modified_base (583)..(588): a, c, t, g, unknown or other
tatatacaatttttcatatatacatagtagttaaattgaacaattggtttaaatttacatgggagaccatgttttaaagtttcttgcgcctttttttctacgtgtatctatattttatttattaaaaaataaatgaagtataaggttcaaactatgatcaaacttatgaccactagaataggaggatgctgctaaactatcatttcacttaaatttagctagttatttattattttggattatattaaatatataagtaagcctaccctaaaattcaattctaggtttatgcttctaaaaataaatattaagtttatgccgcttataaacataaaatttttagtatttataccgctattaacgctgcaagtatatgagtgatcattagagaaaatagttcaaagagaaaattattattttattattattaattttagtactacattatgatgtgattttttcatggataataatggatattatatcaaggtcaattaagccgtagaagtcactgtcttattagaagaaacaaaacgtcacagctgttataaaataatataaaataatataaaatagatgagannnnnnaagaagaagatgaagagagaaagagaaagtgaatgagaatttctgagt

SEQ ID NO: 145118 - DNA, 838 bp, Cannabis sativa
aatctttgtcgggctcctgggtccaggtcttagtaaccaatctcagtccgggtcttgggtttgggactaggttcaagtccgtgtctgagttcgcgtttgtgtcctgagtcgttatctgagttttgattcgggtccgcgtcccggtccagatctgggtctgggtcctagccagattttggttccttgacctgggactggggtacgtgtctgggtctggttcagggtcttggtctgagtccgggtctgggtttgagtttgggtatgggtcccagatccaaacactgactatgggttaggtccaagccccgggtccagatttgggtcacagtctcgggtccctatctagttccacttcaggtcccaggtctcggtccgggtcctaggtcagggtccgggactggggtcgagtcgtgggttccaatcctagttctcatgcccgtgtcctgggtctaagtcccccatccaagtccgagtcctaggtctcaatctgagtccaggacctagtcggggttcaagtcttgagtctaggtctaggttcgggttcgagtctcgagttttgagttccgatctgggtctgggttctgaggcccatgcctaagtccccaatccaggtccgtgtcctaggtcccgatttgggtccatgttcgggtttgggtcctagtcccaattttgattttgattcagtttctgggttcgggttatggtccaggtctgggttttggtcgaagtcctggtccgagtatgagtctgggtttgggtccaggttcggatccctgtatgggtctgcgttcgggtccaggtttgagttcggatcccgggtgtgggtccaagtctgggt

SEQ ID NO: 145119 - DNA, 1135 bp, Cannabis sativa
acaaagaaaagcctaaatctaggtttttacttgcttcattcaagttgaactactagatctagccctaccggtacaagatctagcttattcccaatagtagaatttcactttagttgctgcctattcagttcaggaggatgcatcccactcactaagtaatttacaaaatcagcataccaaggagtaattgatttggttacaacaagcagctgctcatccagaaaagtctcttgaatttgcattttgtcttccttttcaacacatgtttccaaccgagataagtggtcagccacttggttctccgtcctttttctatcccagatttttaaatcaaactcttgaagaagtaacacccaacgaatgagtcttggcttcgcatctttcttggcaattaaatatttgatggctgaatggtcggtgtagacaatcacctttgttacaacaagataagatcggaacttgtcaaaagcacataccacagccaacaactccttttcaatggttgagtaattaatttgagcatcaatgacagtcttgcttgcatagtaaataaaatgaaaaatcttttctcttcgctgcccaagtactgcacccatagcaaagtcactagcgtcacacatcaactcaaatggcaaagtccaatccggagccacaataactggagctgtcaccaatgcctttttcaaagtcacaaaagcctcatgacactccttagtgaactcaaatggtcgattttgttcaaccaatgaacaaagaggctttgaaatcttcgaaaaatccttgatgaaccttctatagaaacccgcatgtccaaggaagcatctaatacccttgaccgtggtaggaggcggtagcttttcaatgacttccaacttagccttatccacctcaatacccttatgagaaaccttatgacccaaaacaatgccttcttttaccataaaatggcatttttcccaattgagtaccaaatttgtttcttcacacctttttaacactttctccaagttagccaaacacgtgccaaaaggttccctaaaaactgaaaaatcatccatgaagatctcaagaatactctccgccatatctgaaaaaattgccatcatacaccgttggaaggtagcgggagcgttgc

SEQ ID NO: 145120 - DNA, 577 bp, Cannabis sativa
  modified_base (537)..(551): a, c, t, g, unknown or other
caccactagtggaagtgctcgctcctaaagcaccctcgttgtgcaccacctccttgaagtggatggcaagttttttggccttactcaggcctttcgagaattgtctcctcatatcctccagccatttctcatcggccttcactaactttaaggcctcttcaatagtaataactgcaatggcctctttaacctcatataggtctgcccgacaggcctcctggaccgactccctaatagaaaggtgagtcacgccctggtgagaggcaataagacctaccccccgaagggtctccatggttaccaatttttccacttgcaactccttgggcgagaaggacttgtgaaaattgatcctctcttccaactttgaagttagggttgacttgggaaggcaatctagcatatacaaacagtaggaggtcgaaatgcaatagacagaaggaaaaaccaaactttacaatccaaaggaagaaattaaacttgcaagattaaaatacaaactgagggtaggaactctctgttggaaatattttaccnnnnnnnnnnnnnnntaccatgtatgtttcattaacatcct

SEQ ID NO: 145121 - DNA, 857 bp, Cannabis sativa
  modified_base (49)..(66): a, c, t, g, unknown or other
ttaatcatagcgtaatagctgcaacagaggggttacgccgtcagacttnnnnnnnnnnnnnnnnnnaatacgtcttctcccatgcggcattaaatgcgaggtgactgttcaaatgtagtctggtatctcctggaggtgccttaccatggctctgacctccgggagtatgtggagccttcatatcttctctgagaggtattttctcgttgatactcctgatccaaaaatacttagttgatttatctcaagagtcatgtttctcagatccacgtgtcctagtcgcattggtccacgtattttgggaaaaattaagggcaacatttaaccccaaagccttgtttggtgggaagtaaacgaggcttgcttaggtgcctccggctatcttattgattacctggcacgtgctttgggcacgtgggttgcatttatgacaatcatcattaaaatttattgctttttggaggcaacgattcgcttcccgtcaatgatctggtgcatttaatgggtatcagtcaattactcaagcgtttccagccgccctgatgagcgcttctcccaatcgttagatctgcagaatgcgaatcgattgtgattttcaccgtacgatgattcctggtcacagctgcttcacactcgttctggcctataaatgccagccttctcctttcattttggttactttcaccagttttccatattttctcaaaaacactacagagagaaaaaatttcagacaccatagatttcttggtactcttccttcgccgcagtcagtcctcgttataacattgatcaacgccgacccccagctctcaaccttcatgtaagttttctggacactttgtgcttgtttactg

SEQ ID NO: 145122 - DNA, 529 bp, Cannabis sativa
catcttcgcagaagtagaggctctcaaccgagccttgagttggtgtagagctatcaatttccctattagtgtggtgttctcagattgtttggaccttgtctcaagaacactaaagaggagaaaagactattaagctctttcagatttaatttggactctactcaactctttgtcctactttcctaatgtatctatccaccacaacccaagagctcacaaccaattggcgcacaaactcgcacaagctgcattaggaacagacgaagagtatacttgaaacaattgtgcttcaaatcttgtttagatcttctaacctgatatttcttgtttctctttgtgttacagatctttttttaaaaaaaaaaataaaaataaaaaatagttagttattctgacaataatattacactgtgtttaactagacacattgtactaggggtgagcaaaaaatcctaaaaaaccaaccaaaccgaatacaccgaccgtccgaacatcgaaaaaaccgacactggaaaaaccaaaaactgaa

SEQ ID NO: 145123 - DNA, 928 bp, Cannabis sativa
  modified_base (367)..(368): a, c, t, g, unknown or other
agaatgacatcgctgagtatgttgctaagtgtcttacctgtcagcaagtgaaagctgaacatcagaggcttgcagggttgctgcagtcattgaatattctagattggaaatgggaatacattgctatggactttgtggtaggcttgctgataaccacgagatagttcgaatctgtatgggtcatagtggacaggttcacaaagtcaatgcactttttggctgttcgaacgaacttctccatttatcagtatgctgagttatatgttagagaaaatgctcgtcttcatggtgtcccaaagtccattgttttggatagagatttgaaattcacatcaagattttaggagagtctgcatcgagctatggnnactcagttaaagtttagcactgcatttcatcctcatacagatggacaatctgagaggactattcaaatcttagaagacatgctacggggcatgtgtgcttgactttgaacgatctgaacgatcatggggatcatgggtatcatgggtaaagtaccttcccctgattgagttttcgtacaataacagcaatcaggcaacaatcgggatggccccttatgagcttttatatggaaggaaatttagatcacctattcactgggatgaagtgagtgaaagaaagttcttgtgtcccgaggcagttcagagaacaagtgaagtagttgataaaatcagagtgcgaatgctcgcggctcaaagcagacaaaagagttatgctgatccaaagcaacgagacattgatttttacatcagagacatggtatttctctgagtatcgcctatgaaaggcatcaagcgctttggttaaaaaagaaaacttagcccgaggttcattggaccttttgaaatccttgagaggatagggcaagtagcgtacaggtttgctatgcccccagcgctgg

SEQ ID NO: 145124 - DNA, 990 bp, Cannabis sativa
  modified_base (741)..(745): a, c, t, g, unknown or other
attttagtaaaaaaattctaacacggatgaaaattcaggggcataatttaatacatataaaagtttgaggggcatgataagcgtttccatacaatgtcattagatgatgctcgagaggttcaaagtagtggcatatgtattgttgcagaaactatgcactttgctagtgcaaaagatagaaaccctgttctaggtactatgacgtattacggggtcattgaagaaatatgggagctcaattcttttgcgttccaaattccaatttttaaatgttcttgggttgacaacaacgttggagtaaaagcagacgagcttggttttactttggttgatttaagtagagaggaagaaagaacgatccattcatcatggctagccaagcagttcaagttttttacatttctgatccggcttatgataaatcgtctattgttttatcgacaccagagaggagattcttagagaatgaagaggatgaggagaatgctgacttatgttatgatggcttcattgttggacaaccaattcatgagcaggttatgggaattcatcgtaaccaattccttgttgaactcatttaattgttagaaaaaggatctcgacgttcacgatcccccccgccaccgtgtttggatcaaatctcgccccaagagtcggaaacttgtcactgattacgacaaggaaattacagagaagatagtaagtatatattaatcctaaattgagttctactaatgagtnnnnntatataattcacatactaattgcttcaatatatgcgtgcattaggatcaattaaaggataagcttactcagggaccaattcaggtccagggccaaaacgatatcttgacgcaggcgctcgggacaccagagcatcctggacgtgtaagggctgctcggtatgctagtacttgaaatgttgtttatttagtgacacaaataaaatcgtagctaatttgcattttatgatttgcaggttcctgacca

SEQ ID NO: 145125 - DNA, 618 bp, Cannabis sativa
  modified_base (476)..(477): a, c, t, g, unknown or other
actggtctgttccaggccccgttactcgaatccctagtcaagatctagatcactatcacgggtctcggtctggttctagttcaggtctgagatcctatttgtgagtttgggttcaggatggagactggggtgtggttctagatgccgacccttgttctgtgtcccaagtctatttccatgttttggtctgacttaaggttcgggttcgggtcctcgttccaggtttgggttgggatccgtgtctggctcccaatttgggtctaggtctgatttggagtccgtgtccttgtccggttacggttctagatctaggtcaaatttcagttatgattccaagtcaaagtcctagttccagtcccaatcgacttccggttttggttccaatttttgatcccagggtacgggttcgggtccagacaccgactatgggtttcgtccgagccctgggaggcgattcggatcccaatctcgggtcnnagtctggttcaatttctggtgccgggtaacgagctgggttctaggttctagttctcgtatgggtcgggtactaggtcccggtccaagttcttttttccaggtccctatcttgattcttggtccaagtcccggttattgtgt

SEQ ID NO: 145126 - DNA, 571 bp, Cannabis sativa
  modified_base (534)..(541): a, c, t, g, unknown or other
attaactgctcactatattattataaatagtggcaagaaagataagaaaaggggacgaaaaaactcatacaagagaggccctgaaaaataattagaaatcttaataagatttactcggggactatgcagaattttaactgcaaaaccacgtaaaaaaccctatgttcatactttttattttacaacttttatttttctgtgtgaaattattactgtgaggctcaaatttggttaacaaaaatctccgttaacagtttggtgctttcattgagagcctctatgaaaaagctcagaaaaagcctcctgatatataagtaatggatgacgccgaagaaaataatcctcgtgaaggaatcaatcatcgccttggaaaagagtcgttgagcccttagggatctatgagtcatcacatgaatagacaggaagccccgggaaaacccaatattgcggtccctagcttgacgaaccttgggtgaacaatgacaggtcacttcctaacaaaattgatgaggattgtaaagcccgcttagttannnnnnnnattagcagttgtttatgtttaattatgaaa

SEQ ID NO: 145127 - DNA, 807 bp, Cannabis sativa
  modified_base (487)..(497): a, c, t, g, unknown or other
cacttaccttaatattttttaacattgctagaaattcatgaaatttctcaaacatttcaaatttctttgcatagggtataatctagagtgatcgtcaaagaatttagcgataatttatatccacccctgaatgcacatctatatttgaattagatgatcttacgttcaagtggatataggcatattttctctttatagagaatgatcttgtcaaaatcaatatgaacaagctgcggatgctgtagatatatgattgttgtggttatgatgaatcttgatgattcctaggtctagttacaataaagagttcttagaatagttcaagtagatgtcagtcacataatacaaaactcgtattccatacattaacatacagtttggatctattgacagaaaatcgatgttaaacttgtgaaagttacactgtattgtccaatgtaaaatggaaactgaaatttataattctatttggaatctaaaatttaannnnnnnnnnntaaatttataccaaatatttcttgaattattatctttcttggaccaccactactaatctaactctaattttaggttgccttaagtaagtatatacaagtaggagatatctaagatcgaggatttatatcatttcaggatagaatgtcttgaatatagtcatctgtgccatttcatttcataagagaaaataggatgacatcataagcatatgatttataaaccatctatccaatgatatactatctaagcaaattcctaatgaaaaggctaagaggaaaaataaaggataattttgattaaaataaaaat

SEQ ID NO: 145128 - DNA, 736 bp, Cannabis sativa
aagttggaattggaccagtgaaattgttgaaagaaagatccaatgtttcaagttgtaataaatttttgagttggccaatagaagaaggaatactcccattaaagaaattagtttgcaaatgaaggtgtttgagcttagaaagttttgaaatattagatgacaaatgtcccacgaatttgttacttgtgagattgaaggattcgagtttgatcagattggaaaacacagattctggaattgagccagtccaactgttataagacaggtctagaaaagtcaagttcttaaactttgatgtgaaacttgggaatgttgaattaaatttgttccaataaagatcaagatatgttaaggaaggcatggttgaaaatttagaccaatctgtattctcaaaatagcatgctccaagggataagtaccataccttttttagattgctgagctggtaaggtattggtccctcaagagaattgttgtagagactcagatattgaagctcagacaattggcttatctccactggaattcctcctttaaaatcattgtcactcaagtccaacaaagtaagcttggtgagattaccaatggctgttggtatcaaaccagagagcttacaattattgaggttgaaggcagtgatgttaagaaatggagtgaagttgaagttgtccaatgttccattgagttccaagttggagagatctatttgtgagatttctccattggaaccatcaca

SEQ ID NO: 145129 - DNA, 713 bp, Cannabis sativa
aataaatataagtggagctacatatataagatattatgtcaaaaattaacatgatataataatataattttttttttttaaaagtaataatatagatttttaacttaagcaaaaaaaaactgagtttatgagaattatgcttattgtggattttaagttattttgaaagatgttcttttaaaattactaatttatttaaaaataaatttaatttaatacaacatataatttatatacaaagtgtctagcacgtgaaaacttcactagtaatcataaatagtagaataaatttaatgagaaaatatatttagatatttttaatttatatttattataattttctgaactaataaaaaatatagagtacctaatttggatgatataggaagtattatatatatatatatataaatattttatattttttttttaaggaagaagatcaaagactaaagacaaaagagctaagactaagatcttcaatgaaaggaacttaaatggttccaaattaactcttcgttcgttccaagggctgctcgggcgaggccgtgggctgttgtgtttgaagaccgtgggatgtagtggaccgaagcacctggaaaagaagacaaagaggagactatcatagaaacaagacccgagagggctgaacgatctggagagagcttgtgaaggcgatgcaccaaattctggcagtcggaggcaataacagc

SEQ ID NO: 145130 - DNA, 549 bp, Cannabis sativa
taattatttatctctacatatacaatataatattacatacaaaatcacttaaatgctagggtaataaccctagaccacataactgcttattttagggtaataatcataatctcggtttctcaattaacatacgcataataacttacatgagcgccacatcgcttaactctatgtgctaacttactgtcttacctagtattataagtatgtgaagatttcaaactcctgggtattcctgaacaagcgctggtaatcatagtcacacgttctcaggatttcacaaatagggttcatcccaaatctaatttcataataattactaatttctccttaacataacaacatgcatcataatctcaagagccccattaacaagattccaaagcttcaaaaatcaaaatttaaattatgcaatataggttgaaaagctttaccacaactttcttcaagctccaagcaaaaaactatcacaaaatccccaccaattcaaggcttttttcttcacaaacttaaaaatcacaatgaagagggtaagagagagagagagag

SEQ ID NO: 145131 - DNA, 841 bp, Cannabis sativa
ttcagatccttatggttacattcagtgattttgattttatttttctactgactttttactttgcctcaaatttttaatggccttactttttacagtacttgaaacccaaaccacattctcccacacaagtacataaccattaagccaatatcaagtagcttgtaggttattctatatacaatacccttaaaccaacatgtcttgtttaaattaaaataactaagaaaactataagtaataagaatctaaaaaatgaaatgtatcagagaagagatataacgaaacctagtttggttacttgataagaccacaagagagtgtaattttctagagcaaaaagaaaataataacaagaaaaacagagaagaaaatcttctaattattatttgaagtattgtttgatttttgcatattctttgtatgagcacttgactattaggtataaattcattctgttttaatatgttttattatattgtttgatttttgcatatactctgtatgagcacttgactattaggtataaattcattctgttttaatatgttttatattgtttgatttttgtatatactctatatgagaactgtatatatgacatttgttttatatttagatacaatctttgtttctttagttactcaacaataaaattaacactaaaaaaaattagagtgtttaatcatttagtttagttttgacaattccctatcatttagtttagtttagtgttgattgttcaattttaatcacacattatttatttatgtccaaaagataatattttcaattaatttgatttgtgacaatatattaattaagaaatttatttttgttgttt

SEQ ID NO: 145132 - DNA, 1031 bp, Cannabis sativa
  modified_base (343)..(345): a, c, t, g, unknown or other
  modified_base (480)..(482): a, c, t, g, unknown or other
aaaagataggggtggtgacaccccatacgcgcgcggattcgagtgatcacttggtcacgagcgcttcagccaagcatatgtccgagttttctcggtcaggtgcctcggttttatctgaatgccaggcaccgcgcgcgaacgaggctgcgtgcagcctccctggctgagttttctcggttgtctcccttgctcagcgcgcgcggatgatatgcaacgcataccatccatacaacttgcattttttttcgtttttcttcaattcttcatgctatttcatggaattaatttcgaattttttgtgtagttttgtattttgatttttacttttcaaatttcaaatctnnntatcagaattaaattaattaatattttttaaattaaaattatgatattagtgaaatttgaatttgaaaataggtaaagatctatctttttgcttagtttgttatcttatatttaaaatttgattattttatcttnnntttaaatttaaggttagatatttagtattttaaattattcaattttttttaataaaatgaccttatttgaaatttaaaaataagattattttaatcataaaattttaaattgagataagatattttgctaacttttaaatttttgtaattttatttaaaaattaaattataaaatcagaaaaatgataattatttatcattttattttgttgaatatttaattttaatttaataacatgaaattcgaaaagttgttagtatttttttttgaaatagatatttaggttaattgaaactaattttttaaatttataggtttaaattttaatttattttttttattttatttccccaaaaaaaatttattatttatttatttttttttttgaaattaataaattaattaattaatttaaatttaaataaatcctatatccaactatccaatgtgttacatgtgcgtactttatattgtttattattaaaataagttttataaaacctattattgtttgatctaaatttccatggttaacttgttgacatatc

SEQ ID NO: 145133 - DNA, 812 bp, Cannabis sativa
  modified_base (777)..(784): a, c, t, g, unknown or other
cttagtattaattttccaataaagattatgaaaattactcaatttaagttggtccaaaattaaatgattaattttcaactcaaatttaattttctacaaagatatgtaattgaattcaaaatccaatgtatttagaggcaatacattttcaaaattcattaaaataaataaaataaaataaaactgaaaaaattattctaatttatgttgctctaagattaaataaaataattttcaacataaatataattttcctatttaattaattcttttaagaataatatctaatatttaagtatctagaacaaaataaccttaaatattatttttctatttaattaaatatatctaaaaaaataccaaaaagtctacctagaaaaaatctatgtagataattcataaactaattactgattttctaattaaaatataatatgttttagtctatttattttaatcaaatcattaataaaaataactcgatttaagttaatctaaaattaattaacaaattaatttctaactttaatctaatttttaaaattgaaaatttttgaaatatctacatttaaaataaatgtatttctaaattaatgtgggaaataaatataaaataaaatataaatataaaataaaataaaatatattttgaaaattattctacttcaaattgatctgaaattaacatatttttgacttaaatataattttttatatatttaaattcattaaaatagaaataattaagtatctagaataaaatcaacttaattattnnnnnnnntttaatatttaagaaaatattctaattt

SEQ ID NO: 145134 - DNA, 712 bp, Cannabis sativa
aggatggtagtggaattagcccttttaatttccattttggatatgttggtcgttgtgccttcaattgtttggaaatctcatacaacgcaacgtcataaaaaaataaactaaagaaatgtgcaaaaacacaaaagtatcaagaaaatgaaaattacattgtgacataaattcaaatcttcatcgtaataaagagtggaccactattgctccctcaccatcttctccacagtcatcgatctttcaagtaactgcctctgcacaataagcacacacaatatagtacattttaaatgaaagtatagtcgacattgtattaaagcacaaatacaaaaagttcatgtcaatttttaaataacgaagttcgtacagaaatttttgtgggcataaaccaagttctctatgatccaatgtcattgcgcttcctctctcaacaattcattatttgagcaaagtaaacaatgagctgccatttacacaaacagtatctattatgttgtgattcatacaatcacagtacaaagatgaagaactaaaataataggattcatgagcaaagcattcgaaatcaaatgcggtaagcagaaaacagctaactcaactttcaagtatgcttatctctatttatatacataactaacataactaaccaaactgtcacaactcacaaaacagttaggcaatagtaaatagggaatgtgccttaaaaccacca

SEQ ID NO: 145135 - DNA, 513 bp, Cannabis sativa
aattgccacatttatgcacctgtctatatcttcttgtcttggttgtatttgcaggtggtggttcatcagcatcccttcttctattcttttttggtctccctgacatgtttgtttcctctggcagttcaattgggttaagacctagcatagggtgtatcacacccgcataacccttcaacaacgtatctttcttgtaccagtcatgaatgtaatcccaaacttcatgacctacctcacatatgcatgctaatgcatgaccacaagggattccacttagttggtaccttttgcagcaacacgtcttctcaactaggttgactgcatagctgatagtgcctggacagtccacttgaaaaatcacttttgttgcccttgtcaccaaacaatttttagtaaacttcttgttctactctatgagcttcctgatgttttttcctactggttcattccatctagtgacactctcccttttcttttgaaacctacacatgagccaataccttaacttttcca

SEQ ID NO: 145136 - DNA, 912 bp, Cannabis sativa
ctaaaggaggagtttttaatagggaaacaagtgttggtgattcattcaaaattcaaatctttgacaagtaacgttatctcaagatggaaagatccttttaaattcaaagagttacttccttgtggccttgtaagtattaaaagtgagaaaggtgagattctaaaggttcacaagcgtaaactaaaggcatgcactgatgagctccgacgaccatatcaaccacctaggggtaatgatgatgatccacctgctaatgatggccgtggtagagctatggacccgtagtcctagctgctctggttcattttctctcatttaattttattacacagtggggacactatttattttaagttttgggatgggaagacaatttttatgtttttttattttttttttaattttttttaattaatttttttttggatgactatatcaatgttaacttatgacctaagggaattcgatgatgaacttatgctaaactctttgacactatttagtatgtgtgagaaacttttggattgtgtgcttaacctgttatgcttgagttatgtgttgttctacttgttctatatattgtaattttatgtgcttatatagatttggttgatattgagacaacgagaacttgtgtgattaatttattgaggcgaaatcctaaatctttgttgtgtagagatgattaaggcaattttctttgaaccgtttgagccaaaaacctaaccttaatatattatcctttgttatcctattttgagcctaatttttctaatttttattctctattaaaaacaaaaagcatatatatccttgattatgagccatgaacttaaataaattatccttaccctattttgcaccataaacataggttgttgtgtattgaatgaaaaatatgatgtaagtggg

SEQ ID NO: 145137 - DNA, 545 bp, Cannabis sativa
tctctaacttatcctccttgtgccattatagatttgaaataaactctaaattatagagaatgctctatatgtaccaagatatagatacgttatgaattatccattgttctagtccaactagtcaaagaacctctatagatgatctatatcgaatagggacaaatttaccgttctacccttcaatgaattttatccttaaaacacttaactaaatataaatgatattttagtaaactaatataattacctgaaatgagatctcaatcatttatctctattaagtcaagctcgaaggaaattatcatttcaattctaaatacttatagaagctatagattccatatccatgattagcgctcccactcaattatactatcatcttcttaagatgtaagtatccgccttaaccattagttagctttcacgaacaacgttaagaacaaataatacaattgagttcgaacctaaccatctcaggattaagatctattaacctaagatcaaccagtgatattgacttagaagatataacagtaagtttatga

SEQ ID NO: 145138 - DNA, 531 bp, Cannabis sativa
  modified_base (364)..(392): a, c, t, g, unknown or other
  modified_base (463)..(473): a, c, t, g, unknown or other
atctgtctatcacttgtcagttttgagtctatcactatctatttataggattctttttaggtttaggtttaaattgtatggcattagaaagtatgattaaatggctaaaaggagcttacgtggccggccacaggatgtgggctccactaattacaattttgccattttatgcaactatttatctttttctttcacaaatgtcatattttcaatttcaatcctttaaatgtgaaaactatttatttaataattaatattaattatcaaataaaattaccattcatttatttattaattagacttaatatagtctcttaattaacaaatcagccctaaaatctttttcttcacaattaagcctttnnnnnnnnnnnnnnnnnnnnnnnnnnnnngtctaattttagaattataattgtctcaactagtctggggactatgagcctatataactgagcttccaatnnnnnnnnnnngaatttaccaagtaaattcccttacttattaattcctccttgcaccacaatagatttg

SEQ ID NO: 145139 - DNA, 527 bp, Cannabis sativa
  modified_base (70)..(71): a, c, t, g, unknown or other
  modified_base (488)..(494): a, c, t, g, unknown or other
gtatattatttttatgtgcggtggtatatgaagaacaaaagagaaagtatattacagtatattcatattnnagtatattactttaataatgtgatatattctttttgtggggtagtatgtgaagaacgaaaaataaagtatattatagtatattcatattcgagtatattactttaataatgtggtacattatttttttttggggtggtatatgaagaatgaaagataaaatatattataatatattcatatttgagtatattcgtatatgaagaacgaaagaggaaaaaaaatgtgaaatagtaatttaagtttgtggtatagatatattttattggagtgtattctttttattttctatggtatatgaaaaaggaaaggaaaagaaaaaaatttgtggaatattaaactaatttttggtattttcatttcccactatgatactatattaatttttaaatgtgatattgttggatatattttaccannnnnnngatttactaacaagtatgttagatcggaagagc

SEQ ID NO: 145140 - DNA, 648 bp, Cannabis sativa
ctttccatatctctgtaatctgatccccaaattatagggatttcttcaatgactcacaatgcaaaagttgaatttgctaagtgttggttattctgcacagattgctgatctctttgccttgggtattccagcgaggcatgctattcggactgtatcctccgagcagatactccaagttgattccacgtgtcaccattatgcggtgccacgtcagagtgcaaaaatagggataacatttgcccccaagtctgtacagaacatccaaagttgcgtgtagacttcatccgagctgtttctgccttttgatggggacacgtgtcgggccctactttccgggactcgatgtgaagctgactgggcatccatttggttttcggctaataaatgctctgacaattaatattgcaaaatccgattttctctcaccacggttgacagctgcacttgattaatttttatttcccatatttgcttttaggggggaaccgaggcgtctgacgtttctctgaaatgattacctcgtttcgtgacttgcattaaatatcaaccagcattggcacataaactcattttcaccatccttctttgctaagtgatttcagagcaaaaagagaggttcttggtttcaagcttgctgaagtgccttca

SEQ ID NO: 145141 - DNA, 504 bp, Cannabis sativa
gtagcctgactaattatttagggcgttacatacagtcggtgggtcttgagggagacctaaagatgtagatggtgcgatatgaattcttctcgtgttaaccatagaatttgatcagatacgatatccacgctctcattgaaagcaccaagctattgacctcaaaaaattataaactaacagctgggtcgtatagatctgatgcatgccatgtgttacacaaacagaatgaaaaagtaataaacaaagagatttctcatagaggtttgagccccttgtgatagtgggtaatgacctactcccctttttttttgtatttataacgagacaaatactatccaaatcataggtgggatctgctatagcattcttaggattacaaagtatgaatcaataggaagatcttaagtgttggacaacctagggtgctggcgagcctagggtaggcgtgtgagagagatgaagagaagggagagagagccctgatgggcgtgtacaagagagaga

SEQ ID NO: 145142 - DNA, 687 bp, Cannabis sativa
  modified_base (647)..(651): a, c, t, g, unknown or other
tttgtcatgttccttttgttggtatctctcttcatgggtccgggcttcttgtacggagccaatgactgggttgccatatatacactttctatatcttttgtaagagtagtgaatgcagtgtatttggcatgattctcccggggagtctgtccggatttattagtgaactttcctttattcccgttcccttgcttgtggttgttgctggaatgcttgccacttgagcttaaattatttgggtagttgggaagttgggcggatgtcccagtggaaggagcttttgacttgcccgacttttattcaccttctgctcgttgaatggcttcttcaagcttgatgaagccttcggctcggtcaaggaaatcactcattgagtctactggcccgttcttccttatatctttccaaagttcactgaggacttcgatgccccccagtatcgcggataactttccatcctcggttacccttgaaactttggttgcctccgtcatgaatctgctaatgtatgcccggagttgctcgcctggtcgttgcttaacttcgaccaaatctcctaaatgtaatgggagttggcgcgaggaggcgaattgcgcatgaaattccgaagacaaggttttcaatgaactaaactttccaggagccannnnnaaataccattgctgagcggctttcgacagagtggca

SEQ ID NO: 145143 - DNA, 577 bp, Cannabis sativa
ttgttcaattgttattagcctgactatatgtggtttagatttgtaaacactaaacgaaattcaagttattgcttgtctgtaaagtaaagctcaactgtataggccgagatttgtaaatattaaacaaatgattagtaaataactaaacacaaattactaagggtcctattgttgacaaaaaatatctactgccatcttctttctgtagaatgccattctatcatctgataggctttcaaagctaagaccatccatctcgaactcaatgaacttaattgcatataccacacaatctcccctgttataagaaatttttgaaatcaataatacatatatgtttgcaataaatatcgactaagaaagcgtgtataatagacttataaatatacttacgttgaattttatggaacatcaagtaatcgtttatatgtccatggattgtgaaggcattgtgctatctcctgaaataggtaattgttttaatttattctttaagttgtcaatggtgatgcatgaaggtctttcacgaaagtgtctatctttgaatgattttgactcagcttgagattcccaacct

SEQ ID NO: 145144 - DNA, 830 bp, Cannabis sativa
tgttccccattccaataccttggtgccagaacgagttgcattttttcatcatacttacccaatttgtatgcccctaatttgagaactttgaccacctgatatggtccttcccagtaaggtccgagcacacttgccatactgtctttggtgtttagaaatactcttcttaggaccatatctgccacaaagaatttccgagccttcacctgtttgttgaaataccgagctactttttgctattgggccatcagctttaagtttgctgtagttcgcttctctttaatttcattaagtgattcggtaaggagtacatgattggcttcttggctatacgtcaatcttctgtgggatggtggttcaagttctatgggcagcatttcttcatgcccatatgccatggcaaatggagtttgtctagttgccattttctcagttgtttggcacaaccataggacttcaggaagcttctctagcccgtttcctttagcatcctcaagttttttctttggtgcatccttcaatgtcttgttgactacttcaacttgaccatttgcttggggatgcgccactatgaagaaacttttgatgataccatggttcgcacagaaatcagtaaaggactagctgtcaaactgtttgccattctctgagactattttgtacgacaacccaaaccggcagattatgttcttcacaatgaagtcttgcacttttttttggatgtaatggtcagtagcggttctacttctgtccacttggtaaagtaatcaactgcgaccactgcatactgcacggcacctttgcccttgggtaattgtccgatcaggtca

SEQ ID NO: 145145 - DNA, 843 bp, Cannabis sativa
atgagattttgtaacaaagcattcccaagggccggatgtgatgaagtaacaaatggattttcatgacatggaagccatggttcattcaaaacgcttatttggcttccatctccaatgcaccattgaacaccttttcgcactagttgttgagcttcccaaacactcctccaaacaaaacttggattattccctaaagaagccgagagataactgccattggggaaatatctagctttgaaaatttttgccaccaaagagtgagggcgaacaactaatctccatccttgcttgcctagcatggccaaattgaagtcccgaaggtgtctaaaccccatgcctcctttatccttatgcgtacaaagtcggtcccatgagagccaatgtattcctttgccattcttatttgaggattgccaccaaaatttggtcattaccttttccatgtctctggtaatttccaaaggaagtaagaaaacgctcatggcatagcttggtagagattgagcaactgtcttgattagcacctctttactcgctctggaaagaaactttgattcccatccttgaatacgtttacgaactctttctttgaggaaacccaacaccgccgacttgtttctgctcattgtactggggagaccgagatacaagcttttttcatcagcaatattcatcccaagttgattactaatgttatgttgtgtggccgaatccgtgtttgagctgaagaagatagaggactttgataagttgactttctgtcccgaggccgcttcgaacttactcaacacctcttgaattcttgttgcttccactgtagttgctttacaatagagataacta

SEQ ID NO: 145146 - DNA, 811 bp, Cannabis sativa
agttcaccttgtcaccaagaactccgagtgtcagatggagcgctatgtcttcaataacagaaacgacgatatttctattatcaacctcggaaagacatgggaaaagctccagctcactgttagagttattgttggtatccttacgaggtgatccagcgagatacactttggagtgtatctaaatccacatcaatattgacctaataaaagcggataaatcacacctatgttgtttttaattaataaccgtatttattttacgtgggacgtaatcaaatcccacaattttaggggaatagtgttgtgggatatcaatctgattgtaattaactgcactcatatgtagcgataaataggggcacgatacactaaaaaagggaggaaaaatcctttagagaatgaaccctagttttgtaccagagaaatataataacatagacttgtggactatgcaaaattttaactgaaaaaccacatgaaaaagctttgtgttaattattttccttttactactattatttctgtgcaaatccatgatgaaataggccttaatttagttaacgaaaatcagcgttaacagtttggtgctttcattgagagcctacatgaaaaaaggtcagaaaaaaccctcctgattaaagaaaacctttctccatggctgataacggtaaaaatgttgatactcatcctgaagagaccactcaccgtcctggaaaggaagcaatgggctcacggaggcctcccaactcatgatctacacaaacactcgttctagaaggactcaacctgaaggtggcccaagtacacggtc

SEQ ID NO: 145147 - DNA, 1423 bp, Cannabis sativa
  modified_base (522)..(528): a, c, t, g, unknown or other
ttattcatttactcatatttccctaatataactcgtaattagtttaagtaggattataatcctactctaatacccacttaatcacatatttaataaactacgtctaattaaaatatcaatatattttctgggatattacagatttagtcaaagaaatatggcaacctgctttagtttcctatttcatatatcgtaattatgcaatcattttaatttcctattttatgcattgtaagcaaaatggaaaccatcctcctgcattaagcccctataaatagaaaaaatattgaactaagagaattactcagagatcagttgtaagagctttcaaagaggaagaacactttgttccttctcttaagtcaatacaatacaaggggagtaggctattaccacactcacggggccgaacctctttaaaatttggtgttcactttaccttattatttttgttctcttttaattatattattcaatcacttattatttaactcactatcgttggctaaaagcgaggtcaannnnnnngtgctttcattgagagcaaaaacagaagttctttgtcttaaagttttggtaggaaaataggatggttgtacaaacacgtagaggccttactgatcagggcgacccgatggtgacagatctcaacgtgcaaagtgctagaaacacaagaggaccactagggacaaaccccaagcaggttaatacacaaccacttactgtggtccacggagtgacttcccctctggctaagatcacaccaggcgtacaagagactggaaacaccagttcaacagtcgatcaatccactcccaacaccgaggtcctgtctaccactaatgctcagaggccagttggagacgagactaaaatctagaacctccaagcagccttggggctcatccaaggtcataataatgctttgcaccatgatcaggaggatctctatgcagccataaaccttgcatttgatgaacaaaatatagaatggagagaccgagagatggaaactccgagggttcagcaggtagccattgatgatcgcactagacaggccgctatactgataagaagggcctaccatatcgccaattaacaaccggctactacgtccagtattcccttgggcgggtcaaaagagtatgcagttgggcatatcgcacaaactcacagtggtcagccgtccaatccacgaccataggtcaaacctgtgggccaaacggtagacagccagatctttccagaccgtcctttgggtggagttatacacaccaacttcacccctactaaactttctggccaacctaccggccaaacaagtcggacaccaagtgtaacgccctaatctataaggacgccacgtgtgtgattttttaaactagtttaatactaatagaataattaattattaaaaaccgtg

SEQ ID NO: 145148 - DNA, 1337 bp, Cannabis sativa
  modified_base (1159)..(1165): a, c, t, g, unknown or other
acaaaataaacaaaattgaaaataaaatatcctaagtttaaaaattttatggttggaaaaccctaaaatatctattcaaacaaaaattaacaatttttcaaaatttcatgtcattttcacaaaaaatataaatttttaattaaaataaatatccaataaaaaaaatgtcaaaactaacatttttctaatcttataatttaatttaataaaaaaatattttaaaaataacaaattttaaatatctgatatggttagcaaatttaaaattctaattagattatttctaagttttattagtattttaatatcaaaataagatcattacaaattttaataataaaataagtaatatctgatcttataattaaaataaataaaacaaaaaaataataaaaaatttcaaaattaaccataaggctagtttgtggaaaaattaaattttcaaattcaaaggcttctaatatcgaaaactaattttaattaattaaaaaattaatttaattatgataattagatttttatttgaaaatttggattctacacaaaattctactaaaatttgaattttatttcattgaaaaatgatttttgaaactcaaaatatcacaaaaacaagtttggcttaaagagtatgcattgcatactccctatgcgcgcgtgtgggagcaaatggggtgaaatgaggctgcacgcagccttcttgagggacaaaacttggtcagctggggcttaggacagcccttgtccgagaaaactttgtcatgggcttgtctgaagctctgtgaaggccgagtcatgcttgtcctcgagcgcatgtgtgcaacatgtttgagatattttcattcaaacttaaaaaaatcataactaattcaataaaaattcaaattaaattctgtaaaagtttaaatttattaattttttatctactttccagaaaaatactttcagaatgaaactaaaaatatttctcatcgtaaaattgtgatttccacacaatcatcaaatatgcacataaaccaacatgagcatacccaaatcatcacaatcattgttttaaatccatattacatgaaagtaaatcattactatggctctgaggctagttgttggaaatatttttccaggttctagatttactaacaaatatgttgattaacannnnnnntatgaatatctctaaaacaatgaaattaaagacataagagtttagaaaatataacattagttgcaatggaatataatgactccttccgctcagatctctaactcttgttcctttctgtcgtagactattatcaagatctgagtctggatctctttctctccttcgggtttgg

SEQ ID NO: 145149 - DNA, 625 bp, Cannabis sativa
atgttcttagttgtgtactgaacttgaactcgaactctcttggtgtgagagattgaactagaattctccaacattatacacccaccagtcatcttcatggacattctgaatctatttcacttaaaaattgtctttttttttgcagtaattatccatatatactttccaattgcagtagtgttccaagcaaatacattccaaaattcgattgcacccacttttttttggttaacaaattcgatcccaagccacacttcccggtcccgaactgactgcttgatctttccaaagaaaagcttgacaaattattggaatatttttttttattatttgtagtagattattagaatgaatcgtattatagagaagaggtcatgtgtttcatgtgtgataaaatgacatcattctatgcatatatatatatatttaatttttctatatgtataaaatacgtaacttttgtatgtatattgtgtacattcttcaaaaaaaaaaattatgcatagaaaatagtgacaacaagctaaaatgagagagtgtgacagtcagtagtctcgtgatccgtaagggaaaataccgaataagctgtgcaatcccataccgcctggggaaggtcaagtgggat

SEQ ID NO: 145150 - DNA, 504 bp, Cannabis sativa
acatatgcttggatgaaatttgtctaatgtgtgggttgaatagggaaacaaaggaccatgtttttttcaattgtcacttgagtgcaaatgttttaacagggattcaatcctggcttaactggtattcgactagcaacactgctcaggggctattgaagtggatttcaaaatccaaaatcagcaagttttagaaacaggttttttcggcaactttggctgctgcaatataccatgtttggaggtgtagaaatgaagctttttggaataacaaagtatgtacaattgactccattgtaaagagagtaaagagtgatgtaaagaatagaattaaaggggtaatgcctaagaagatagctaaaaaaagatagagattggtttcaaatgttgaattaaagttacaggcctattataaatggttctgctagtttgtaaatgaagttttgtggaatactttttctgattcaccaaaaaaaaaaaatagtaaaatattatttttcaaactta

SEQ ID NO: 145151 - DNA, 610 bp, Cannabis sativa
  modified_base (417)..(417): a, c, t, g, unknown or other
ctcaattaattattactaaagaaacatgctaaaagggatttgattcccaagttctctatacagaataattaatatgttaaaatggcatttagtaacatttttatttttaaattttttaatcacaaaaataatagtaaaatttttattattaaaatttaattttggaaaaacaaaaatgtgctctgtaacttgtaacatcctacttaaaggaacgtcacgtatcgtgatccctaggagcggacatacactttaatatagagggactatggctcctccaatatattatatacttataactttataggataattgagtttcttttgataatttatatatggtgacctggtttgacaaaatcaaacgtaaattatgaatatgatatattttataaaaatttacttttatttatttattttntataaaaatctatttgtttcctttattcttttttaagatatttattttcttttttagtaatattaacttactttgcaagatatgcttaaacgtttataaaatataatataaacaccacaaattactattattttatcatggggttaaggcttagtagctactaagtgtaatataaatgttgggttttgtgccc

SEQ ID NO: 145152 - DNA, 514 bp, Cannabis sativa
gttaagtttttaatattatcacggtttttaataattaattattctattagtattaaactagtttataaaatcacacacgtggcgtccctatagattagggcgttacactaatgtccatccgtcatcgtcatcgagcaaaaatcataaaaattgcataattcatatgtagcataaattatactcttagaatttaataaaatctctagaattgagaaattataactctaatgtccatttctagaaatgggcccacagcaaatataaaatcatatatatacttataaaataccgataattaatactaatcgcatttactaatccataatctaacatgcggtcattacaattatcccatgttaaaaggattttgtcctcgaaatctaacctaaataactctggacattaaaccctcatgacgggctctaattcccaggtggtttcttccaccttactgttcttctagagtaccttgaacaaagctatggccttgtttcgaagaactttttctttccta

SEQ ID NO: 145153 - DNA, 885 bp, Cannabis sativa
  modified_base (440)..(446): a, c, t, g, unknown or other
  modified_base (832)..(847): a, c, t, g, unknown or other
catgagttatcgttaaattcttgagacgatcactctaaattttaccttacgctaagaaatttgaaatgtttgaaaaattttatgaatttctgacaatgttgtaaaacattaatgtaagtggttaaagatcttacgaattgataggggtggagaaatatttggtagatatgcagttcaaagatcatttagttgattttgtgaattatatccaaacttacctccccagaaatccgatttgcatattgatgatagtataaggtttgtcattagttactagttgttgcataagtccttctagggatataccctagtgataggataatttcataatgatggaatagttatgtacttagtgtaaaccattactagattcatggacgacctaatcgtgatcttaggaaaagctaaaactattaaccaaggtttgcatgtttgatagnnnnnnnaagtgattaggggtggaccatcatattttcattaagataagaaagtgtttgtttcaacaaatactacgtttctaagaaaatgattaattctgaaaataaagtagcaaagtagatgagatatttttttctttattccaaaagtgttctcatcttattcgaaataagatggtcccactacctttgttttcttgacacaaccgatgaggacaataccacttatgttcttagacagaaagtcacggtaccttgtcgtagtgggaggttttcaaggaactcaccctgttatgatttccaagacacttgagataaaatccattgttagtttaaacaagtaatggatagtcagactacaccaaatcagatatctagacttgccttagtgctannnnnnnnnnnnnnnngatggtgattactctggggtagagtagtgattttggag

SEQ ID NO: 145154 - DNA, 736 bp, Cannabis sativa
ttattccacctcgttgggcaaaaacaagtatttgatcacttttattgatgatttttatcgttatggcttcacttgattcaagaaaaatctacgctcttgataaagtcaaaatcttttgaaatgttcttgagaaacaattagaaagagttatcaaagttgttctttcagatcgtggaggagaatattatggtcgttattcaaaattttgactacacataaggccttttgctgaatattttccagaaaatggtgtagtttctcaatacactatgtcaagttcacctgagaaaaatggcgttgctgaaaggagaaatcgcactcccatggatatggtgagaagcatgttgagtagatcaaatcttctagagtttttatggggtgaagcacttatgactacaacttatattttaaatcgctttctcagtaaatctgttcccgaaacctcttttgagttgtggattgggagaaagtctagtttgaattattttatgtatggggttatctcgttgaagtaaggatttatgatcttaatttgaaaaattagatccgagaacagttcgttgttattttattggttatccaatgcactcaaaacgctatcgcttttactgtcctactcgtgatacacaaattgttgagtctcaaactactaatttctagaatttattgttgcttaaaatattactccaacatctcttgaaatgggggagtcatctaaaggaatttttattcctat

SEQ ID NO: 145155 - DNA, 640 bp, Cannabis sativa
tgaaatcatggactgggctgaggagactttagggaatttggatgatgatggaggcctaacaacatatccaataccattgcagcaaatccccccacaaagccccccctctaccagatgtggcaccaacagcccaagttaatgcatatatttggcatgttttggctctatattgttgatggtttggctctattttgctggcatgtgtctaatttttaatttgctttttgtttacagggtaatgatggttcaacaaggtctccagaggtggagatcactggttataaagaggttgaagaatctccaagagctagaagacttaggcagaggaggaggttgagattcagtgcccaatcacaaccagaaccccacactcaaccagattcccaccctgaaccagaaccccacactcaaccagaacccaacattgaacctgaaaccattctcccaacaccccaactagaacctgaaactgaaccccatccagaaattgaaacccaaccagattttaaaccccaccctgaaccagaagaatctacaagaggaaaaagagttaggcagaggaggaagcttaaggaaccccaatctcaaccagaaaccccaccaagagccaaaagactaagacagaggaggaactacaaat

SEQ ID NO: 145156 - DNA, 778 bp, Cannabis sativa
tggtgctatggtactagagtagcacatagtgtcactattatcccaagtagtaatgatcgttgttatatagaaaatgagtattgcagtgccttaccatggcaaatgaaaatttgttgtgaagggcttatctgccaaggaattctgagtgttggaaacagatgtatgaaattgccaggttgtcgcaaacttggtgaagaatgtgctcttttaaccccttgttgttacccaaaccgttgcagtggtactacttcccctggttcaaaatgtttggcccctagaacttcttcttcttctacttctacaccatcatcaatattgtcactacctcatgttgatgaataattatatatatgtataaatatgtatgtgtgttgtttgtttttgaattgtaataagaaagtacatgatctctagtagtaatatatatagactaggatatatatatatatatatatatgtcaaaccatgttatattataatgtggaaatataagatgtatgtattgtatcccaattggtactttcacatgaataataatatatatgcttgttcaatatatctctatatatgtatagattggtcgagtctaggcgaccaatattcagccctactatgtactagtttaatttctcctataaatacgactacctacttatattcacttacccattaaaacaagatttatcataatataatataatatatatgggagctaatacaataggtattgtaatttttacttatcaatagggatagtaatttatagccattgatttaa

SEQ ID NO: 145157 - DNA, 725 bp, Cannabis sativa
aaaccagtttccaaggcaccgtatagaatagctccagcagaacttaaagagctaaaggtacatttggaggggatgcatgacttaggtttacccaattaagtatatcaccctggggtgctctcgcgttgtttgtgaagaataaagatgggccacttcgtatatgtaaggctgagcataaaatccagaaaaccgaaaaaccgatcaagccgacctaccaaacaccactgaaaccgaaactgaaaaaaccgaaaaccgaaaaaactgacgacggttaaaatcgccattaaacggtcggtctttttttgggtactgaaccgaccattcaaaccgaaactgaccgaatcttatacatatatatatataactttcatatttaatttataatgcacactgcacagttataacatataatacactcagtacacataatataacaaaaaaaaacaaaactcattgaccagtccactctttttctcattaaatgaaaatgaattgtacattttcccaccctttcatccaaaaccaaaccagtacacataaataaataatgctattatcatctctttcattctttctttcttctttaattttattttcctgcaacttctattatcatcatgaaccatggttgctttgcttgttggattggactctattttctatctattgttttaatgtatttcatatgtttggttgtggaataatgtatttgatgtggacttata

SEQ ID NO: 145158 - DNA, 1093 bp, Cannabis sativa
taattcaatggctcatgattcagaatgtaataactccaatgatgaaagttatgagagttattggaacaatgaagaagggtcattagtagaatacaaggaagataatgaacctacaattgaagatcaagatccttttgaagtggtattaactcaaaatttggctacatcagattcttactcgataaataatgaatgtcgtgtcgtgaatgaaatgatagaagagtatgaattcatccatggtcaagaaatcattgaatatgaaatcacaagtaagggtatggatagctaagtggagagtgagcaacaagaagaagagtttagatgaaagtgtgaatactgtgacattggaggatgaggaagcacatgccatattgattcgacttcatcaatgatattaactaataaacaaccaatggatctatatatttcatcaacaccatattatatcctatacgagctacgaaagcttctccccaggctcatcatccaaaggcttatgttattggtgctagctttggttcaaactcatcgcttgccaagcttgaaggtaagtacaacaataattttaaagttgttttacatgacgcttattatgggcgtcaactgcttattgatgtggtgctcaggtaagttttctttcctttttctttaatatcacattgaggataatgtgtcactttagtttggggggtgacttaaacttttatttttagtttttggtttttaagttttatgtcttttattttttattttttattttttattattttgagttaatttgcttaatgtgagtcaatttgaaagtaggtaaatagcatggtttggaaagttcatttatttttcgaaaaaatctgtgttcttggtgatgttatactcttgacaaatttcaattttgtgctttaaaagaacatgaaatcatattaggtaattttctagtaattgaattgatttatgtatgctaaatttgacttatggaaagatgtttgaaaaattctaaaacttgtttgtttgctatttgagaagaaataataaattatgcatgactaggaaagtgatgtaggcattttttggatcgattgtgcctttcaagcca

SEQ ID NO: 145159 - DNA, 571 bp, Cannabis sativa
tagagtgcttgagacatttaaactattcagtatggattttttttttttgcaaatattgatacgggtgttaatccgaacccgaccacagcaaacccgccatacccgacccgaaatccgtcggacccgaccacccgaaaatcaggttcggttacacattttagacacccgacatccgaaaacccgaacccaaacacccaaaacccaaaaatccgactcgtgtgcagccctagttgtcattccaggtctcgctggtgggtgaactcgtggagataaacgtgtacttggatcaagattcattacaattagatctatctaatcagtgggagcctgcacattgggatccgtcaccattgaattaatttgttcagtggattgagatatgcttgtcaaaaccatcgttcgagaatcaaagttttgtgacagtcgtgctcaattgctctcaatttaagtactaaaatgtcgactttacttttagccaatgacactaaggtggcgtttggttggaggtaatgaaaaggaatggaaaggaaagaaaataatcttcattctattcctttgtttggttgcatat

SEQ ID NO: 145160 - DNA, 511 bp, Cannabis sativa
  modified_base (212)..(216): a, c, t, g, unknown or other
acataaacacttagaatttcaaattcaatgtttatgaataattgttaagttttaaacaattattaagattttgtttaataaaaagatcttttgattgataggggcggaagaagttaaaaagtaatatatgtagttcaacaatcttttatatttattgaactccaaatcatattcataactccacatgatctctataacacttaggggttgannnnnctattaacatatgtagttcattttgaactctagactatgctcaatacaccacagtatctctatagcacacatatttgattaaacatggatgtaatataacgagcaaattagcaaatttactagagcttattcttgatcctatattttgttctgattactgttgtaatagaaattgataataccacatgaacacttagaatttcaaattcaatgtttatgaataattattaattcttaaacaattattaagattttgtttaataaaaagatcttttgatctgataggggtggaaga

SEQ ID NO: 145161 - DNA, 592 bp, Cannabis sativa
acggaaagtctcgtgctggatggatgccctaatcacataatgaaaccgggtaaatcacatgattaaaatcctaatccgagaaatccgaacccacaaccctaggttcgattatactctctatggattactctaactcaggaaatagggacccaactacgacactgaaaaggacgggaattgagaaaatggagcattcgggaaccctgccaaaaccggctagccggtttactccagttcaaacccaatattttcatttcttgctcaatcgtccaccaaatgcaaccatactttccagaacacctatacaatgcatatacaacataatccaaccagaatttctcagaaaaaactcaatataaacaaacatgccattagagatcaaagttaagatttctatgctctaacttgcaccaaaatctaaaccaaacattagtatcagctgctagaaactaaattcaactcaaatgaaccctataattcgaaccacataaaaactaaaccctaacgacccctaatttccaaaatcacctaatcaaaccaaagtaaaagcttcaaaaacacaagtctatggattctagggttaccttagctt

SEQ ID NO: 145162 - DNA, 561 bp, Cannabis sativa
  modified_base (406)..(406): a, c, t, g, unknown or other
  modified_base (536)..(536): a, c, t, g, unknown or other
tacaacaaccaaaaactctacaaatgggactcaactaattcctgtcagtattagaaatttttttagcagaaaaattagtaattctattacatacatcatgcttaatttcttttcaaaaagcttcattaatgaaacacccaaatcaatattgacaactttctaacctattcaaattaggttttctttatttacaatatccgaagatttaattctcccattttcttctggcctacaaatttctttccaagctacactgttgcaagccatcaaagtgtgctttttccttccaaaaagaacgctctacaaatgtcattataataagtccgcatgagaaccatcttaggaatcacttttatccagcacaatttgttactgcgcaggtaaaagtaactttcaccaacgcatntcgcaaactgcgctggtaaaaaggtcaaagttttaccgacacacatctgcagtgactaaaatctaacatttattaacgcatttacgcgctggaaaaaattatttttgccaacacttttcattttatgctngcaaaagttctaataccaacattga

SEQ ID NO: 145163 - DNA, 817 bp, Cannabis sativa
  modified_base (136)..(143): a, c, t, g, unknown or other
  modified_base (326)..(350): a, c, t, g, unknown or other
  modified_base (748)..(748): a, c, t, g, unknown or other
attgggtaaaatcaggggcaacagatatatatatttatatatatgagtgcactcttaatgggttttacccatgaatgggtaatattagaaatttttgagattttatgattaataatttttctatttaattagaaannnnnnnnatttttacattatataggttgggattggtccatcagctgaaaaaaaataataaaaaaagtttttcagcaaaaaagtgataaaaaaagttgaatttgacttaaatatttttcctataaatatatttttgatatagtgtaaaaagagatatttttttgacattttctttaattaagtagctaaannnnnnnnnnnnnnnnnnnnnnnnnttttattattcgctatcggaccaaaatctaatagttcaatagttttaaaattaatatttatagttaaatttgtttattacccattaatgagtaatgcccattaaaaagtatttcatatatatataatcgtattggatgtattagatgattaattcttttccattgatgaatgaatttaaggtttaatagtttttaattagaataattttttttttaagattttaacattcaatttggtgagtgcacttaataaatttttttttgaagatacctatttcagtcattttacaaaaggttgactatgtaattataatttgatggtgtagttacaattttgagaaattttatttacacgcaaaaaatttctaaagagacctcattttaataatttttatttnatataaaatttatatctttaattgaactaagttttttttaactttattcttccaattcatattcttaaa

SEQ ID NO: 145164 - DNA, 758 bp, Cannabis sativa
  modified_base (368)..(370): a, c, t, g, unknown or other
tcaagaatcgctctttattccaaacttaatcacaagtacgatggtggtgcagactcctaggggcgtggttgatccagcaaatcgacatgcggtggatcctgcactgcagaacaaagggaacacaagggttccaccagccgtaaatcccggataaccatcaactgcgggtcacgttgtgatgactcctatagatgaaatcgcgcctggtgtacaagaactgggaatacaagttcagcagctcaccaggggattcatagctaagtcgttccgcctgctatcaatgttcaaacaactcttggagtgacactgagatccagaacctccatgctgctcttggacacatgcagggtcataccaacaccctacannntgatcaggaggaactccgtgctgtagtaaacctcacatttgaagagcaaaggcgcatgatttccgaatggaaggacaaagagatggaagcgttaagggctcagcatgcagtcactgacaatcgtagtcggcaagccactgtgttgatatgaaaagcctatcaaattttcgggcatcaacccgcgaatgtcattccttggggcaaaacagacaaagatccagcgatgaatacctctcacactataaatggtcagccgccaaatccccgatcacaggttccgcctatgggcagaccctttctagtaattcatcaggagaagtcatacccaacaattccaaccaggttaatggtgtcggtcaacacagcctcagaatcatcacacttgacc

SEQ ID NO: 145165 - DNA, 1002 bp, Cannabis sativa
  modified_base (27)..(45): a, c, t, g, unknown or other
tctttattagtaagtaaatctgattannnnnnnnnnnnnnnnnnntagggcacaaaacccaacagcatcatcctatggctgcacaggagatttaagctcaaatgtccgtcgctcgaagagggtggactagaacgaagacgaggatgattctcgtgcaagagttgaagcaaatcctggttgatttggtgttcgcttccccaaaactcacctgggttcatctacaaaaattaaagaataaaaatattcaacgaaaagtcaaactcaggaagtttgaaatttttgtgagttagggcaaaaatattcatgaagcttagaataagcaagatggaagacaggcattatgcagttcaaaaaaccagcattatgaacgatgaagtcgcatgaatcgttacaaaggaaaatcgcagagtttctaaactttgggtttccaacatatcttctacagcgaagttaaagttgcattaagaaaataaatgtgcacaataaacgtaaaagaaatcgagaacttactcaaggatcgaacgtctggattaaggttacgccaagctaaatgagcagtttttgtgaaaacacttcagcaaacttgaagctaaaaacctctcttttcgctctgaacttacttagcaaagaaggttggtgaaaatgactttgtgaacaaatgctcactggtatttataggcgaacaacgaaaaggggtaatcatttcaaaaaacctcagactcctcggttccccccaaaagtgaatatgggaaatcaaaagcaatcaagtgtaaccattagacgtgttgagagaaaatcggatatcgaaaatataaattgcgtcagatcatttattagccgaaaactgaagggatgcccagttagcctcacatcaaatcgcgaacaaacgctcctgacacttgtcacccattcaaacgcaaagacagctcggatgaagtctacacgtaacctcggaagtcccgtacagacttgggggaacatgttatcccaatttctgcactc

SEQ ID NO: 145166 - DNA, 657 bp, Cannabis sativa
  modified_base (358)..(387): a, c, t, g, unknown or other
cttctctaaatttcttacagctctataaacttataatattttattagttgccgaaaacctcggtcaacaaacttaaatattaattttcttccttaattaaatatatatagataattcataaattaattacttattttctaattaaaatataatatagtttagtctatttattttaaagaaatcatcaatgaaaattttacttgattcaagttgatctaacattaattaataaattaattttcaacttaatctaattttcaaaatagaaattttttgaaatatctacattaaaaaaatgtaattcgaaaaatttaaggaaatgatttttaaaataaaaaaaatatattctaaaaattannnnnnnnnnnnnnnnnnnnnnnnnnnnnnatttctaacttaaatataatttttgatttaagtaaattcattaaaatagaaataattaagtatctagaataaaatcaacttaattattaattctaatttaatatcaaaaaaaatatttttatttaagttggtccagcattaattaaattaatttttaacttaaatatattttctaatttaatttaatttcatgaaatagatacaaataattaagtatttagaataaaatcaacttaattattaattctatttaagttttaagaaaaatat

SEQ ID NO: 145167 - DNA, 1549 bp, Cannabis sativa
ttaataattaaaacttacagctttttcatcatgtatataacggttaggatcttggacaatttgctagtgaaattcctcatcacgtcctaagataagcatttgatgcccctataatcttatatgctctattttaaaaattatattaatatttcaattcattaacataaatatatataacatagttaattaaaagatttattacatgaagagtgattaaattcttacatttccaatatagcattaatttatgggaaactttgtggccatgtatagggtctaaatagataattttccctggcgcaacaatctctagcatcgaacgcgcataaaaattatattgggatatacgtaagatagtaaaaaataatttcatgttataatatagaaaataattctaaattatctcttaaatagtgtttgcctgatattccatggaataaagaacatttggtgttagttactcatcaatgataaccaatgagccaatccttggatgcattctcaaaagactcttccttctctaaatcgttgataccatcactgcgagaagctctaggtcataaaacttgaaaattcgtctcaaatcatttaagctctcccagatgtgtctgcattaaattattagatattagtgttttataataatttcagtagaatttgatatataaggttaattaaattaaagaagagtatacatcattcctccaaaaagcattccttaaggggttgctgccgatgaagtcacacaacgccacctattgtaaatcttatctagatatcgtgatctgggtacgaggtgctatgaatctacgggtacccgaagtgggatcatctcatgtttatccttgacttttaaaagttctttaaccatttatttaagtgacttggagattggtgccatgatctctggtgtgaataatagatctgcttgatcacaaccgccttttcaacaaggcatgggacattttccctttgacacatcacatcttgatggtggttgagctagtggaccctatacagaataccatataatatatcaaatttgatcctaataattttaccaaatttttggcagcataacggctgtattgaacgctcccaaaaattttaaacatgcctaataataaacaaaatagataaaacaattgattattcatccatccgaccgcagcacatgtattcacagaacctacttcactatggttgaatatttaagatattcaaactctaataatcattgataattaatttataacaaaccattacctcaggtgttacaattaggtatttaggccaagaaaggaatatgtttgctacttccttaacgtatatgcacccctcaattgagattgagatttcagcatcctcttgtagcatttttgaaatgagaacccgggcatgtgaatcatcatagggcttagtgtgaactgttatttgaccctcatgttgttgctataattttaaacactacgcaagtatacgcaatcaagtagtaaatctcacacaggtgaggtcgatcccacagggaattggattaagtaccactaaa

SEQ ID NO: 145168 - DNA, 563 bp, Cannabis sativa
gaaaaataattccaagtttaaagaccgcatggtcggtcatgatgtcttagaaaaggccctgaggcctaataagatatatcaaataaaaagagaaaaagaggagtgtttaaacggctggagtcctaggttcttggttcggttcttctgggccaaccggagcaggtgcatcagtgatctgaccggaggttgaagcagccacctcagtttcgccataagccacttgggacgcacattactcaaggtacatgtccttagcgtcacccaagtagtcaaaattggcacgaggattagcgttccaaaaatcaaagaagagctcgagatcggctgtctccaaggcattgaccttctccttcaacctatccacttcggctgaaagctccccgtccttggcttccttttcatccttcatccgatgaagaactgctcgaagaaagtcctctcgtcatgaagattgttcacctcagcacataagtgttgcgttttgtgccctaaataaaacccattttcaatataatcagatttaattattaataaagatcggaaataacattttatgttgcatg

SEQ ID NO: 145169 - DNA, 1562 bp, Cannabis sativa
  modified_base (32)..(35): a, c, t, g, unknown or other
aataaaatatattacattgaaatggagttttnnnnagggcataaaacctaacagtttgagggtgatatgttatgtcaaactgccccagttcgattgaccatttatcaatcttcttgaagcgtcttgttttgatgaaacttgtctcaagggttgatcagttaacacttttattcggtgtgcctggaagtaaggtcgtaacttgcgagaagtgcggatatggcataaagcatgtttttcaagagggggatacctcgactctgctcccaataaccttttactgacatagtaaatcggttgctggtgctttcccccttctcgcactatagctgcactaatcgcatcttctgagatagccagatagaggagtaacgtttctccagttatttgttttgccaaaactggaggtgtcgctaaatgccttttgacgttctgaaaggcctcctcacactcttctgtccactcgaatttcttgttgcctcgcaatacattgaacaatggcaaacacttatcagttgacttcgaaatgaatttgttaagtgcagccatccttcctgtctaggcttgtacttccttaggctttgttagtgatggcatatctatcaatgccttgactttttcagggtttgcttcaatgcccttcgcgctgactatgaatcccagaaattttttagaggaaactccaaagcaacactttttcgggtttagcttcatattgtagttctttaatatttcatagcattctacgaggttcgtggtatgattcacacttttcactgactttaccaacatatcatcgacgtaaacctccatgttttgtctgatctagtttgcaaacatctcgttcaccaatcgctgatatgttgccccagaattcatcaggccaaatggcatgaccttgtaacagtaaagtcccatgttggttacgaaacttgtatgttcctaatctgggacaagcatttttatttggttatatccagaatatgcatccatgagtgacataagctcgtgcccagcagttgcatccaccaaattgtcaatcttgggtagtggcaagtagtcttttgggcacgccttattcaaatcagagaagtcaatacaagttctccaagtatcgttaggttttgggacaagaacaggattggctatcaatgagggatagaacacctcgcgtataaagtgattgactaacaacttatccacttcctatttgagtgccctttgcctctcggaatccaagggtctcctattctgcctctttgctgggtagtttggattggcatttaaatgatggaaggtaatactagggtcaatccctatcatatctccatggttccaggcgaactaatcctggttcgcccttaagaaacttattagctgctatttcaactactcgtccattttcttcccaatgtaaacacactttgtgggatttcctgggtcgagaaaaacctcttgcaattcttcaattggttttaataaatttctttcatcttgaatccgatgatcaagatcttcatccttcttttaactttcttctgccaagatcgccattaactggtgac

SEQ ID NO: 145170 - DNA, 794 bp, Cannabis sativa
ttaccccccaagccttgtttggtgggaagtaaatgaggcttgcttaggtgcctccggttgtcttattaactttctggcaagtgctttaggcgcgtggggatgcatttataaccatcatcactgcagttttttgctttttgcaggtaacgattcgtttcctatctatttaatgatacggcgcattaaatgggtgtcagtcgggtactcaaacatttcctaccgccttgatgaacgcttgtcccaaccgttggatctgtagaatgcgaatcgattgctattctgaccgtacgatgatgctcgatcacagctgtctcatacccgttctggcctataaaaaccagccttctcatttcatttggttactttcaccattttaccgaattttctcagagtttccacagagagaaaaaattccagacaccatagattatttgctccttttccttcgtcgttgctagtcttctctttatcgacgatcaacaccaacccccagtgttcaaacttcatgtaagttctcaggacgctttatacttgtatatcgtttgtttgtattccgtgtttaagatttctgggttgaatgttgaacttctgggaaatgattttgcctgaatttgctgtacaatgcatagaatctctcttttttgtgccttggttgtttctttttactacaccttcttttgggaattgcctttttctgtcataataacacctttagggcttagagtgattcgtgtttttctcagctttttcttctttcccctttcctctttctttttgcaatgtcactgcctttg

SEQ ID NO: 145171 - DNA, 856 bp, Cannabis sativa
tatttgtatcaattataattacatgttaagttagttatatctttttattatttttctccttattttttttttcattttttttagtatttgagttttacaaaagttattaattagatcatctattttattaaataataaaatatttcttgtatttttcaaaatagtacaaataagaccatgagtttgtgatttttttttaatataaccaacttgaagataattttcagcacgaatagatgcagaaaatataatcggttttgtcataacacctctagatagaattattattaagtttaattttaacaaaaaaattaattcagaatcttatttatattattttagaaaatacactgtctatttaattatttaacaaaacaaaagattcaatcaataacttttgtaaaatacagaatctaaaatggtatttaccgtatttttttatgctttatatttttttttattcttttttttttctttcatatgagttaatatatgaaattattatatgaaaaatacaaattgacactttattttaaaaaatacatctataaggtgtggacaacatttataccttttatgtgcttttaattacaaaaataactcttacactatcacttactgtgtataccacctattaactttttttttcaaagaattcaaaatagcccctgttttgattgattttggtcatcttcttaagtgaagtcgccagaattaatgatggttctctttctggttggatttcatttcgattgtgttgggttgctggatggttgaccgaaggttgaatcagacaaaggtttcaatctctgaaagcatggatcatgggttgaaggtgtgtgtaaaaggtatttgt

SEQ ID NO: 145172 - DNA, 533 bp, Cannabis sativa
gtgaagccctaatccacgatctcccctaccttccatagctgcatttcttttttcctcttacagttaattttcttcttctataaatggccaccactagatctggttccatgtccctttcacctactaaaaaaatttcaaaaaatactaagaaacctccttcaaagtcctctaaagttgatcctaaaatgggtttgaaagacattgcgaagaaggaaatgagtgatgctgcagagccatttggctctagaaaaagaccttttccagctaagattgaatctctaaggcaaagagaaccaaatcttcgaaatctgtcaaggatgtaagttgggttctgttgttttttgatttttttatttttagtttttttcttgttttgtttttcgtttgctgttttgtgtttcgatttttttcccataatgttttatgttctcttcgattctgacttcgaggatgaagttcttgttttggaagtgaagcctaaagttaaacccaagggttgtttaccttgaattttttcatttttttaagttgaa

SEQ ID NO: 145173 - DNA, 551 bp, Cannabis sativa
tttttttttttttgttttaattagttataggttcattataattaagcaaacttaaatgaagttaatgattttgatttaattattgtttattacaggtaattatgtgaatgagagaaaactaatggaccctgttagtggaatggagtatgtaccaacttatgaggacaaagatggtgattggatgcttgttggagatgttccatggaagtaagtcatcacaaaaattatatattatatatatttatatcatgtgtatatatatatatatataggaatgtgttactaattaattttaattttttttttctgagcagaatgtttgttgactcatgcaaacgactaaggttgatgaaaagctcagaagcaattggtctaaggtagaataatataatcttttatttatatatttaatttctagacaatttttacatatttgtaaatatttattacaaaaaatacataataataataataattaattttaatataaatgcaaaaaaaaaaaaaaaaaatttaaaaaatcataatctaaaaagaataaaaactttaaa

SEQ ID NO: 145174 - DNA, 620 bp, Cannabis sativa
  modified_base (319)..(321): a, c, t, g, unknown or other
caggcggggatctctactaatccattaaccgtagggggcaagttatgggatgacttacaaggtcatccagtaagaagcatcattgagttcaacaaaaaagcttaggtattcgttcggaaggaagacgcctgaaaggaaatgaacttgttgaaaacaagctcgagaagcaaacccagtaatgtttcaacaagtactgtttccatgagaattgataacttgggggcttctggttcgaagagaaaggacggtactaaggaattgtcgaaggataaaaagaaacagaagaagcatgacaagtacgtgccagtgtatactattnnnaccgagcttaatgaaactcgggagaatatttacttcgcacatgagcagaaggttgcctttggcaagtccgagcccatggggaattggaggagcaaaagagatcctaacaagtattgtaaattccataaggatattgggcatacgaccgaagaatgccactgaaatgcattttgtgtcatatagtaaatttcatacttttgaatttccagtgcccggtaacatggaactcgatgtttggctcagtaaaataacaacttagtatgttagtattgtgggacgatttattagacattgggaat

SEQ ID NO: 145175 - DNA, 2083 bp, Cannabis sativa
  modified_base (1388)..(1391): a, c, t, g, unknown or other
  modified_base (2006)..(2006): a, c, t, g, unknown or other
tcaacattttggtgctttccttgagagtagactcaaggatcgctcttcattctaaatttaatcacaagtacgatggtggtacagactcgtaggggcgtagtatatccgaaaaatccacaggcggtggatcctgcactgcagaaccggtgaaacacaagggttctgccagctgttaatcctgaacagccttcaaccgcgagtgacggtgtgacgactcctatggatgaatttacgcctagtgtgtaagagactaggaataccagttcagcagctgaccagggcaatcataacacagtcattccacccgccaccaatgttcagacaaccattagagatgacactgagatccgaaacctccgtgctgctcttggcctcatgcagggtcatcacaacaccgtacatcatgatcaggaggaactccgtgctgcgttaaatctcgcgttcgaagagcagaggcgcgtgtttaccgaatggagggataaagagatggaagcgttgagggctcatcatgcaaagattgacaatcatagttggcaagacactgtgctgatacggagagcctatcaatctttcgggcaaaaaccccctgaatgttaatcccccaggtgaaacagacgaaatttcagcgatgaatacctctcagactataaatggtcagccgctaaatctccggtcacaggttccgcctgtgggccaagtagtaggtgggcagaccttgtctagtaattcatcgggagaagtcatgcctggcaattccaaccaggttaatggtgccggtaagcacattaaccaactaaccaatcactgagacaggcaggcacttctgtattcaaaaggttgggaatgactcatgatctcagaaacgatctgaataggaggagaggagtagacgatcaacttgacacgccgatcgtgcagcccggaacccgtgctctaattcccgctcagaaagatactgacgtaactcaagtcggccaaaatgtcaaacaggttagtccaactgtgcaggcgcagttggacgaactaaagaatatgttccaaggcatggccagtcagaggaacaatgatcttgagttggaccgagcacgtggaacccctttctcttccgaaattaatctctcggtgttgccccacaagtttaaaatgccaacctggaagatgtacattggaaaagaagatcctctttcccacctcaagaatttcgagatgcaaatggatctgcaagggcaaatggatcctcttttcctgccaccctctcggaagccgcctagcaatggtacttcaagctggcacctagaaagttcaactcatggaaagctttctcctcggagttccatgcgaaattctcctcctctcgccaacttccgttgcacctgggagacctggtnnnngtcaagcaaagaccaggcgagcctctctgagcatacatcgacagattcatgacggaggcaactaaggtttcacgggtaactgaagatggaaagttgtccgcaatacgggggggcattgaagtcctcggtgagctctggagagacataaggaaaaacggtccagtagactcaatgagcgatgttcttgaccatgttgaaggcttcatcaaacttgaagaagctattcagcgagtatgagcaaaaacctggcaagccaaaagctccttctgttgggacatctgcccaactctcccattacctttataattcaagctcaaatggtaaacattccggccacaacaataggtaagggaatgggaaaaagggaaagtttaccggtaaaaccgaacaagcttcccgggagaatcaagccaagtacactactgcattcaacatcttgactaaggatatagaaagtgtttacatggccactcagtcactagccccgtacaagaagcccgcgcccatgaaaaaagatgtcagcaaaaaagagacatgaacaagttttgtcaatttcatggagaaataacctgcatttacagtattatgtgttggagtttattttaccaggatctnagatatactcacaagtatgttgaacaacatcctaaatatgaactttctaaaacgacaataaacacatataaagttta

SEQ ID NO: 145176 - DNA, 828 bp, Cannabis sativa
aactaactgttattattgtttacaatgagcatacgtatagaaagctatatatttgggttgaaatttttggcataacacaacatcagtataagtatgacatgacataataaaaatatataaacttaagtttgatacgataagaaaaatatgaatttgggcacaattaggtaaaaatgtaagctttagcataaacaaacatacatgaaagcattggaactacaaagagagagaagccattgtagtggcagcttgggccctgttacaaaaccgataaatgatgtgatgtggggcaaagataacctcttttgtattgtctgaagcaaaggccatacatactactggaggactaccaaatatgaccgaagtcaatatacacaaaatttattaaatattttgttctttccccaacataaagacaaataagctcgtacaaaatttcctagtctatctcacgactttctgtgcggggcccattgggccagttcagctcagcatgccataaggccattgggccattgggtcgctcaccttccctttctctttacttacatttacttacatttctcttctcggcccaagatgcaaaatagccttaaatctaacaattaagttaataaatatctattttttaaaaaaattaacaaaatatccttttagttaaaaatttgatgataaaattataattataaccttaaataattaagtgtttggtatagtttttttgcacagtaatatatcatttttatgtgtaataatatattaaaaaaaactgaaaggtagtatatatatattttgaaataactaaaaggtagtatatatatatatttt

SEQ ID NO: 145177 - DNA, 661 bp, Cannabis sativa
  modified_base (543)..(551): a, c, t, g, unknown or other
tatacgctaagtgttttaatagtcgacatgtctcctctacatctcttcatatgtagcgaggttggtgtctcgctttgtaatactaatgttgtccttatgatcatgtctttatatacgaaatggtttctcatcaatatgtgtattaatagtttgtacatccgtgtctcgcttaagaatttacagtcaacgagtaatagatatactctatgaacaccgaatttaatgagttattccattttaatatcttctaatataattaccattatattagtcgatttgtattctcctaggttgacacgtgtcctcctctaaagtgccaaccgaattttgggtataacaatatttaagctagaaaattttcaacttctgatcaacttaaattagaataatttttagaatatattttattttattttaataatcttttcgcacttaaattttgaattgcatgtattttaaatttagatattttgaaaatttttaattttgaaaattatattaaagttgaaaattaattaaccaacttaaatcaagtaattttcnnnnnnnnnttaattaaaataaatagactaaaatagattataatttaataagaaaatcagtaattagtttatgaattatctagatagatattttttcggtagacttttggtatttttct

SEQ ID NO: 145178 - DNA, 569 bp, Cannabis sativa
ttggtcacttgttcaaagtaagacgaatacaaagcaataataaattctcactttcttgatttgaaaagcaaacaagtttgttaagttgttgattggtgagtcactcaagtcatgttcatgagtactgaggctcttctttagttacttatattatatatacacacacatatataaatatatatagcatctcatttttttagaagaagaacaatttcagaatcaatatttcaagatatttcagtgtctaagcagtttcagaatcaatattcaaaaaatttaaaatggggttttaattagtgaactacattagaaccaatgatcaaacaatggaaagggtaagaggaaattaatgactactggtggaggcacaaactttaaaaaaaaaaatcagaggatataaaatggataattaaatttaagaatatagagatttaagaaaatgaaatttacctaactttgatattgcaaaaagaatgatgcacaggtacaaaatcgtcggtggtgatgttggaacgaaggtaggaagggcgacgaaggaggagggctgaaatcgtagggtgcaaggggct

SEQ ID NO: 145179 - DNA, 649 bp, Cannabis sativa
catggaatgagcctaccagattcaaggcaaggttagttgccaaggggttcactcagaaagaaggcatcgattataatgagattttctctccagtacttaagcaagcttcaatcagagccatgatggcaaaggcagcaagcatggacctagagattgaacagatggatgtaagaataaatttcttacatggtgagttagaagaggaaatctgtatgcaacagcctgagagctttgacaatgtgaacccaaatgaggtatgattactcaagaagtctctttatggccttaagcaagcacctaggcaatggaacttgaggtttaacacttacatgcaaaatattggatacactaaaagcaagtatgactcatgtttgtatttcaataatcaaacctatttgctactctatgttgatgatatactgatctttagcaacacaaagttagagattgacaagttgaaaatgaaacttagtgatgagcttgagatgaaagatctgggcaaagcaaagaaaattcttgggataggcataaagagacctaagcgtggcttgataatactttctcaagctgcctacctacagaaagtattgaacaagtttggcatggtcaagtgcaaaccagttacaacaccacttgctcaacacttcaa

SEQ ID NO: 145180 - DNA, 1053 bp, Cannabis sativa
gatattgacttagaaagaaatataatagtaagtttatgtgatgtcttatccaatgtcaatatcggtccagtccgatgtttactccatacatccgatactagcatactttgccaatacactaaaaaaggacataccatttatccaaggtgtaagtaaactttattgctaattatcatgtcagtgtaaatctagtgtacttacaaattatgggacttaaactttgaaacatataattatgattatatttcattgtgtagataacactataatcatgagcaactacatgttctggatttaatagaatttatacattaatcatataatcatgaaagtaatcatgtgaaccatgcaacataaaatagtttctgatcttttattaattagcaaatctgattatgtaaaaatgagtttttttagggcataaaatcccaacaaactcccaattacactaatataaaactaaaagtgtatttcaattaatcttaactgtccaaatcaagtgtagtatgcaatattttctttgtaataagatctgacaggttgtattcaatataaactttctccaccatcacatctccttagtcacaaaatctttgatattgtgaaattcttttctatatgtctactcctcttgattctttactatttggaaactatgtctgtgttatcaggaagtaacactattagttaatccattaatggaataacaccaaaaattgtatagaacttctcataggctgaataattatctagtagccttctgggccactttaacattcaatctcagtggtagaattagagactttagataggtttttacacttctttaaaaatcactgctccactctcagagtaattaccatctcataagtagacttactagcattagcgcaagtctagcaacctggtttggtgtagcctaagagtattaaaataccaaccttatcgaataacatatttgtcctcctttaattttaagatttacttgattgtcttccaatattcctttcttggattaaactaatacatacttataactctcactcaacagca

SEQ ID NO: 145181 - DNA, 693 bp, Cannabis sativa
  modified_base (619)..(621): a, c, t, g, unknown or other
gtaatctttaaaaataaaatacattcacaatcttaaaaagaccaaaatcttaaatgaaactagcaatacgtggatcggcacgtacattcacctagtatgtattatataaataatgagatggcgcgcttattcatattaaaaatcttttttaaaataagagatataaagttgtaacataacaatttaaaatttctttaaataatattatttttttattaattttcttttttaaaatttttattagattcataaaaattattgattaattaattaaaaaatatttaatactttaaatatcctataattttctatttttttattttttttttaaatttaagattaaaaataaataaataaaatcattattatatatattttttttccatataactcaactataaaaaatatcaatcactctactcatatttttttctcatttttctcattttttttttccatttttcatcagtattagttttaaaatatatatctattctatataaaatgtgactatataaccgaattcttagtttatgagaaattacactactacaaatataagaattcgcaacggccctaaaaacaatttttttttcggggaccgtcgctaaaaaaattnnntaactatttaaaaccgtcgggaaaaatttagtattcccgacggtttaaaatcatagtaaacaaaataggcga

SEQ ID NO: 145182 - DNA, 961 bp, Cannabis sativa
aacctgtcaactatgacccacacaaagtcatactgtcatgtagtcctaggtaatccaactacgaagtccatggcgatgtcttcccatttccattactaaaggttcaatggctgcagcaaccctgcaggcctttgatgttcagctttcacttgctgacaggttaagcatttagcaacatactctgctatatcgttcttcattcacggccaatagaacatggtcttaagatcttgatacatcttcgttgccctcgtatgaacagagtagggagtcgggtgagactcagtcagaatttccctcttaatatcatcatccataagaacacagacacagttcataaacagtaacatcccgttactatccactgtaaaatcacttgtcttcccagctaaaaccctatctcgggatttcactaagtttggatcttgtgattacgcttctttaattccttgtagaagagtagattgcagggtaatcttagccaactgtcccacaacaaactcaatgttagctcgggtcatttcctctgctagttacttgaatatctgcttcattgtattcatctggttctgaccttcccatgatgatacagaatttcatagtcataatcctttatcatctcaagccaacgcctttgtctaatgtccaggtctttctgagtgaagtagtattttatacttttatgatcagtgtaaatctcacatttctcaccatataagtaatgttgccaaatctttagcacaaatactactgttgtgagctctagatcgtgagtaggatatctctgctcgtactattttaactatcgagaagcataagttataacctttctagtttgcataaaaacacagcctagaccttgtctcgacgaatcacaataaacaacaaacttttccttatcagaaggaagagttagcactggagcggtaattaagcgctgctttaactccaaaaaactttt

SEQ ID NO: 145183 - DNA, 669 bp, Cannabis sativa
tctaaccatgttgtttttgttctgtgcagacatgtctcataagattcttgatgctctgaagaagagaattggcagaagctctagcgcatctcgtccaaccaagaagtgtagaggcggtgaggggacctcttctaaggaaaagacgcctgctggggaggttattgatctttctgaggatctaatggttggaaacccctctactccaaaagtttctaagtttaaggactctcaaagagggagttcggacgggcctgaacaactgaaaggtgggtctgagttgatcaagagtggacccgagcagatgcagacccctactccacctttgctggtgcttctagaggccaagaaaggcaaggagatgcttgcccactatatgaaccggttggttcctgaggttagtgagcaattggcgggtgctgacaatgacacttctctagagctgctgatgggtggagtcttgaaggaattcacaagggtaagtctttcttgaaaatttcctttaatcctctttacttggctcaaatactaaagttttttctctgtgtaggccagtgtgaagtttgcctacacatactcctgggctaagtctgctgcttctaagaacgcggctctgtccaacaccatgagggcgaaggtggacttggctaggaaggacgctgatgacgccag

SEQ ID NO: 145184 - DNA, 925 bp, Cannabis sativa
aattttccttatttgttgggcttgtgttgagaaacatagtaagaagattcaatcttctccattttagcttgctttgctcagctacacactgagaaattaggttactaaaactccatattatgttataagtgttgaaggttgtcttgataaagctaaataaagaagaaagtgcatgaagagcacaacaaattatgtaagaatcaagaagagtaatataatgatctttcaacttggattgaatattcataatttgtagaataaaatctctcacttcttttaattcatcatacttaatggttgtgatttcatttataagatgtctagcttcagggttttcaccagtgtcatatagttttttacaacattaaaaatctctttgacatttgtagtgtttggtaagccactaaataaatatttgtgatttgaaatttttatagcaatgagactatgatgatttgacttttcccattgtgcatgaagagttttttgggcaacattgttggtatcaataagattatcaagttttttttttcttgaaggcttaagtccaaattcattatgcctaaagtaaattccacatctcgtttccatttccaatagttggagcatttagaatttggatggaaatgtttattgttgctcacaaaaaaggagaccgtaaactcaaaaattaaaacttgatcaagctatgagcaatgcaattagaaaatattgtagagtcaattagtcattataaacttccatttggggtgagaatataacacacacatgatctaccttcatgaagttaacaataaagaaaaatacatatcaattaagaacttattaccttgggccaataatttttataaaaaatatatatttcaacccaaaaaaataataaatatatatttaaattattatctttgaaaaataattaaaatat

SEQ ID NO: 145185 - DNA, 937 bp, Cannabis sativa
ttgtgttacaattgaagtcttaactaattaaattatcaatttttaatttaaatttacttagtgatgttgtaattatttttcaaaaataacctattactaatatttattatcaaatttaaaatgttatgctaccgaaaattcgagagcataacactttaaaattgagcattcccaaatttataacacctacaaaaaaaatcacaaacacaataccaaaacagtttacatgcatattaaattatacctattatcatatctatgatattaatgatgttctaattagtttttaaataaaaactattatcaaattgaaaatgttatgatactgaaaatttgacagtataacactttacaattgatcattcccaaatttataatacctacacaaaaatcacaaacacaataccaaaataatttacatacatattaattttggccacccatccgaccgcagtatatttttcacaaaacctactttactatggatgaatatataagatattcaaactctactaatatgcatttcaagtaaactttttttttttaatattataaataatataacataagcatactaaccttccaatataacgataagtgatttttgccaaacaccgaacaaaggaataccaaaaacctatttagcaaaaaaataaatattaactaaataaaattaaaagtattgtactatgtgtatatattatatatatgtaatatatatatttacatatacacatatatatacatatatatacgcacaaatatacttttacatacaattacatatacatatatacttttacatatacatatacatataccacatatttatacgtatacacatatatatatacaaatacacatatataaactattatacacatttgtatacacatatacacacaaatttataaaaatacacataaaactatataaa

SEQ ID NO: 145186 - DNA, 517 bp, Cannabis sativa
ccattttacccctagtttttgaaaatacctaagttttgacttaaagggcattttagtctttttaaatgggagattaggtggctgcctataggagtgacacctagcaaatttttcagctgagattaattcaattaatcttacttttccatttagaaaaaaaaaacatagacctctctttctctctttctctctttcggctggggcaaaaaccagggggaaatccattttcaagttgttgttttctgagttttcagcaaggaattcaaggggcaaatcaacctaaggtaaggcctaatgacctcttctctagttttaatgttttgagttagtttgaaatagtgaaattgtgatttaggagctgttagggttagggttgtttggagttgaattttatgtttaattgagttgttctgtgaaatactggctgaaatatattgtgtatgcccttattaggtactctggaatgtttcattgcatttggtggagaattgagcaacaaataaagggctttgggaaa

SEQ ID NO: 145187 - DNA, 659 bp, Cannabis sativa
tggtgatcatgtattctttggagacataaagttattttggaagagaaacctatctttaatctcacttgaataattttaaagatcacttgaattataattctattttgatgagatttgaagttatttaagacttcgtgtgtctttgtaaaagtaataattcaaatcttatagtgtatagaatcggataaaaaatatatttgagagaaatatattgcaacgaagatataatatggcgtgtattgtctttccatatttcttgtcacgtaattgatattggaaattatgttttatcattaactttggatctttctctcatcaaattgaatgtgccctcattttctttacttgtgagcacaaggtacaatacacattttagatttgacctttctatatgtgtattaatgtgtactttgtttagtaatagcatatatgttatattacatatatgtatacactgtttgttgaaatctttcctcatctttgatccagtataaagattataatggcacatgtatttttctcattttaagtctagtagtgacttttgagtataaatatatacagataatgtatatattatacattttaatgtaaaatcgtcagtaaaataattgacatgattagagttgggtttggtcgttggtcctttgtccagtacc

SEQ ID NO: 145188 - DNA, 995 bp, Cannabis sativa
tcaaacagcatgatggtgaaatcaaggtgttgacgaacgtaagacacatcccaaaccttagacgaaacctcatatccctgggtgcacttgaagacgaaggatatgaatacaagtccatgcatagaagcttgaggatcactaaaggttctttggtagtgatgaaaggtgagtgttatggtagatatgacggatcagatgaacaacgtccaagaccttttgccagatatctcgaggagtgtggaattgtcctatagtacgctatgccagaatctcctagcacttgcatgaatggtgttgctaaaagacaaaaccgtactcttaaagatatggtaaaacatataatcaattattcaaccttacaagaatcactctggggagaggcacttaagatagcaacctacattttgaatagggtaccaactaaagcagctacaaaaacactttatgagctttggacagggagaaaacctagtcttaagcacttttatgtttgggatgcctagctgaagctaggccttatagaccaaatgaaaagaagctagaacccaaaactgtgagcagctactttattggatattttgagcgatctaggagtttaaagttttatgatcccaaagtaaggaatatattttaaatgtgaactgcaaatttttttgaggatattgagtttgggaggaaaatattgttaaggactttatttttgaggaggatttggaatcaactactcttcttgaagatgaattgatttctattccaatagttgcttttaaaaatatttaggattccaatccggatattaatcaagttttagatcaagagcaacccaacatagtcaataaaatcccaaaactacaaactcaacaatctcaagaacaagtgcatttacgacgatccactagagaaagaagaaatactattaatctagatgaatacatagtgtatcttcaagaacatgaggatgacattggaatgatgaaagatgatccaatcaactt

SEQ ID NO: 145189 - DNA, 1452 bp, Cannabis sativa
acaaacaaaaaacaataccaaaaataaattagttatgtgtcgtttgttaacacttttattttctaatcttttaatcaaaaaatgaaagtaaaatttttatttttgaaaaacaaaaaggtaagattcaggttcgggtcagaggccgggttcagcgctaaggttgtgggaggggatttgggtccgggtttgatcggagcctaaaatattgattaagaaaaaaattgtttaaacaaatattgaaagtgattttttttttttatttttaaaattttgattttcaattaaaaaattgaaaagtgaaaacagatttataaaacatgtttttgaaaactattttcacttttccaattttaaaaacataaaactaattaaaaaaatgttaccagacgctacctcaactaatagtactttaaatttccttattttttatttgtttattattattatttcatttctttaaaaaaatattccctcaaaggtatgttaatatcttaaaataatctaatcaatttattcaacaaataaataacaaccacgtactcataggattttttttttttttttatcaatttattaaaatgatacaaatataaaaagaagagttagatattattaaatttaaaatattattaaatacatactcagtttaaaaacaaggtagtgcgtttcaaaaaaaaaaaaaaaataggatagtcaaattttaaatatttaaatattattatttatataatattaaaatactaggggtgaactaatgctaccatgacatttatagttttattctacaccttaactttttacaaccgttagatgcattatcaatgactcagaaaacatcctcaccatagggacattttggcgatccctactatagtcatctccataatatatatagtgttggttaaattaattaattagtcaatttttttattatataatattataaaaaataagtaattttaaattagtttttctcacgttgttaacgcaaatttttgttaatcaaaatttgagccaaacagtgataatttcacatagaaaaaatgaaagcaataaagtaagaggtatgagcacaagggattttttacgtggttttacagttaaaattctgcatagtccacgagttaatcttattagatttctgatagttttttagggcctctttcgtatgagttttttttgtcccctttttgatccaacctgccactatttataatcatatagtaggcagttaatttacaacgatcatcccctgaaatcatgggatctgattacatatcacgttaagtaaatacggtttttatgataatttcacacagctgtaaatatcacgcttttactgggtcaaaatgaacgtgtattaaatatattgtaggtcatatcatattagaatgtctcactgggaatagagaagagttaatgtaacgccctaatgctaaggcacgctacagt

SEQ ID NO: 145190 - DNA, 808 bp, Cannabis sativa
gctctcgtgtggtgggagttggtgtccctcacttgggacgtcattgttatgacctgggaagagttccgagagttattcaatgctaagtattacattgaagcagtccacagtactaagcagaaatagttcactgagttagttcaaactgaggggatgtcagttactaaatataccacaaagttcgaccatctggccaagcttgcctcgagtatcgtgccaatagatttcagtaaaaaagaaaagtacctggccggtttgaatgttaaaattaggcatgattttgtgatcactaccaatgaagcaacatcatatgcggaaatggttgagaaggccctgcgggccgagggtgcggtaaaattccttcaggagccccaagttactccgagtgttagtggaacccccactcttcctactcctacctatggtagtgatggtggtgattccacgactaatcagaagaggaaagttaccctagcatctggtggctcggggtagagcaagcgcatccgtgggaaccaaggcagaggtggacgttagggttactcttaccctaagtgcccacattgtaagaaacatcatctgggagagtgtaaccgaaagacatgctttaagtgtggcagggtagggaattttaagaaagattaccctcaaccaaggaaagaagagctaaagtcagaggcaaaacccatacctgctcgggtgtttgcaattagtcaagctgatgttgcagccagtccttctatggtgacaggtcagcttcctgtcaacaactccttttatactttgttatttgattcaggagctacac

SEQ ID NO: 145191 - DNA, 1149 bp, Cannabis sativa
attcgcacgatccaatccaatccaatccaatccgtaaagtgggaatatctatatttatgcggattggattagattagaaaattcaaaatctacacttgtgtagactgaatgttgattgatatcaggggcggagctatattgagctccacaggagccatgccccccctcccccttcatcttgcaaaataaattattgtatttttatattttatttgtgttgacttttcaaagtttttctttttcagatcaataatatatatgtataattactgtatatgtggagatcaatttcttaataaaaaacaaaaatacacttaataaaacaaatataaataactaatataaagagtctagtgtacaatatattctttgttttattgtatttctattaataaactttatttggcaaaattttttaattttacaccaaaaaatttatttgttgtactcttattgagtttaagaaatgttaatttttctaaattttgtagtatattagtaatattaggtgattttaaaattttatttgagctcaataattttctaatgcgatccattaatttctaaagtttataattttgatacacaatatataaaaaatcatatcattatattaatttactattcaatatatttaaatgatgtcgtattcatgtaaaattattttttcttaaaatttaaaattttattattatcacattatatattattggatcttaaattatattgatgataataatttttacttatttgatagttgcacgaaaaatgtaacattttatagagtaaatactattttgaaccttatgtatttcaaaagttaccgattaaaccacatgttttattaaataataaattgaaccctgtattttttaaaatggtacaaaatagtatcctaaacttatttttatgaaaataaaattgtgtatattttctgcattagttcgttctagaaattatattcaagttagttatattaaaaaaaagttattgaaattgagcttagggtactagtattttgtactattttagaaaatacaggatctaatttgtcattttacaaaacaaagaatttaatcggtaacttctataaaatacagagtccaaaataatatcaatcctattttatatggggactaaataatttaa

SEQ ID NO: 145192 - DNA, 645 bp, Cannabis sativa
cactaataaataatattaataataacaaatatttaggaaacaataatgaagacacatgtgaatatagtcgaccacgtagaaaaagggtagaagaacgataagtctcactaaactaattaataaattcaccaaattaataatgatagtatatatagcaaaacacaagagaataatatcattatcaatattgatagtataaatataaaattatacagctttttacgtgtaaattgcaaagaaaataaagactttatttcatgttaaatattgaaattgtattatatatatatggtgaaacatgtttttttatgtctttttgtttttgataacggatatattttctatttataactgtatatcataattatttaagactatttactctttttaataaatttttgattaacttttattgttgaaaataagtttcaaaaaataaaacctatgaaatagcagattataaaattgatttgtcacatagtttttgcattaacaatataagcacaaactttgtttgaaaaataaaatgatatatataagaatttatcggttgattattttgttcttatatttttctttttacttttttttttctttagaactttgtaatttgtttctggacaatttggttatagatttcagagc

SEQ ID NO: 145193 - DNA, 896 bp, Cannabis sativa
agcattctagtattaacattaatgtattctagtattaacattaatgtaaatagtattaacattaatgtaaaatacttgcttaagattaagtaatcactatagataccataaaatatttcataaggactaggaatttttgcttgagtcttttgaacagacattgcaaaatttcctatcttattctcataatactgatgagttatttctatccatatgaatggttagatttactttctttgttttaaattaaagtttctatcttgaacataacatagtagctatcactagtgtcatctaaataataatgggctggaattttaaaattctcccactaagataaggtactgtgatattatatccatggactttattggtatcaatttctattactacaataacatgttaattggaacacttataggatcaagaataagttctattagtttgctagttcgtttattatattatatccatgtctaatcaaaatatgtgtgccatagagatattgtggtgtattgagtatagtctagttgaactacatatatcaataacttgttccacccctaagtgttatagagattttgtagagtttcgaatataatctacagttcaatagatataaaagatctttgaaccgcatatattacttttaaacatcttccagccctatcagatcaaaatatctttttattaaacaaaatcttaataattgtttaagaaatgaccagtattcattgttaacgtagatttttgttaactaaattcgagcctcacagtagtgattccagacaggaaaaataaaagctattaaaataaaagtatgaacacagggttttttttacgtggttttgcagttaaaattctacatagtctacgagtcaatcttatttagattt

SEQ ID NO: 145194 - DNA, 1012 bp, Cannabis sativa
  modified_base (892)..(918): a, c, t, g, unknown or other
  modified_base (965)..(969): a, c, t, g, unknown or other
ttctctgttcttctcttcttctcttcccatctctgcatctgttgtgtcccagctgccatggcaagaggaggaggagctcagactcgaaatgcttccagttgtgacaacgattctggtaacaataatcgtttttccgcattagatcaagctactcgatatgacgatccacgaagcccttattatctatcgcacatagaccatcctagtgccatgctcgttgcaaaagttcttactggaagtgagaactatggatcttggaagagatcgatgatggtggccttagctgcaaggaacaaaatgaagttcgttgatggtagattgcctaaaccagatgaggaagacgaagaccacgaatcttggtgcagatttaacaattttatcatttcttggatattgaaagttgtatccagtgaaataggagacaacatcatgtaccatgataatgcttccaccatctggtctgaactgcaagaaagattcaattaaaagaaatgcccctcgtgtttttgaggctaaacgtgcaatgaatctccttaatcaagaatcgagtagtgtgacttcatactttaccaagttaaaaaccctatgggatttgattcaagaacatagaccgccacctgtttgtacttgtggggctatgaaagtgatacagcagtaccaagaagaagacaaagtccttgaatttcttgttggtttaaatgaatcctacagtcttgctaggtctcaagtgttaatgcaagaaccccttccaggaatcaataaggcttatgcctcaatcattcaagaagaaagtcaaagaggcattactaatcttcaaattgaatcccagaaatcgggttcagaggttgctggtgagtttgctggaggagttcatgttggaatttattttacnnnnnnnnnnnnnnnnnnnnnnnnnnngttgtttaacaccctaaatatgactaaaacgataattaaacacatannnnnttaagaaaaccttacattggtagcagcggaataatgtctcctt

SEQ ID NO: 145195 - DNA, 816 bp, Cannabis sativa
  modified_base (27)..(28): a, c, t, g, unknown or other
  modified_base (54)..(55): a, c, t, g, unknown or other
  modified_base (132)..(135): a, c, t, g, unknown or other
taaatagatgatcacatgaaccaaatnntagatgatcacatgaaccaaataacnnattaaacaagtaatgaaattaaatttgtttccttattgatatttgaagagagaagattatattgaaatagagttttnnnnagggcacaaagcccaacagtttcgattacaacccacgtaatatgactgtggttaatatttgaaaaccacatagctgtgattagcccgcttttactggatcaaggtaaacgtatatttaatacgatgcagatcgtatcatctgggtagtctcgctaagaacatggcaacaaccaccctggtattgagccgaagcttttcccacatattctcgaggctgatgtaatcctcatcttctaatgcgtagcgaggttgatgcctcgccttgtacacttgaagttgcatggtttcttattaatgcacacattaacagtctatatatttttatcacgcctaagaccattcagtcaaccgagttataaatatactctgtcaattttgcttttaacgagtaattccattttaaatatgattactattacgtgtgttgatccgtattctccctagtctaacacgtgtccttctctgatgtgctagtcgaatttcgggtataataattgccccttaaaaagttctttttaataaaaagtgcttattaatgattatggagggtatttttgtcacaatttcctttgaaaaaatgtacatcctctgatattggcagttttgcagtttcgagacacatcacgagcattaatggtctatcttttccatttcccttctattctcatccattagatcttc

SEQ ID NO: 145196 - DNA, 693 bp, Cannabis sativa
  modified_base (263)..(270): a, c, t, g, unknown or other
  modified_base (298)..(305): a, c, t, g, unknown or other
  modified_base (336)..(343): a, c, t, g, unknown or other
cctgatatgctaatctgatggctatatatttgcctaacatatatctgttggtatctcggtgcaactctatgtacacttcaccgatatcctgatatgttattcttcaggcaactaacatgtacgctaaacatgtatcaacatattcatatcattatactaatcttacctcgatttggaattcaagtgtgccggtcaaccagagtggaacaatctgctcggcgaattacaggctcctaaatcacatcaatcacaacattgataannnnnnnncacatcaatcacaacattgataagtgannnnnnnnaatcacaacattgataagtgatacgctaaannnnnnnncggggacttaaacttgaaactacaagtttccctaacaatagataacatggcaataccctaaatatgacaaaaatgggaaaaaactagggttcccaaaactgccccaaccgttagaccggttccccaaccggaattccagttctgtggggtttcgtggggaccaaccggaattccggttcctacatgctgcactgaaccggaattccagttcagtgcaggaatgagtcagaaatttataactcactcaaaacaaccccaattcaatccaaactttccagacctgttttatacaccctaaagaacatttttaaggcaacaaaacatctacccacacacagaatcaaaatcca

SEQ ID NO: 145197 - DNA, 502 bp, Cannabis sativa
ttttaaagacataaagaagcatttatcaacacctccagttttggccaaaccaataactggagaaactttatacctttactttgctgtctcggagagtccaatcagtgcagccttggtgcgagaagaggggaaacaccagcaacctgtttactttgttagtaaaaggtttattgggggcataatcgagatagccccctcttgaaaaacttgccttatgcttgatccatgcatctcgcaaactacagccttatttccaggcacatcccattaaagtcttgactgaccaaccattaagacaagttttatcaaaacctgatgctttgggaagattgatataatggtcaatcgagctagggcgattcgatataacctaccacatgagaacatcaatctaggaatgtcagtcgggccaggccgggcccggcccgccacaaacccggcccggcccgactccttcttttggcctagcggggcaagcccggcccgagataatcgggctggg

SEQ ID NO: 145198 - DNA, 655 bp, Cannabis sativa
cattgatcttcgatcatccttgtgccgcaatgaaaaggcaggggaaatagccattggcattggatctggtccttacattagcaccggtgctaaagtcatgcactggatagagtcattatatctgatgaccctttgtgagctagtcatcgtaaccacatcgggtcttagcttcttcacctggccccaatgcctcttgcacctcactatgcgtgcgtattcataccttaacaaatggtggggagctcaagcttgaggataccagtggcctatcatccccccaaagagttggctagccagctctgaggttttaaggatgaatatgggtacaataagcgttttaagaccacatgcatttgtcttgagtattttccttgcgcggacgagggcattgaccctcacttttggcaacacctccaacctacacattcctgacctttagtcggaccttgacgggaaatcaggaggtcttccttcttttcttgcacaggttctcatttagacgggcttgcgtgggtaaccaccgtgcatgtctctttctttaactctcaatgaaagcaccaaaatgtttactgagtttttcggcaactaaatatttttagagcttaagaaagttataatagaataaatagcaagataataaatcagagatttttac

SEQ ID NO: 145199 - DNA, 532 bp, Cannabis sativa
  modified_base (67)..(68): a, c, t, g, unknown or other
aagcagccagagtgacgtactcgtgtataagagccatttattctgtgggtgtaagggcccaatgganncttgaagcgaggacgttacactaactcaatgatttaaccccatgtctcctgcctgtctattgtttctccggtgaaggagtcgacctctaggacaaattcgtctacccctcactattggacaagctccaacaagcatgactatcatggcacagttcctgatattagatgttccttcagcttttaacgtaatgttgggtcggccggccttgcatgacttaaaggctgtcacatcaatattccactcatgtttgaagtttcaaacaaagaatggggtagggtgtctgagaggaagccaagagtctgctcgggaatgttataaccttgcagtggccaaggctaagaaggaattatcctccagccagagcacaaacaaggaaaaaaacatttccaagttgggaacttcccaaggcgaggaggaagatgtggatcctcgacttggggacccaagcagcaatgttggacct

SEQ ID NO: 145200 - DNA, 554 bp, Cannabis sativa
tctccacaacagcctatgtatggtcagattttcagtgcgcagagtcagcaacaacagcaacaacaacaacctactttggttcgcccgtagacttgacaatttgtggagatcttacctacaccgcagactggataaccttattaccctaccccgccggctcaatcccgtgataatctcgacggttcaagacttagctcgaatgcagatgaatttttagaatttactgatttgaacaataatagttagattttttaattatgtcaatttttatgttttaaagtttatttaaagacaattttctaattttatttaagataatatagtttatattgtaatagacaaattaatattaatgtttaatttcttaatattaatgttttatttttaattaataatatatttataaaataattattatatatataattataattaattttattgtataaatattaaaattaataattttcttatatttaaaaatattaataccggcgaaacactgattgtggtccgccggtattaatgtgtctgcgtgtaaaagtgcagacatt

SEQ ID NO: 145201 - DNA, 562 bp, Cannabis sativa
agatctttcgcctagaactgtttcgagaatatcgtattgataaccagcgtcagattcagtaccagatgtatcgctctgggattgtcgttcaagtcttttgctatcaagctccttcaccagttcatcctatttaaataaaaattattagaatatataattaatataaaatataaattttaataataaatcatttgattaacttaattacataatcttttgcagtagcttcattaacgaaagtgtcagacggctttttcaaatgaacctccttccatgcatcaactgcatgctctccaggaggacccccctatacgaacataaacaattaaattaatttattataaagaaaaatcatatttaacaattaaagaattaatagttaccattatgtgtcgtatcaaagccaactattttatgacttgtgttgttggttatttcatttgttgcctattcgttttgtttttacttagcgattcaaaaaaaaattgatggtaaaaaatttgcaaatcggcttccaactctccgtattcaagtggttaggaggcaatccaagaactttctc

SEQ ID NO: 145202 - DNA, 788 bp, Cannabis sativa
ttttgtctattttgtgacaagtgaatgttgattaatgaaaagcattttctgcatttcgctttacccaaaccgccccctctctctctctctaaactcatttactctaatttgtgggaatcattgaagcttgagttgttgaggattaggaggtagttttcttactgtcttaatttgaattggttgctgaaattgaagttgatttaagcatgattttaatgtagagatccttgtgatgcatgggtgttggaattagtttaattttgatactctatgcttgattgtgttaaagattgatgtaggatgctttgtgttgtgcttttgagataagttttgaagttaagttggtgctttaattcttttatacagctctgattttattgttgagcttgagcttgtattttgggtttaaagattcaaggtctgagcttaaatttattgatatgttgctcaagtttggagcctatattgtatattgtttaaatctgattttgttgcatgcgagctttgattttgacctttaaatatgtgtattagctctatgttatgttagttatattgtgtgggaaatgattttgagatatatgcatgtttggggtgagattgggtgattttggatgcatttttggagttgctagaatggagtttctgggttttcaacccaggcgcagcggcccagcttttgggcaccgcggcccgctcacatggacaaattgcatgttgaacttgttttgttcataacttttgactcgggactccgtttgggccgttccttatattgttggaaagct

SEQ ID NO: 145203 - DNA, 586 bp, Cannabis sativa
tcaaaaaaatcgtgtattaaacacgtctttaactgttgtatctggagatgtctccacagaaacttggttacagtgattccaatagcgtgctggggccattcttctttccaaggtcaacaatgtatatctagtgtcgatcgcggttcttatttacaaagaatcattctgactcgccagaattgtaagcctcattaccgttagctagacgaagctataggaagtcttcccatagcgagacggtcacgtcgctttacttgttcttgagccgatccgacttttacacttagtttgttcattgtatgctaagaactttcacgattgatacatgtcactttctttggtgcctcgctattcgcatttagcgacatatggtttctcgctaatatactaagtgtcagtttttacatttattccttgtctaagaccttacagtcagcgggttacaaatatactctaatacttacgtaattaatgagttattccataaaaagcaatggcatctattcacattccctttatcttgacacgtgtcctccagccaaattttgggtataacaattgtcccttaaaaagttcttttttagta

SEQ ID NO: 145204 - DNA, 1053 bp, Cannabis sativa
  modified_base (172)..(173): a, c, t, g, unknown or other
attatttctttagctcttagaatgcatttttatattcttttgtccacttgaattttttgttgcctctgagaatgttgaagaagggtatgcatttgtctgtagacttggacacgaatcttcttagtgcaacaatgcacctagttaggctttgtacttccttgatagttgtggnngagttcatgtccaaaagggcttggatcttgtctgggtttgcaagaaattttctcgagcctacgccaaaacaacatttgagggcattgagcttcacgttgtagctgcgaaggattttgaagcactcgcttaggtccaccacaggcccccaacctttttggtcttgaaaagcatttcatccacgtacacctccatgttgcggccgatgagatttgcgaacatcatgtccaccaacctttgatacgtggcccctacattttttagcccatagggcatgactttgtagcagtatagggctaggtccgtcatgaacctagtgttttcctgatctagtggatgcatctttatctgattgtaacttgaatatgcatccatgaaactcaggatttcatggccagctgtggcatctactatctggtcgatcctcggttagataaagcagtcttttggacatgctttgtttaggttggtgaagtcgatgtagactctccacctcttgttgggtttaggcaccagcactgggttggatacccactgagggtagactgtttctattatgaagtcattggccgttagcctttcgacttcatctttgagcgcttgggtgtgctccatgtctagcaactgcctcttttgctgaactggccagatgcttggatcaatgttgagtgcatgggttattatggaggggtcaattatgaccatgtatctttgtgaccataaaaaaaggtccatgttagcccttataaattctattaaggcagacttgatttctagacgtaaacctttaccgatcttcagtcttcttgttgggaaagtgggatcaacctctacttcttccgactcttctacaggtctgaagcttcctgcatgatccccaaa

SEQ ID NO: 145205 - DNA, 607 bp, Cannabis sativa
tgaagattattttaaagagttgttcatagcttcggagattgattggggtagggtcacagcttgtgtgcataatcgggtgtcgacttctatgagtgagtctcttactattccgattgacactgaggaggttcggaaagcactctttcaaatgcattctaataaatctcctggtcctgatggctttaatcttgggttttatcaaaagttctgggatatcgttagtaaggatatcattcggttagttcaacacttctttacttttggtgaatttcctgatcatctaaaagaaacgaatattgtgcttatcccgaagaagtctaaacccgaaagcatgagtgatctaagaccaattgctttgtgtaatgtggcttataagattgtttctaaggtgttggccaatcggttgaaagttgttcttcctagtgttatttctgaaactcaaagcgccttcttacccggaaggctgataactgacaatatcttaatctctttcgagatgatgcattatttgaaaaggaagcaaatggggagggaggggtttatggcacttaagttggacatgagcaaggcttatgatcgggtggagtggggctttttacaggctatg

SEQ ID NO: 145206 - DNA, 530 bp, Cannabis sativa
atctcttattgataacaaatcagagtagattgtaatcgattttatttagagcataaaatcccaacaacgtgtacactgtgtccagtccaacatggcaattaacacctgaaatggacgaaaatattagattgctaacagaatacgagtattaggagtttaactacccaaattttggttttggggttaagtgaaacaaaaataaaagttttgggggttttgctgccatttaccctacataattttgtaagtttaattatttttagttattttttatttttgtcttatttatattgtcgataattaattatatttattagtaacttttttttttataaatttatttagtttgtttttgttttataatatatatgtatatgatatattattctttagtattaaatgttgaataaaatatattattctcttgaaatgaattaagcaatttaattagttagagaattacatgttagattttttttttcaaaattataagtaattttatatagtaaaattttgttggaaattatttt

SEQ ID NO: 145207 - DNA, 796 bp, Cannabis sativa
tttgtcaccaggctgcacattgtggatggaattaaaagaccacttaagttgtattgtgacaataaatcagctgtattgtattccaacaacaacaggagctcaacgaagtcaaaacatattgacatgaagttccttgttgtaaaagaaaggggaaaaagtggactgatttacatagaacacttaggtacaaactccatgattgcagatccccttactaagagtttgctacccaaagtctttcatgaacacactgctcatattggtattttagattatgagcatatctagattcagtgggagtttgtcttttttatccttagtgtgttttatttatttcatgaaacatgtgtatttagatatttttctaatcgaaaattatgttattcagtttattttactttgtacatttaagctaagttttaatgtccataaagtaaagtttgaccaattgaaaattgacatgaataaattcccatgcatgtaattttcataccacattatcatgattaacctatgtcattcggctatgttaatatatgtgaccattgatggatttagttgtgattggtacagtgaaaatcgctctgatcctatgttgatatagttaatggacgagattgcacacgcctacagttatgatgacaaagttacgagctcaataaggttaacacatttatatatacatatgtggcatagtgggagattgttagaaatttatttattttggaccacaattgtatatataaaatatgtgttgagtcatcatataaatgagtcaaatttatgtggtctattt

SEQ ID NO: 145208 - DNA, 575 bp, Cannabis sativa
ctcttccgatctgaagtccttggtgagctttggaaggacataaggaagaacggtccggtagacttgatgagtgattttcttgaccgtgctgaaggctttatcacacttgaagaggttatttagcgagcagagggtgagctaaaacctagcaagtcaaaagctccttccactgggacatctgtccagctcccccattacccgagcaattcaagttcaaatggtaaacgttccagcaacaataataggcaagggaatgggaaaaagggaaagtttaccagtaaaaccgaaaaagctccccgggagaatcaagctaagtatactgcatttaccatcttgaccgaggatatagaaagtgtttacatggccactcagtcgctaacctcgtataagaagcccgcacccatgaaaaaagatgtcagcaagagagacatgaccaagttttgtcgatttcatggatactacagccacgaccccaatgaatgcaacaatctgaagcgcgaaattgaattcttgataaggaaaaataacccacatgtacagaagtatgtcatggccgatcagaatcagaggggtga

SEQ ID NO: 145209 - DNA, 586 bp, Cannabis sativa
ggagtgtattttggagttgcattttagcgagttaattttaaaaaaaatgttgtatgtacatattaaaaaaatacttttaacctgtattttgatactcgggatcccgacctatatagttataaggatataatatattaaagttaatcttccaagtttagtaaatataaaatacgggcgttacaaatagattggaaaaaatactctaaaaacagaaacactcattaataacagtgactcggggattaaggttcattaataccaaaccatgtaaaaattctcttctttaatactaattaattatttcaaacaactctaattaatagttcttgaaaacttcagtcaataaaaatttatcaaagacatttctagagcaaatcaagtgtcactgctacctcacgtcatttataagataaactcaccatatatgacaaactactatatatatatatggtaccaaacaagacacacttggcacatacatatctattctatataaaatgtgactatataacagaatttttggtttatgagaaattattaggtgattttttttaaataaaaaaaaataacaaattattaaatgttg

SEQ ID NO: 145210 - DNA, 954 bp, Cannabis sativa
tgctgccttctttcataaagacttagcaaataattcaagtattaagatgttttgatccacgtgtccctgtccggttggtccacgtatattgggccgaatcaggggcaacagacataaaaatgcattctgaattctaaaataacagcataaataattatttaaatatctataaataatttctataattaaattataattaactggtaatttccaaattaaactaagtggtctttacatatatataataacaacaaataaaaataaaaacatatagcttgctaataaaattatatatcatgtcaataaaagtacaatggaaaataaaacttaaatattattttaaaaaaaataatatactgtataatatagatataccctaatctttaagtaatttacttctaattctaaaaaaaatatgaaaaataaattattgatttttttatatggcaaaaaataatataaataataaatagtgtaaaaagatcattttctacaaattttaaaatgataacatttagttacataatactatgattttagatcatttactataattttcaatagaaaaattacagtattttggaatttttacacaacatactgaaatttttaatttttttcttttttactttggggtaaatttttttttttcaaaaatactgcatactatgttaagtgttattgttgttccacatttattttttaagtattgtactgttgttttttaattattctattttgttattttatatttgttttataaaaaaaacagtatttttgtaaaaaataaaattgtaaacttttactaaaaatttactatttgttataaaaacccgaagtatttttgtaaataaaatacattctaataaaaaagggattatttcacaaaaacataaaaacaacaaaaaaattacaaaaatacggtttcatagaattttaaacatttttacgatt

SEQ ID NO: 145211 - DNA, 684 bp, Cannabis sativa
atacttttcccaatactcttattgaattgtatttgtcttcatgtggtataagtgagttcccctacttcctaagaagcttgcaaaatttaaaatacttggatctctccaacaatcaaattgaaggcagtgttccccaatggttatggaatatgggtaaggattcattggtattcctagatatttctcacaactctttgacacaaatagatcagattccatggaagactctacaatacattaatctcgccttcaaccgacttcaaggtcatcttccagtcctaccaccttctacaacttttatttcaatctcaaacaattcatttgttggggaaatatcaccatctatttgcaatatcacttggcttgaaggccttgatttgtccattaacaaattgagtgggaacattcctccatgcctaggaaattcaagctctctcgaagtgctagatttgaggaagaataagtttgatggaatcattcctccagtttttgccaagggaaacattctaaaagttttgaatgttaatgaaaatcaattggaagggtcattgccaaaatcattggtcaactgtgaggagcttgaacttttagatattggaaacaacaacataaatggatcatttcccaggtggttggaatctcttccataccttgaagttcttatcttgagatctaatagatttc

SEQ ID NO: 145212 - DNA, 619 bp, Cannabis sativa
  modified_base (196)..(199): a, c, t, g, unknown or other
cccacattttgggtgataaacactaaatatttagagtcatttagtgtgtgtcactaaaaaccactcttaactttttagtgacccacacttttatgcgtgtcactaaaagcttaatttgcagtagtgtatgttctggatttaacagacacatcaaaccataaacatgaaaaattcatgtaaacataaatgacttctnnnnttctattgataacaaatcagattgtattgaaataggttttatttagggcataaaatcataacaaactaccacttgcactaacataaaataagtagtgcattttaataaatcaattgtcttgatatccagatcaagtgtagtgtattttactaaacccaaattactagaactgtaagtctgtggtaagctactgctttctccaccattacttcctttgtgttcataaaacattatgcaatatcattttctaaatgcattactcatctagggatactgaattctttactgcttattaagttcatctgaatatacagaagatgttaaaagatcaacacctcctttacaagtatctagaattttgtataattttggtaaaattatagaaccatcgagaattatatagaattaatattcataaga

SEQ ID NO: 145213 - DNA, 661 bp, Cannabis sativa
  modified_base (247)..(249): a, c, t, g, unknown or other
agggaagaagggggcaggccccgctgctctgctgctaagaggacaaacaacatcgatatggatcagttgaagaccataatgacgctcctgctagatcctggaatgccggtagcagattcacagccacagccacaaccacaaccagaagaggaggctcggacaccggaagatgacttcattctcccaaatgattaccaactagatgatgatgacattttctgtacacctgagaagacgaatatcaccnnnatcggggatactcaggattctgaggtgcaggtgttagagacagctccagaagttatggagaaccggaggaagagcaggcggcctaggtggttcgctgagtacgctgaaataaagaaggctagggctacttcgacactcgtgaatgcggacccacttagagtggttgatcggaagctgatgaagactttttcacaattgggtactcggccagattgggaacaagtacccgagagagtacttcaccggtctatacgattgtcttggttccttgaactacatattccgaggtttcggcttgggaacgttgtaagtttttaagacttttttactgcttttgcttttaaagactttatctaactcttttttatttaatctctaacatatttaattttcatgttttagcatttggatg

SEQ ID NO: 145214 - DNA, 961 bp, Cannabis sativa
attttgtataagtttgaaaaaaagaaagtaaattcaggatcttgagatttgaaactttatatatttagtaaaatttttattaagcatgattttatactatcatctgattaacaaaggtcagcacgataattaaaaaattacagtaacatgcttaaattagtagggcgttacaaaaaagaaaaataaaaaagcgtaaaattgaatacaaaattagaaataatcgtatatgtggcaataatttccttataattatatagggtattttggccataattaaaagtattttgaccttaaaatcttatttgtaatatttaagaaaacacaagatctaaaatagaattttaaaacatgtaggatacagatgatccaatacagtataaattattgtgttttgttttattttgattatatataaataaaattatgtcgtaattattaatgcttttaaaggaattatgtagcatttacatatctttcattctaaaaagtatttttgtaaatattgaaaagattaatttacggtataaatatttaagtttaactctcggttactgataaatattgaagtttaattttttacggtaataatacctaagttatattttcgaaacttctgcatgtacctgaccgttaagtgtcaattcaatggtcaattggcagtccctgattggtccaggtctttaatttgtttatttttatttacaaattaatttaaatataccaataaaaatataacatgtggataatgacttgacatttaacgggcatatacttatagaagttcaaaaaatataatttaggtattattattgttataaattaaatttgagtatttttctacaatcgagagttaaacgtaggtatttacgccgtaaattactctattaaaaataataattttattttttaaggcaaaaataataacatataaaatgtaaaaaaataataattttattgatat

SEQ ID NO: 145215 - DNA, 715 bp, Cannabis sativa
ttaacctttcattaaataactattattcattgaaaaagcccaatactaattgggcgtaaataaaactatcatatgtgatgttctattttagcaacatagcctatttaaaatcctagaaataaatgtgctttctatatgcatctaagcccaaaagaaaacatataggctcacatagatactaatttatgttggtctaaaattaataaataaattaatttttaacataaatataattttcctatttaattaaatctcttaaggaaaatattaaatatttaagtttgttaaataaaatcaaattaaatactaattttgtatttaattaaatatatctaaaaaaataccaaaaagtcttcctaaaaaataggtatctaaataattcataaaataattacttatttttaattaaaatataatatattttagtcaatttattttaattaaatcattaataaaaattatctacataaaaaaatgcattttgaaatcaagtggggaataattattaaaataaaataaaatatattataaaaattattctaatttatctgaaattgaagaattttcaacttaaatataattttatttttaattaaattcattaaattacgaataattaagtcgcatgaataaaattaacttaattattaattctaatttaatacctaagaaaatattctaatttaagttggtccaaaattaattaacaaattaa

SEQ ID NO: 145216 - DNA, 1464 bp, Cannabis sativa
  modified_base (238)..(242): a, c, t, g, unknown or other
  modified_base (318)..(326): a, c, t, g, unknown or other
ttttttttatttaaatatttattaagtaaaaagtgaaataaattgaagaattttttagaaaaaaatggctacacttgttatcgattgactagcttgaggcttcatacttagttcatctaattattacaaaataataatatcatttaaaaataattaattatttaaaaatttattatatgaagagaattttaatttgtgtaaaatgaagtttaatttttgtaaaaaaataaattttatnnnnnatattataattaaatggcttaattgttaaaataattatagtaaggatttaaatataaataaaaaaaattatttatnnnnnnnnnttgctaaaagaggtcttgttaaatgtttaactaattattttaagaaaatagttaattataatcaattaattctaaaaaaaagaatatttatctattagtaacctgctattaattatgatggttataataaaatgtaaccgttgaatagtcacccatagattttatatgtctcttgtttctcctgaaaagaaaaatcatatttagaacctatgacgattgaaatatagtatatttttatggacaatcaagtgagactattatattgtgcaaagaatactttttttaagaaaatattatccattcaataacttattcatataatatatataggacatgactatagtagagatggctaaaatgttcctatggtaaggacactttttgagccattgatgatccatctaatggttatgaaaagctaaggtgtaggataaaagtataggtgttattatataatttgctcttaatattttaataataaaataatatttaaattttaaaagtttattcattttttttactataatatcatttttttggaataaatgagtatgtatggttttttttttgtgagaaaaaacatgttaaatattttaataatttttttgaaaatacatataaaaactatttgttaacaacacactcaacttaaaactattttttttttaaaaaaaattaacttaaaactatatctattatgttaataatatttaattgttgttaaaaaaatactataaatatgtgggttgggtgatggtttttattttcaataaattagttaatactttttcaataataataataataataataataataataattcgagaaatttaaagtattttttatttaactaattaagttttattatcatttattatttgttgggtgcttttctattagtttttttttttgaaaaaataaaataaaatctattatttaccatataatattagaaaattttataatgaacctcctaaaaagaatgtactgatgcaccccatttgttttggatgcaagaggattttttactctaatttttttatggtcgtatatattgtagttatttaagacatcctgaaattttttgagaaattctaaaaaatttaacactctgatcgccaaacataaggttcaa

SEQ ID NO: 145217 - DNA, 701 bp, Cannabis sativa
ttacatttatatgaaattttttataccatatttttgtaaaaaaagatagaaatatcctatttttaaaacaataataaatttcgttaaaaaagtcaccggcactgaaaaagtcacaggtgtcagaaaagtcgttagaaaagttgtcagaaaagtcaccgtcatcggaaaagtcaccatcgctggaaaaattcatcggaaaagtcaccagaagtagatttcttagccataaacaaaaatagaactggttttataccataatgaataaaaataaataatataaaataactcaaaccagttatggttgaaatgtaatcggttatgtaacataatatataaaaataattaatacaaaataacttaaaccagttataattaaaatagaaccggttctataacagtgttatatataatgaataaaaacaaataatacgaaacaatttaatctggttataactaaaatagaaccggttatataacataataaatgagtatttttggggtagatatggtatgtgtgtaattattttgtgggttggggcatgttgaatgggtatttttgtttgagttattttatataactggtttttgtgtgtgaaattttatctgagttgctttaaccaattttttttgtctcaaatttttaactagttgataaatataactagtttctttatattatatatttgagttattgtgtgtta

SEQ ID NO: 145218 - DNA, 1273 bp, Cannabis sativa
  modified_base (343)..(349): a, c, t, g, unknown or other
taaatgttccccattccaatactgtggtactagaacaagttgcattttttcatcatacttacctaatttgtattctcctaattcgacaacttcaaccacctaatatggtccttcacacttaggtctgagtacacctgccgtactgtcttttgtgtttaaaaatacgcttcttaggaccatatctcccacaaagaatttccttgcctttacttgtttgttgaaataccgagctacgttttgttgatgggctatcaacttttagtttgctgttgctcgcttctcttcgatttcatcaagtgattcagcaaggagtaggtgatttgcttcttggttgtacgtcaannnnnnntgggatggtggctcgagctctatgggtagcatagcttaatatccatatgccatggcaaatggagtctgttcggttgccattttctcagttgttcggtatgaccatagaacttcaggaagctcttccggccagtttcctttagcatcctcgagtcttttctttagtgtatccttcagggtttttttgactgcttcaacttgaccatttgcttggggatgcgccactgcggagaaacttttgatgataccatggtttgcacaaaaattagtgaaggactgactgtcaaactatttgccattgtccgaaactatattgtatggcaatctgaacaggtagattatgttcttcacaacaaagtcttgaacttttgtagatgcaatggttgccagtggttcgacttccatctcccgggctagttttaggccagcgatcaaggcttcatattcgacttcgttattggatgccttgaatccaaacttaactgcagcgtgcaggtgttgcccctaggtgtgacaagggcgattcctgcaccagatagttgatctgtagccgacctgtccacatgtagtttccaagtcggcctgtcttcactgttacttggctgaggtgtttgtactggctcgaggttgccttctgatatgctttcttctttgcctgtgcattctaccataaagttttctagggcctgacctttgattgctattcggggttgaaaggtaatttcgtactgacccagctccactgcacacttgagtaaccgtccagaagcgtccgacttttacaatatttggcataaaggttggtcaatgtacaccagaataggatgagcttgaaaatagggccttaactttcttgttgctagaatcaagcagtaaccaagtttctcgatcaatgggtactgaccttcgggctcaatgagtcttt

SEQ ID NO: 145219 - DNA, 597 bp, Cannabis sativa
gccttcatcaaatctcaagatgagagagcttggaggatggttctatcaagttggtcttctctagttgagaaagattccgaaggtaattctaaaataaaatctgaattggaatggtctattgaagatgataaactttctgcctacaatagcaaagcattgcatgctatatttaatggtttaggtgaaggttatattaaacttatatcatcttatgaatctgacaaggaagcttcgcaaatccttcaaactcagtttgaaggaacaactgatgttaagtgctctagatttattatgcttcaaattaaatttgatgatcttaggatgtctgataatgaaaccctaactgaattctatgaaaggctatctaatatagctaatgaatattttgctcttgtgaaaatcttgatgattttgttcttgtgagaaaaattgttagagttcttctagagaggttcaatactaaacttttggcaatggaggaagctaaagacttaatcacaatgaaggtggaagaattaatgggttccttgcgtacttttgaattgaatcaacaaatcaaacaaaaggacaaacccaaatccatagatcggaagagcg

SEQ ID NO: 145220 - DNA, 532 bp, Cannabis sativa
tatatatttatgtaaaatgccctatattataagtgaatattaaatatgtattttactatttaaaaatataatattttagacatactttcgatataatactatacaataaagtaccatcttaaagtgaaacttaaaatctttaaatatatatattatattgttattaatataattaaatattaaataacatatgattaaatataataatatttacaaaatatcactaaccacgtaaaacgttaccttaacaataccttctaagttactaatatttcatacaacattctatttatataacaaactaaaaaatgacttactaaacaaattatacaaaatatattcttttatgatttttttttatacgcataataaggataaatgttttgataatttatctaaaaaaaagtctcatgacatgcatatccataaatatacatatatatatttatatatactagatagatgttacgtgtcaagtcacgtatattaattttattttagtttttagttttttcaatattataattttaaa

SEQ ID NO: 145221 - DNA, 509 bp, Cannabis sativa
ggcaaatgaggagcagccgtgtgagagcgagcaggtgaagattgtacttgtcgatgcggttaggcctggagtgtacaatcctcgggacaccaggggttctgagttttgtcgctaggcgacaagtattttgtaattatgtagtaaacttttgtaacagtattttgtaaacagaatcccagaagtttataaaagttatttgttctattttaaattaaaaagcaaaattttaattattcacgtattttccaataacctcgttaattagcaacgagttgcacagtacattaaaaatcacgctaacacgcctatgctagttagggtgttacaccttgctcttccttttaaggtttgattcaccttattctccgtataaaggtttgcgcgagtttctttctgatgaacctgaagagagggttggtgatttccatatgatgtttgctggaatttattttaccagaatcttggatctactcacaagtatgttgtataaacaccctaaatatgaactt

SEQ ID NO: 145222 - DNA, 534 bp, Cannabis sativa
tttatagagaagtcagtcatgaatgatcatcatgttttaaagaaaaaaaatcagaaaatgcaagcccacaattgaatttgaatgaagaagaagttggagtttgattcggtcttattttatctttacaaattattttctccactttaagattggggttcagtttctttttcgctaaccaattgagttttagttttgattttcacatacaccaattttatttcgtaatttgattagtacggttattttttattttttaaaaaagactcaacaaatgttaactttggcattagaaatggttaaatttaacagaatatttctttaattttaaagtatattctgataaatcaaccaaaaatatattctgttaaactaataaaaattgtcagatagccattttttatatataaagataaagatattctgttaacctcagcaaaaaaaaagtattattttttaatagaaaacttaaaaaaaagaaaattcacccaataatttctcataaactaagaattttgttatatagccacattttat

SEQ ID NO: 145223 - DNA, 529 bp, Cannabis sativa
aatttatttatttcttttttttttagagaagataaagacacttcctcataactttctcaaactcctacttctaaaatcatacccactcataaaacttcattccccaaatttaattaaaagaatatggcataataaggtatattgggaatgaaagtaattaaaggaaacacattaggctcaattaagtggttaagattttgaaacaggccaaggctcaactttgggtacactaaggacaaaatttttacaagtaagcttgaaaggctcaatcagtccaaaaaaaattgcctaaatcattttccaagcaacaatcatcaaggattattcttcaagagagtaagtcatgcaagttctattccatgtcaagcaaacattccacaaacccaagtagaacaaaagtgatactatccaaaaatcaataatctacatctatagaataaaaaaaatttcacaaggcatccaattcaatccaaagagtttatgaattaagcacacggtttaaatttcaatccattgcacaaataaacaa

SEQ ID NO: 145224 - DNA, 868 bp, Cannabis sativa
gtcattggtggatttcaatcttcatttgcttcgatagagacaatagtataatttttttattttgcacttttcattgtagctggttgctcttgcagcatattggacaatctattggctaaagaaaaaaagagcaaagattttggtgaagcaaaaaagtaaagaaaaacaactacgagaaagtgttagatgggatttgatttaaagatgaagattagatgaccactcattgttataacatttgacgaacatacgatggaatccagtgctgatgaaatactaagaaatcaatcaggaatttagttttaggactttcccatattacacattggtcattctttcctgtaaacaataatataaaattttttaaaaaaatcattgatataacaaaaacattcgcacagaagtttactcaactaaggctagttatacagtcttggccttggtcaatcgttgacctaatcatgagcgattcaagggctttacaaaaatcaattaaagatcgtgtgcgagaacccacctcgaaaggatactaagttgatttgccgctttcccaaacgggatgggagaattttttttatcaatgcactcaaatcgtataaaattgcagaatcatacctatcaagcctcctatatctgatcttactcaaagaatatggactcaaatcgtatgaaattgcagaatcaaacctatcaagcctcctatatctgatcttactcaaggaagtcaagctccctaatcaggtgctgagccagatcgtcgtcttcatcatcatatcatcggcgttggcgaactccgaaaccaaccctctcaatcgcaaaggataatcggttgctgagccagatcgtcatcttcatcatcatcatcatc

SEQ ID NO: 145225 - DNA, 777 bp, Cannabis sativa
cttattgaccatgtgaccatgtcggtcgatttaataatttaatacttaatactttgtactttggtattggtatttgtgattatgaatgtcttttgttgagttaaaaataatatgactgtcatagttcattattgttatggtgagataccgtgatcatatatgataaacttgagaccaaactcctatttggaggacacgtgtattcagttttccaagaaaagctgagatatccatgagagactcctcgagtttaaacctcgcatgagctagaatcggcgagatgatgcgagtatgatcaaagtctaaatcgcattcgtgtaactcgcattatgtgggaccaaagaatggatccaactcgcatgtaccaggatatgtgcgggtatcctttctatactcctgcgaaaacatagagatcgattctctataatgcgagctggtcccgatgacctaacagcctcgataaaccaatatagactcgcatgtctaggttctatcagctcgtcatacgacgttcataaatgcgactatctaagaacgtaggcatcttaggcttaatcagatgttaggcctatcctaagcccgcgagcttataccagaatatgaacagtcaactcgagcaatagaagtcgcatacgttgttgtatttagtgaatcgaaaatgttattcatttattaatgtttacgtttttagtttaattattatgaatcaatgtacaaacggattgacaatgaataacaatcctggtgtaattaactggacacctactttgtatataa

SEQ ID NO: 145226 - DNA, 1189 bp, Cannabis sativa
ccatgttccccatcctgatattttctaaacttatcctccaactcaatgattcgcaactggatgggatccacttgctgttgattggcattaaattgatggcgtaagttaggtgcattctgatttagtcactcgtaaagatcaagttgtctttgattaaaatgttcccaaagatcaggttgtcttcgctcataattgctcacagatctcgtctttgagtaactctcagattggtagcttcatgtattgctcatgctttcttgatcggcataacatcgagatctacttccttctcacatttgcctacttgatcgactgtgtcctcgagaccttaagtgtctcgagctcgaacttccttcgtcttatactagccttcttcttcggaagaggatagatacacgtcctctatttaggtacgtgtatacaccttccctctctaatcaagaaggacgctgagggtgtctcggtggcagcccacttatcctaggttaagtcctagggtttctctcgttatcacgagatatttcttgttccctaggtcagggctgtctcgtgtcctcattcctacgagaagcctctggtacatcattacgttcattcccttagttcataaatccttgggatctttgaagaacgtctcgatgttgctcttgattattttgttgttcatccactggaacatccctagtacccccaggttgttcctcctgggtgttttggggatttccttaatttacttcctgtctcctggttcttgaacctcgaggtctgcctcgtggtctcctcaccccaggatcaggttgattctgagtattagttccatgagtcgccctaatcgttgtagcctctctttccaactcagcgtttcgttggttagattcagctaagcattgttggagttgtctattttctaattccactaatggtacatacctagtttgatcatatgcatcctcacttttaggtatatatcctgtagaattattggtttattcattccttctttctgggttttgatttttaccaccatagtttctccttaaacgtgacgtttcagtagtataggctctttgagaccccattggctctttcccaggataatgtgtagttttctcaggacaatttccatcgttttgattattcttagccatggatggatttatatttgtaaggagaaatttttctgggtttt

SEQ ID NO: 145227 - DNA, 503 bp, Cannabis sativa
aaggaactgcctgatcctgaaaatattgattctgactccgatgatggtgatgagttggttaaagatggtggtgatgccgatgatgctgataatgttgttaatgatgttcctgctttggatgtgaatccatctgaggccgttggaggcagtgatgagagggctaaggatgttgaggagtttaaggccaatgagtccaaattaaagggggacaattttttcgatgggttaagccagcttgaaattgatgatgataaacttgtgttggctggcttagaggttgttcgtaaaatccatgtaagtgtatcttaatttgtttgcaagaaaattatgttttattttggttgcttatcagtttaatgttagttttgtaactgtttaatttcagactttgtttctttaggtcccacaacccaatccagatgttgttggtgaaaagttagctgccattcatattgatgaagaaactgaggacactgtttctaatactcctctattggataaga

SEQ ID NO: 145228 - DNA, 584 bp, Cannabis sativa
ttctatagaaattaagaacccagttcctatgtcaccccgtggtatgtttgtgtatatagtatagttctatcccgaatgaaataggagattgattgactgggattattatctatttgtacttgaatgtagattcttgatcttcaaaggtttggctcctggaaagctcctctagctgataaactgcttataagctcccagatcattatcctttggtgatactaatatcctatgttcatataaaataacgactgttggggttggtcaatgcattcgatgattggttatcacgaatatatctccagttcagtgtatttggttacatgtattgcagcactggcctacatgtttaaatttaagtgatttgaagtgattaagcaattgcctttgtatttttcttttcttattttttacaatcttggccaattaatgtcatattccttaaagattattattcgaaaagagtttacaatttataataattgtttgccttcaacatatacgcatattttctcatgtgacatgtgatctttccttcttttttctttccattaagtgtaaaagttaactatattttgactttatta

SEQ ID NO: 145229 - DNA, 713 bp, Cannabis sativa
  modified_base (27)..(29): a, c, t, g, unknown or other
aaacgtgattaactgctaatttccaannnaaactaagcggtctttacatctttactcttttcaagtttgagagtgtgtttgttttctagggtctcaaaggaaaatggcaaaaacaaaaaatgctcaaccatccaagaggccctctcgtggctctgcttctgcatctccgatctccccacctgcgccgcctgctccagtgatcggagttcctggttcgtaatctgctccgacgaaaactgccagaaagtcgaagatccaagctcgaaaatcgacttacaacctcgctctccaattgctactccaacaccctgggtttggtgatcgtgatgaatctcattcatccgatcacacattgtcgaagtcttcttctttgaatggtgcttaaaatgtcaagaaagcaatggtgactttgcccacggtgagttctcaaaaaaggtccaaggtatccactcctcaaaaacccgaagtggttcttcccaaaaatgtctccaaagggaaaaaggtgatgccttcatcttcaaaggccaaaaatctcaaagagaatcccccttggtctcatcttctgattttgatcctgaaaaaggaactgaggaggatcacaaatcagagggtttgtctgattcaagtgaagagtttgtgcccaaagaaccaccctctgctgttgattctgggtctgaaagtgaagagcatgaagctgaacctgtcagtgcaga

SEQ ID NO: 145230 - DNA, 665 bp, Cannabis sativa
gtttgcctatgaaaatgcaaagttttacaaggaaaagatgaagaagtggcatgatagtaggatcaaagtgagagtttttgtgaaaaatcagcaagtgttgttgtttaactcaagatttaagctatttctgggaaagcttaagtcctgttggtcgggtccatttacagtgatggaagtgtatcctttcggggctgttgtggtgaaagatgaaaaatcgggaagagaattcaaggtcaatggacaacgattgaagcattattggggggaagaggtcaatcgatacaagacctctatctccttgaaggatgcttgatgtttgtaattttggggtgccaaaagaaaagaaaaaagattgaattgaaaaaaaaaatgaaataaaagagtgaaaaaaaatcaatgaaggcaccttaagaaaaaaaaaacaagaaaaaaaaaagatagaaaaatttagaaaaaaaaaagaaggaaaaaaaatatatattatataattagtaaataaatgtcatggtgaaattgagaaattatttcctttctttgtgcaggaaatcaagtgaagaaggttgtggaagtgaagaaatttaatggccaaagaaattaagtttggggtggaaaagttacacgcagttgctatagcaatggcttagcaacgttatttggcagcaaaa

SEQ ID NO: 145231 - DNA, 935 bp, Cannabis sativa
  modified_base (866)..(875): a, c, t, g, unknown or other
tataatctttcaagaagattaattttgctcgagattgatggtgccatgtatagctactctagtttgttccacaatcctttcgcagtctattattggattagctttcttctaactccattggacaagtacataatgatggtgtagtatgtcatctcttccttttctacaattttctcttgattcttctcagccaataacttttcatcttcgagtacctttgtcacctttcggtgcgcaagtatacccttcaaactctcttgccatagtgcgaaatcagttgatccatcaaacatctctagttcaaacctagccatcgacatcctccttcaatctatgttcttgtacaattccttgataaattcttgatgagttcttggtgcgaaagcaagtgatctttaaatttctcttgatgagtaaagaaccaagctctgatttgtaggaaatttagctctaatacatagggattagcttttataattccagctttaagttcacagttaaacgaacaaatgttaaatcaaaacaaacaaatcaagaactaaaaaatcagcaaacacattaaattagaaagataacacagatgaatctagatagctttcagatacaacaacatacgagaattatactggttcagatcctaagttcaatgtgaacttggtcatactccagtttgaaagcattaccaccaatctttattgataatgagaattagggatatcaatctcacaagctacaaggaaataataacagtaagtcatctatggtataatcattcaacactaattaactcactaacccaagccaacataatcgataatgttgcttaatataatttctcaatcgtagttctctctctctctctctcnnnnnnnnnntctctctctctctctcatatctctctccctatctctcactctatcttttctctctactgt

SEQ ID NO: 145232 - DNA, 958 bp, Cannabis sativa
gattggatttttagggtatcttttaggttgaaatccatgttactttggtatgtggctgctggaaaatatttgagcttgatggatttttagctcaagttcttgagcttgttgaattgtgagttaaaccatgatttatgttatgttttgtaatctgaaactgggagttattattagaaattgatacatgaaataggttattttgaccctctaatatttgttagcaaccctatttgatgatttgagagtttggttgtgaattggggtgatttgattgtgttttggagttgattttcgtgttcttgctgttgttgttctgggttttgaacctaggtgccgcggcatggtatttagcatgtcgtggcgcgcccatttctttttgggcagatccttttttgcaaatttaaaatagccataactttgtgatctagactccgacttggaagttctatataccgttggaaagctattttcgagctctatctgaatatctaaattttaaatgccatttgaatattttatgaaagtgaaattaggggttaaccctatttgtgaaatcccgaattgtgtgacaaggattaccgacacctgatcaggagcacccggggattcggaatctttgatattgcgggacaacaggtaagacagagattagcacgtagagtatgcacagtggcgcttatattgaaagtgatatgtatgattatttaataaccgggattagggctattaccctaataggaacggtatagttgcctagggttattaccctagtgatatatgtatgaaaatgccatgtcatgttatatgtaatgagattcaagggttatgcgcttaaggcataatcaggttggactcgataacaataacccatatgaaccaattctaaggccttaatgtatttagacatgtgagagcaacacgtaggtctacgccacgtagatttaaatagatgtgtgag

SEQ ID NO: 145233 - DNA, 998 bp, Cannabis sativa
tgttaattcatgttcatttattctattttttgattcttttcttttattcttgttgtgtttataattggttttttaaccagttttaatattgtattttttattttgttaacagcttgagcctgctaatgttgcgtttgttggtgctgaatctgtaactagttcagaagttccagttgatgcacctaagaaacctgagattaagaaatctcgcgctaagaagaagaatgtgagtttattatctggttctgctattgttgttgtttttaactggttttttttttattatagaaatgtgtttttaaatgtttattgtatgtaatttagtgtttatactttttataactgatttatttttctttaagaaatgtgtttataaatatttaattgatgtaatttaatttttatgttatttataactggtttttttctttaagaaatgggttttcaaatgtttatattatgtaattgagtttttatactcttttttaaccggtttcttttgttagttttttttttaacatattttgtgtttcatttgttgttttattattataaccagtttctaaaattctttttgagctttttaaaagttttgtttttgtatgtttttataaccggtttcttttttgtgtttcaaggttaatgttgatccttctgatgatgattttgttcaacatgttgaatctggaactagttctaaagttccagttaagaaagagattcagcctcagttagggaaactcgtgcccggaaaaaaaaggtgtttatgtttataattttgttctttgttaatgtttgtgaatgttgcttttcttatgtatctttatcttttttttttcctatgttttttaggccgcagtggctgattctgatcttcctaatccgccgatacgtcatacaacacgttctggcgttaaatctgttgcttcgaagggccctagtccttcgatagctgaagagtccgttaaaaaatccactagtttttcggatgtggtaag

SEQ ID NO: 145234 - DNA, 1085 bp, Cannabis sativa
ataccaacttgatttgccaacccccttttgcgaacacatcacaagtaaattctattttaccagcgcaatactaacttttgccagcacagtatgtagcgcaatactaacttttgccagcacaaaaatgtgctggcaaaggtttttattttattattcattaatgtaaaaagggtgaagagtatttcattccacttataaattattaacatttcttacttcacctattttataataaaattcaacaaaatataactgaaaaattatgttattataaaagttatattttgaaaaattttgtttacaagtcatatatcataaggggcacattaatagtgtaaaaggttaagagggcaaatatgttgcaaatttttttatgtaattaatagtgctgtaccaacctatgtacgtatattttatttatgtattatgtagtttaattttgaaatattattatagttagtattgaataatgtatgtatgttggtgttaaaataaaatatttttaatttgttaaattaaattaaaattttatacaatttattattttaatttttaatttgtttaagtactatcttcaatttcttttcattttttaaaacctaaatatattaatgtttctcaacttcgtaaacattagaggtagggtatgctgctattaattattattaatcattgatagcaactagtcaaattttcaagattgtgttattaccactgagttttgtaatctaaattaaatagagttacttcctatttcttcgcccaacaatctggttttattaggggtagcaaaatgtgacatcgtatcgtgttcatgtcataatttaattgactcacttttatatttcgtgtcaaacatatcgattcgttttcgacccgtgtataattttctcaaccctaacaatttggttttatcactacaagaaatgtcacttttaccagcgcatttcgcaaagtgcgctggcaaagaaatttaaattttaccggcgtacatttgcactagctaaaatctaacttttcccagcgcatttatgcgctgggaaaaattatttttgccagcactttttattttatgctggtaaaag

SEQ ID NO: 145235 - DNA, 931 bp, Cannabis sativa
aatattggaacacaacatttggccattagaatcacgatttggtgttttagtagtaacgggacaacttagttagacattgggaatgtcgggagttataagagatttagaaatgaccaaaatacccctaagtgacttagaagatttttggatttagtggtgggtaaaatggtctttttgaccatttagttctttgtcctttagtgagctttagttaagttttattaatctgaatttagttttatttaaatgagaaaaaccattagaattattcatttatccaaagtaagaaaaatcaagaagaaaatcaacttttcctctcaagtctctctctttctctctcgagctccataaaagccagctagagcttgtggttcctcagtttaattctggaagtttagcaagtttcttagtgaatcaatccaaggtaaacatcctaacaccttttctttgtaattccttaagtttcaagtaaggtttatgcatgattttggacttagggttgttatagttgtgttttgcttttattggagtgttgtagagttattttgatgttggttgagctgctttgaagttagtttagggcttgttgtggttgttcgacaaagtttgtgttttagaactcaaacttttgtcttcaattgtaatttttgattctgagcatgttaagttgttttgttgcatgaaatatgtctattgtggtatcttaagcaggtctggaaggtttggtaaagttttgggttgaattgagggtatagtgaatttttgagtgtttcctgcactgaaccggtcgaccgattcagggggacctattggaatcggtccaccggttggtccccaggaaacccacagaaccagaattggggaatcgttgtactggttggggcattttgggaaccctagtttttcccctttttgcaatatttagggtatt

SEQ ID NO: 145236 - DNA, 718 bp, Cannabis sativa
aacgtttaggccatatttctagagatagaatggagagattggtgaaagatggtgtacttcaagatctcgatttctctaatttcactacctatgttgattgtataaaaggaaagttaactgctaaggttagaaagagtaagtcagacaggtgcacagatgtattggagcctattcacactaacatttgtgcatcctttgttccactttctatgggcggctataaataattcattaccttcattgatgatttttctcgatatggtcatattgagctcattcgtgagaattctgaatctttagatgcctttaagatttttaagacaaatgttgagctccaaaaaggaaagaagattaaagctgtcaattctgatagaggtggagagtattatgggcattatgatgaaactggaaggaaccccgggtcgtttgccagatacttgtaggaatgtggcattgatgcaagatatacaatgccaagcacatcccagcagaatggaattgcataaagaaggaatcgtacactttttgatatgtgcctagcaagtcggttccaaagacgccatacgagctgtggtcaagcaagaaaccgagtttgcatcattgtcacgtttggggatgcaaagctaaggtaaggccttataaccctaaatctaagaagctggatccgaagactatcagtgggagttttgtaggctacactattggttcaagaggttct

SEQ ID NO: 145237 - DNA, 542 bp, Cannabis sativa
aacctggatcttctctccttcaatttggttagacacagtctttttcactatactaggtatttctctgacatgagtgggcatactctcaatcaccaaggcttcgaaatattcagtagagaagaaaaggattttgaaatagagagatgctttgttttctatttttgtttgacaaaagagtcttgaagtcaattaagaaaactagagccatcttattctatttataagatttcttctagggttaggtttagaatttagatggaattaaaaaagataaaaaaaaaagtttgctttattaagccacctaggacgaacctttaatgggccttatggatttcaattttgtcattttgttgaagtcatttttcttttcataaatgctatattttaattctaactctataaatatcaactctatctttttaataattataattaattattaaatctttttaataattataattaacttatttgttaattagacctcaaagagtctcttaattaataaataaaccttaaattctcttttcttctcaattgtg

SEQ ID NO: 145238 - DNA, 539 bp, Cannabis sativa
gtttatatatcaagatatccattcaactatgagagatctgttatggcgagctttttctgaactttggggtcctctgtctaactcacttcatcatagcagcggtgagatgggaatatctctgtatgacttgaaggttattggggggttgcctattttaggaattccttaggaaaagttcatacctcctaacaaaaaattggttagtggaactccatatcattctactactgcataacttctaaggttccacactcaaatttataactatttgaagagtgtcaacgtttgtgacaaatcaaataatataaatgtatcttgggagcaatggatagaatttttctataaagggacgaagatatttcaaggtgtgaaacaaaactcgactctcgagactgtaggaggagaaaaccaaaggaaaggtaaaccaaaagttaatcttcaatctatttcgttgaacatttcaaaagagggtagtgttgtagcctttctatctttatggctaagtcgttttgtttttcctactgagggctccaacatta

SEQ ID NO: 145239 - DNA, 756 bp, Cannabis sativa
  modified_base (215)..(216): a, c, t, g, unknown or other
ttatgggccataaaattacaagacctactaatgttcgaaaaattacaacaaatgaaaaaaggagaagacttagtacaaaaacagacatagttttctagagcccaatgggatgccttcccattaagagcatcgatcgctagcctcgagtcactctccactataatatacttatgctggagctccatcgcaacagacatcgccaagcagcaggccgnngcttctccacaaagagcatcagagtaatccaatcgggacgtgtgaacactaatcacccttcccaggtggttcctagcaactgcagctatacacatactctctaaacccacacgaacatcacaattaaatttgatccactccagaggtggtgggatccagttgtccctcatcaacggcggaggactagggaaaagagtagtatgtagctctgcaaaagaagaacaaataatgtcaatacattttaaaacatgaggagggctattgttgtgaaccccttcatttcgcattcgccatatattgtcaacgacagtggacgcatagagaaagacatcctcagccctaacacctttattattaaggctccagatgaacttcacccaatcccaaacacgaataccagtgtcacttactggaaaaatttcccaaggtgacgagcgccacaagtgcatcgccacatcacaagttagaaagaaatgttccatggtttcctctccccttccacaaaaaggacaattagtgtcttcaattggaaatctccta

SEQ ID NO: 145240 - DNA, 762 bp, Cannabis sativa
taatatattaatattatatataataaaaaaaaatctgaaataatttactcattatccacatgaacaagttcttgaattgtagcttctccatgacgattatatatttgacgtttaggacgaatgtctatgatagcagccatcaaatttaagaagaaaccaaaattataattagtagaaagtgtataaatattgtaaaaaaagggagctaagtgtggaaacttactaatttctttagatgaaatatcaatatactattgtatattacttagaggcaaaaagttgtaagtagacatcaaaaaatcatcataattttcttaaagctctttaattttagtttttttccagttatgacccattggagatctccatattttttatagtccaatttgcaatctttgacattggcattaaaaattgtgtatgcttttgtcatgtgcaatgtctgatgcagggcttgaatatcagcttgataaatagttgcttcgatatgattttcttagaaaaattatatataatataggtcaataaatattaatataactaaaataaaaatatattaattggtttttacctgtggatcaattagaagcaaattctgatatttgacagaatttttggataggcgggaggagttttttcaactacaattactttaactgtccaattagtttgagcccttgtgatattaggtattagttggtatttgaggtcattgctctgtggcctaaattttcaaaagagttaaaatattatataattaaa

SEQ ID NO: 145241 - DNA, 1250 bp, Cannabis sativa
gtagatatcggcccactatggttgccatatcaagctaccacgtggaaagctggtcgtcaaccagtagcagtcaaagatacacaactaaaaccaggattacttctcctggaaccctaggttatgtcagggattgaccctggatattgaaacaattgtgggagtatgttgggaattgaccctaaacatcaaaacccattttatcgaaaccagatgctcctggaagattgataaaataaaatgattgaactggggaagttcttattagattaatgattgtaattctcattattgatgaaatattttgaacttcagttgtgaataaaataatcattcttttcaacaagtaattataaggcgcaaaaccctttaaaattacttgagggcatatatgtatgatcaaccagaattaatttggaaataaataatataatgcaaacccatcaattcagaaaataaaaaataaatgaaaactttataaaagctcctcgaccaaacctttttgacgaaagaggggtcgaactgttataactccatgaccaaacctttttcacgagagaggggtggaatcgttataacgccttgataaaacctttcggatgagaaatggatcaaacaactgtaattttttatttataacctatctgacgagaaaggaaaattaaaagttataatttgcgcataaagcaaaatactaacggctcgccctgagggaaagtattaaatgagacatcaaagtgtcttgaaaaaaatacttaaacctaaaatgtgggtagaagatttaactactcatgtaagcaacaaaaatatatacaagatgacaagttcattaaaaatatatttgagtttgcttaaaataaggtcatttcttatgattgcgaggcagaaccaaggatggctcgcagattgagggcagggcagataagctactcgcgcataaagtaggtaattaactacttagcgtaagaggaaaatatgagcaatggaaacccataataaactttatgcatgtgattgtttaaattgtgagtgaaacgcaagcaacaatccacatattaaagtttaaacttaaaagtatgaggcattaaaaaaagtaaagttggccatccaactttacaaatttgtcattataaaaaagtgtcgccaggggcaaaccattatcttggccaaaaggccattttaaaaaaaaggagataaataaaaaaccaagtctacatgctaggagacttggacaaatcttcttcttcttcttc

SEQ ID NO: 145242 - DNA, 523 bp, Cannabis sativa
tatgtgtttatttcattattttattgaatttatatttaggatgttaatcaacatacttgttagtaaatcaataaatgatcacacaagcagtaaatcatttactctcaacacttattacaccatgggtcgagcttatctctgacgatgatggtacatattcggccagtttacaggaagtttaaaaaccctggcgttctggtaccaaattgtaacgccctaacaattaggcacgctaccataaatgattaagaaaccctaatcccctaaacgggattactaattaaattaatgcgggaaattaaactttaaacaaaacggaatgaaaatgaacttgtaacaattttaactttacaaccaaaatttacatgctttgggatcccaaaacaataattcaaaaaatattataagtcttttccccttagccgacttaagcgacaaaatagagttaaaaaaatttcaacattggtagaccgcaacccgcttggtctagtgtggcccgaacatgtacatacatcgcccagct

SEQ ID NO: 145243 - DNA, 1130 bp, Cannabis sativa
  modified_base (1061)..(1067): a, c, t, g, unknown or other
tttatacgtgagttataacttttgattttcctttcccgttagataggttataaatcaaatttatagttgtttgatcccttctttgtcaaaaaggtttcatcaatgtgttataactattcgacccctctctcgtaaaaaaggtttggtcatggagttataacggttcgactccaatttcgtcaaagaggtctagtcgagaacctttgaatttcaaaaaaatatttaaatgacgggtttgcattatacaatgtatttccaaatgaattctagttaatcatacataaataacgcttaaataatttttaaagaacgaactttgtaattacataatataaatgattctctttatccataactgaagtttaaagtttacattagtattgcgagttatatcactcatttattggtagtgaggtcgcaaatgttgtacattccagtagttctttattagcgagtcatcaagtcaagccaatttatagactccgactccaactactgcttcgatgacatatggacccccccaattcagattgaacactccttcagatgcatctctcgtatttgcaaagactcgtcttagcaccaagtctccaacattgaatagtctttccttgacttttctattgaagtatcttgtgactcggtgttcgtgtgctgcgttggtgatttgcgactcagttcattttcctcaagtcgatcaaggacagttttaaaagttcctggttttcttcttgattataaaactctcttctgtgagtcgatatgttcacttcaataggcagcattgcttttgagccaaatgctagcgagaaacgagtgtgttcggtagctgttttctaggtagttctgtgggcccagagcacctgatgtggctcatcaacccattagcctttggcactgtctagcttcttcttgatagtatcccttagggttttattaacggcttccacttgtccattttccttaggcctggatactgacgagaagctttggataattttttcctcttgcagaattcagtgaacaagaccccatcaaattgggttccattattggatacnnnnnnnatgggaattccaaacctacagataatgttcttgataacaaagtcaaggactttcttgtaggtt

SEQ ID NO: 145244 - DNA, 977 bp, Cannabis sativa
aaagcatgtagttcatatcttgttgtgattattgtcttttaagtttatttacttaatgacaatgatgttttgttggcttaattttttaagcatatttaatgacactatttttttttgatgaaccagctgaatttcattactccaaaaaaaccttttacaaactttacaaactagagagacttcataaatagtctcaaactatattctatacaatgatcaactaatggaaattccctcttttaacaaagcctcaaaccatattgcttcttctgtatttctctttttttgcccaagacaagtaattctatctttgactattcctcttactctatatacaagttgatccaccaaatgctcctttgccaaccacaccttttcattccttgctgtccaaatggagtatacaaggcaagctaaggctgctgatagcaccttcttcctgaatctacctgcttttgctttttcaatccaccgcaagagattttccaatgagtttgtacaaacattccattgcagccacttctttacctggttcaagcaatctcgagtaaagtcacactcaaaaaatagatgctgaactgattcttcctgtaagccacacagaacacaagtggggctatctacaatgtgaaaccgttataatctctctctggtttttaacatgtcaagagcagcaatccacataataaatgagtgcttaggcacattatatcggcaccatactactttgcaccatctcaccttttcctgaggagtctgtagtagcttatacccttcagcaatttggtatttctttgccatgaactgtgctggatcgatgacttgcatcactttgttttttacttccactacttttctccagtaccagctgctttgagagtttgtgttgtattgccaccagtcgtcttcttgtatatatacatgatttacccattttagccatagactatctttcttggtagctatagcccaaacat

SEQ ID NO: 145245 - DNA, 866 bp, Cannabis sativa
attgcttgaagtctatcttacaccccgtgatgctttccctttgatcctttcaagcgaagtctaagcttgaatttttatgcaacttcagccttctttcccggatgccaaagctcacttcataaaaatttaatgagactctcacatgtacgttgtttttcgtgtaagaaagatcactgggcgtacgatacgtcttcaaccctctttcccagaagggaaggactgcttgaagtctgtcttactccccgtgatgcttttccattgatcttttcaagcaaagtctaagcttaaatttttatgcaactttagccttccttcacaggagccgaagtttgcttcataaacattcaacacgactctccaaagtcagtatctaaagtccttgtgcacttttttcctttccagtgaaagccaaaagcttgcaatcatggaaaaaagcttgacttttgcttattgaaatggacctcaacataaagaagattgtctgtgcaaggatgcaggcccagctttacctccgggaaaccaacaaccccatacgtagcaagaagcctatgctttcacccacgaggtctatggatgccaccttaaggaaaaacccaggcaaagtctgtgaaacttggtgaataacaagtgaccaagagacttgcctggatggtcgcttgaagggcgcccataccatacaatgcatcgaattggcacaaagaacttatggaaaaaaaatttaaggcttaaaatgagctacaaaatcggcctctaagtcgttcaggcatacttcgacttgacaaagtaaatctagacccttacctatcaaggttataagaagatagctaggacgatcatatgtctgtcatagatggctttaaggctaa

SEQ ID NO: 145246 - DNA, 511 bp, Cannabis sativa
aattctcataagaggcggcacaacctttagtccatataggtggaaattagtatctcacaacttctctttagacacatcattccattaaaaaacttttcggttttaaccctctaaatttcaccattagtactctttcatagatggaacaaattgagtactatattgacttgttattaaaattaaacttaagactagaattttactagtgttaagataggttaccatcaatgagtaaaactctaagagagtttaggtcccatccctcaaaatttcatgctttaattttgtatggagattaagcgatttattataaccacacacttttcgattccaagaaaatcttgctagcaaaaattagtgtccattattacatggtcacttttctccttttgtatacttaactttgaaaacttaatcataggagattaattttcacacttacttaattgctcattaattttgatactaagcatatcaaaattaaacactaatttagacaccaaacatgtct

SEQ ID NO: 145247 - DNA, 564 bp, Cannabis sativa
ttatatatttgaaataaataaaatataatatatttttttaaaaaaatgtgattttgataatgtattttaaagaagttgatgtataatgtaacgtaaaaatgtgattttaaatagagaaaataaaattttagtaatatattttaaaggatagaatagaaaagttttggtgatatatataataaaatttttttaaaaaataaagctttagtaatatattttaacagatacttttttggtattataattttaattttttatacatattgaatttttttgaaaatttcaaaataatttataatacagaaaagtaagataaaacaatttattttacatactaataaaataaaaataacatgtgtgcaacaatttaaactttgttttcaatgttaaatataaattttgaattcaagatatcttaaactgattagatgcaaatttgaatccaaattcaatgttcaaatttcatgatatacaatatactatttacaagatcaaaggcaatctcaaaatcatttttacaaggatgaatcaaatgacctcacctcacctcacacaaaacaaata

SEQ ID NO: 145248 - DNA, 527 bp, Cannabis sativa
aagaggagacacatctactaccggtggaagcaaacaggcagcataatctgtaaaacaatgagagatagagtcaatagcagtactaatgttacggggataatagttatgaactttatcatttcttattctccatatagtatccaccacgatcgaggcgtaaagaaatagcttgtccgtgtccacccttttcgatttcagattccaaataaaagttacccaatcccagatcctgcctccagagtcctggaccgggaagattccccaaggggaagctctccacaaatggtacgcgacttcgcaatgaaggaacaagtgtttcatggtctcctcatcagccccacacaaggggcaagaagtgtcgtcaacgttgattctcttcccggtcactaacaagaaggccaccactttagatagttgtatattttccttatttggttaccactttgtcactaacaagaatttttataataaagatatgggcatcatctcattggctcgtgtactagagagtgaccataaagctttag

SEQ ID NO: 145249 - DNA, 596 bp, Cannabis sativa
  modified_base (467)..(468): a, c, t, g, unknown or other
atatttccgatcttacaaaaatactcatctttttttacttttacatttttactatcatatgtttttactgtattaagttttaaaaaatattgtgttaaaatgtgaaaattataaaaatactgtgttgtgttgtagttaaataaaaaaataactaatacaattaaaaaataattttggaacaacaactataaacaacacaaagacaacttcagaataacaaaaaaaataacaatacatttacttaattgcaatgtataaataatatcaagggctgggctgagatgtaaaattgtcttaaatttagaaactaagttagtaaatgtctccatttaaaaaaaataagaaaatatccaaatacaataaattaactaataaaatttataaaaatacatttatcacatatttttttaaaaaatatatatataataataaaattaaattaatataatttttttagtattgcatannattatattgtaacaaaaatgaataaatatactagatcagtaaatatatacagcagtatttaatatatcgtattactaaaaattaatgtacaatagtaataaaattatataccacaaagaaattataac

SEQ ID NO: 145250 - DNA, 557 bp, Cannabis sativa
agacaacgatctctgggcactcgaactattcccaccattgctgctgcaacatcgaactctgcccccaattctgtacctgatccatcccctgctgcaaaccaaacatcaagaaacaaaaggcctcgcccacactgtactcactgccaaaaaccagggcactacaaagataagtgctacttcttacatggtttcccacctggttatggcactagaaaacctgctgataacaacaacaggaaacaagaaactggttctaccagtcgaaaccaacctcaaacatctcaagtctccactactgattgctctacaaatcaactcacttccgcacaatgtcaacaattgatttccatgctcactcagcaactaaatcccacaccagatgcctccacttcagatgcaccaattgcaaatcaattttctggtaaattcaatacccgatctcctttcaattggattattgacagtggtgctacacaccacgtttgttgcaacttacaatgtttttcttccataacacctaattttaataccaaatatgtcacattaccaaatggctc

SEQ ID NO: 145251 - DNA, 777 bp, Cannabis sativa
aaatcgtatttttgtaaagaataattggcggcaaaattcttttatgttttaatttttatatacttaacccaccttatctttttttagtgacaaaactcttttaagtttattttccttaaaaaaaattgagacgtcaattaaatataaccattaaatacaaattgaataattattgtgtacacatatgtatacatgaaagtaaatcttcaaaatcaatacaataataagctagttggtacttacaataaaaggtagctacctttagtgacaaacttttagtcacaagataatttttttgtgactaaatataacttttagttataacaaaaagttacttgtgactaaaacatagttaaattgtcactaatttacttttagtcacaataagtatgtgattaaaagcacatttagtcacaataaattataatttttgtgagtaatacttttagccatagaccttttagtcataacataaaaatgatgatttataattagtcacaattttttttttcttttagtcacaagttttgttgtgactaaaaataagatttttttgtagtgtttaacggtgatatcccactactacaaaacaagcctttagaggcgttttttttcagcataataattaataaccgacgccatagggttaaaaatttttagaggggaatttgacgccatttttggcgtcggttatttggaaataaccaatgccatagggtgtgcccccctatggcgtcggttatttccaaataatcgatgccaaaagggtttataacc

SEQ ID NO: 145252 - DNA, 684 bp, Cannabis sativa
ccaaaactttcatgatgaccttacaaagaacattacaaagagcaataggacaaagatcccccatcttgaccttgtttttctcgtttttaagtaatgaaagatctcaaaaaagatgaaaatgttgtccaaaattaatttaccaaaaataaagcactttgcgcatcagatatgccattagaaaggaatcccttaagatgatcaaccaaaactttcatgatgaccttacaaagaacattacaaagagcaataggacaaagatcccccatgtaacgccctaatccataggaacgccacgtgtgtgattttctaaaactagtttaatactaatatattaattaattattaaaaactgtgaggatattaaaaacttgactaatataaaatactaaaaaaggatattataatggcagtaaaaaggtgttccgcggatccctgttataaaagatttacccaaaagacgatatacaacaacaattcaaaatatagctacaaccagtctaaagcaactcctgaaaactctacacgcaggccggtggggtcaatatgtacattgctggagaagactgcaatctcatggttggttgttctaactttgccttgcccttacctgcaccacagagcacccatgagtcacatagactcagcaagaaaagtaataacgaaggatacattaaatagctaatt

SEQ ID NO: 145253 - DNA, 609 bp, Cannabis sativa
ctaaaatgttacacatagttttaaaatatttattcttactatatatttttaaactatatttttaattttttttaatcccaatatacctttttatcaaaaccaaaaaacctcacattcatctctctctctctctttggtgaagtgagagagaaggcgtgggtacctagatccgccattaaagcaagcgatctgagttcttacattcttgaatttcttggtgcgtgcatttgtggagaaatgaagaagaagaaaataagaagaagaaaagaaaagtgactgggggacacgaagaagaaaaatatatatattttttttttaatttttaatttttttatattttaaattaatttttaattttaatttttaaattaggtggactaataaaatttactatgtgtacatttgtatacactgtggtaatccactttggtacttaacagaccaaagtggacgaaaatactacagaacacaacgattgtggaggttggagaatatagtaatatttttttttagtatggaggttaaaccgtgccaaacttgaaagtttatggagtttgcccgcaaattacgtttattattttaattatgtatcaagtccaatataattta

SEQ ID NO: 145254 - DNA, 525 bp, Cannabis sativa
tttgaaaaatattttttactttttcaattttaaaaatagaaaactgattaaaaagtgttatcaaacgtcaccttaattaggcgtagattattacagctttggatatgagataaattataatttaaaagatacgaaaatgaggagggagaaaaaattgaagaaagaaaataataataggcataaataaatactaattaagttgagacaaaaccttttcatttataatctgggtctttgtcgttattggttatcttctaccttcctccaacacaattatcaacttcatccataacaagttctctattttaaaagttgacctttttgtatatgttcattcaaaattatcattttatatcaaactatagttcaagacataataataataataataataataataattaaacactagaagtcttatatatatatatagggcataactactgtacgggtggccaaatttcccctacgggtagggaaactttttggtccgttgatgaaaaaatggatggtgattaaggtaag

SEQ ID NO: 145255 - DNA, 583 bp, Cannabis sativa
tccggatatttctgttgcatatccgtctcgagttcccaggttgtctcttccactttactgtttctccatagtacttttaccagtgtaatcgtcttatttcttaatactttctcccttctatcaagtatctgcaccggttgttcctcatataataaatccgactgaagttccaatgcttcataactcagaatatgggacgagtctaagacatacttctgaagcattgaaacatggaacacaccatgtacagctgccagcgctgggggcatagccaactcgtatgctacttgccctatcctctcgaggattttaaaaggtccaatgaaccttgggataagctttcctttcttaccaaagcgtttaatgcctttcatcagtgatattcagaaaaatgccatttccctgacctggaaatcaatatcccgacgctttggatctgcataactattttgtctactctgagccgagagcattcacgctctgattttgtcgactgcctcagtcgttctctgaacaacctcgggaccaaagaactttctttcacctacttcatcccagagaataggtgatctacatttccttc

SEQ ID NO: 145256 - DNA, 1038 bp, Cannabis sativa
  modified_base (364)..(364): a, c, t, g, unknown or other
tatggtcttttctcacctttcgaggatgaagctcttgcgattcatgcaagtttgagtttatgtcttcgtttggagtatatggtcatgtgattgtggaattggattgcctcaatatcattaatgccattaacaagcctattattgatcactattatatagtatgcattgttaaagatattattgggtgttcactactacaattatgggctttagaggcagttttttttaactcattttataaaaagagaagctaaaaggtgtaaaaataccccctagtttggaattgacatttacaggcggttttttggtaaacatcgtaggtatagaatttaattatatctatgtcgtcggttggggttggggnaaaattaagggtttttgattaaccttatgacgtcggttattcggtattaactgacgccatatggcacctatggcgtcggttaatactaaataaccgacgccatagggttatatatcagatgcccatgcttcgtcttccttatttcaccatcttcttcagcacgaagaacaaccaccatagcagccccaaacccacgaaaaaaccctcgccaaccaccacgaaaatagcctcaatcttcctcatttcttcaccattttattctatttttgtcttaaaatcttttattttcaatacctaaacctacactgtaaaaaaagtttggttttttcccctctatatatcaaaccgaacctattataaaaaagatggtggtataactccgaccaccaattttaacagagaaaacattgaatctcaacgtccattaatgtataaatacgatttctattcatttttattaatgtacattggtattattttgtttttgtaaatttttttggggattttttcattttagtaatactatattgtgtgtgctataggtggccgaatttttgtcgcaatttgtcgccgcattgcgtttataaggtaaatatttattaacttgatatataatatatgtaatattttgtattttattattgaatatgtgtttatatatattgtgtgtatat

SEQ ID NO: 145257 - DNA, 681 bp, Cannabis sativa
  modified_base (159)..(159): a, c, t, g, unknown or other
  modified_base (319)..(325): a, c, t, g, unknown or other
  modified_base (493)..(496): a, c, t, g, unknown or other
ggatataattcaaaaaattaacttaatgatctttgaactgcatatctaccaaatatttctcccccctatcagttcgcaagatctttaaccacttactgtaatggttttcaaccatcgctagatcctagtaaaatatttcaaacaactggcctcagagcnatggtaatgatttactttcaagaaatatgaattaaaacgatgtgtgtgttgatttggatggtttcatgatggtttatgtgttacttgatgaatgtatgtgttgtataaaatttttccatgaaaatattttttatttgtttctaaaaatattttatttggnnnnnnngtgaaaaattaagcaattttggttcttacaaaactcgattaaattatacttagaatgatatgaaaataaattaaattattttccattagtaataattttcaataaatattttgaaattattcaatttatgttgatccaaaattattaaaaattaattttcaactcaannnnaattttctataaatatatatagcagaattcgaaaatctaatgtattgaaaataaatacattttcgaaatttcttaaattaaatatcaaataggataaatgatttaaaaaaaaaaatattttcaatatcattttctaatcttataatttaattaaattaaaataataaaataaaccaattgtaaaa

SEQ ID NO: 145258 - DNA, 787 bp, Cannabis sativa
aaatctttctctcactttcttacagctcagtaattttataatattttattagttgtcgaaaacctcggtcaacagttttaaacactcgctttatatttttagcgacaattctaaaaaacagttttaagacgtcgtgaacacccttttatgtattagtgatggatgtcattataaaaatttgcatggatactgtatagtaaaattgatgttatctatttttttaataaaaaattaaagctaaaaaattactattgttaaaaattagaatatatgtatagtgatttaataataataataaaaaaatttatatatacaataatttttttaaaaatgaatatatataatagttttattaattgacagttggaaatttaatttttcttatatttttttataaactcactaagaattcactaaaagactgactgaatgtgacttttagtcacaacaaaaagttagttgtgattaaaacatagtatttaataaatacaagttgtcactaatttagttttagtcacaataaatgttagtttttgtgactaatagttttagccacagacattttagtcacaacaacggaatgataatttataatcagtcacaactattttacttttaatcacaagttttgttgtgactaaaagtatgattttttgtagtgactattaaagtgttttgcaaagtaagagtgccacaaaaatgattggaagagagataaaacaaaatattatatttttgaataatgtgaaaatttttaacttctttaaagaatactatcattgctaat

SEQ ID NO: 145259 - DNA, 1386 bp, Cannabis sativa
gtatttaagagtccttactataactcagcctctccaaacgggtgtaaagaaaaatgtgtgtgtaaaagaaattatcactaggtgataatacaaacaaaattgttctatcctaactttagtttataaccaaagagatcaaatgaagataagaatttcattttatgctatattacaatgtcttatgctatcttagaatgtcttatagctattttatataccacctataaacttttattgttaacttaatattttgtaattagtttaaattaataatttaattttttaaatttaaatttatatttaataaaattaacacttatttattaattttaaagtttctaatttgttaaaatttgaatattatttttaatctaatttttttaattaaattatgaactttttaatttatcaatatttaaaacttaatacatttctctattatagtgatatgctaactatttttttataacatctttaattatcatttcaattttttaatttatttaaattaataatttttttttatcattttaaagtttccaattatttaaaatcaacaaattaatttttaacattttaaaattaccaacttatttaaataaatttttttaattaaagtctaaactaattaaattaccaatatctaaattaaatttaattaatataaaataaattacatataatatttatattttttaaaatttaacctgttatcatatatataatattagtgatattctaactattttttataacaaaatttaattataatataaatttcaattaaataataattaattgaaaatgttatgctactgaaaatttgacaacataacattttacaattgatcatttctaaatttttaacacctacacaaaaatcacaaacacaataccaaaatagtttaaatattaattttcgccacccatccgatcgcaatatatttttcacagaacctacttcactatggatgaatatataagatattcaaactctagtactaaaccgtcgggtataaccctgactgaaatattgcgttttaacttaaaatcgttgcgaatttccataacgactgttctaaactgccgggaatactcaatttttcctgacagtttaaaatagtcatttaaatttattagcgatagtcttaaaaaaagtatttttaagactgtcgcaaatattcctttttgtagtagtaactttcggataaacttcatttttctattacaaaacatataataaaagcatattaaccttccgatataacaaggagtgattttttccagataatgagcaaaaagatacccaaaatatctatttaccaaaaaaatattaaaaaattaaaataataactatagtactacaataatatacacatatatatt

SEQ ID NO: 145260 - DNA, 803 bp, Cannabis sativa
taattaacttatttttattcttcctctacaatcctcgaacttgtgacctgaggcaaagatttaaggtactctaccagcaagaccacaaggaggtaatcaactaaataaaaagttttttttttatttatttgatgtgtttgtttttgtaaattaacatagataaaacaaaaaattatttaaattaactaaatttaatagatattattataaatatttatgatgtataaatttaatttcattataaatatcaattaaaaaaatctaagtgatttcataataaatattttaaaattttaaatttaaatttttattttatcattttaaattttaaaaataatttattcattaataataactaatataaataaaaaatataattaataagtaataagaaaataaaatatctaaaataaatcaagaaaataaatatttaaaaccaccacacaaatggcggtaatattacctagtttatctaatatgcttagcatacaatatttaattaatgggtaaattgcggcaaaacccttaatagttttattttacttgtacttaacttccaaaactcaaattttgacggtaaaacccccaatacttgtgttctgctagcaatttaatatttccgtccattttaggtgttaagtgcgatattggactgtccacgtgtgcatctacgtgaacacaatgtacacatgacaaaattttgttggtccttgtaaaaaaatattttaaaaaaaaataaaaaaataaaaaaataatttgaaattaaaaaaaattataagtaaagaaataatttttttcctttc

SEQ ID NO: 145261 - DNA, 504 bp, Cannabis sativa
tttttagtttaaatattttttttttttctgattttgaggaggggatttgaatttcagactttctctttattaataaattatattttaattttttattatatcattgtatatattatttattgttaataaataaaatgtatatttttaaaatattattttttaagtatcttaaggtatacttaatgtaactttagttagtatttctttattatatttattaaatcaaaatgtatggactcaatattaaattatactaataacagtttgacatctcttgtgttgcctaactctccttgataataattgaatcacatttaatagatttggacttaatcaatataatccagttatttattggatattgaatttaacatatgatctaatctaattgaattgaattatccgatctaatagatgtattagattggatcagttccaaccattagacgcattgattggttttctattgaattggattacatccatccaatccattttagctac

SEQ ID NO: 145262 - DNA, 607 bp, Cannabis sativa
gagagagagagagaagagaagagggtattttaaaaaatgaaaaagaaaaaaaaaaagaaaaagggaaaagatttttttttaatgatttttttattttaatttttttaaatacaattatttacgtggaccaataaaattgtgccacgtgtacactgtgttcacgtggacaatccgacctggcagttaacagctaaatttagatggaagttgtaatttactaacggtattgtggttttgggagttttgccgccaaaatttgagttttggggttaattgtaagcaaagtgattaggggtttgccgcaattaacccgagaaaaaaataaaagaatctatttatctttgtgtcataaattttatttcattaaaaatacaaaaaaataaaaggtttctctaatccaactagagattctcacaagatggaaaattgacagagagtactccctccgtctctatctccattaaggattttaatccttatccgagcgtatttcctatcagggatggagtgaggaatctcctaataaaaaatataaagtttataataaaaaattaaaaatataaaaatattaaattacataaaaataaaaatattacacattaattat

SEQ ID NO: 145263 - DNA, 500 bp, Cannabis sativa
  modified_base (145)..(153): a, c, t, g, unknown or other
tacaagtgttggtagtttatgaatcacaacaaaaaagcatgtatatacattagcacatacatacactcgaatatccatatcacacattatacacagttcttagctgattttcgaattcaaatgtgttggccgacctgaacggaannnnnnnnntagatggatgccctaatcacatttgaaaccgggtaagttacatgatttaaaacctattcccgggaaacccaaaaccgaaaccctaggttctgctatgctcataatggattattctaactctggaaatggggaaacacccatccgaggcactgcaaaccggctcgcctgtttgcaccagtattcccaaaatacttcatcctttgctcaattttccaccaaatgttaccagagtacctacccaacgtattcaaaacataatccaaccagtaattcacaaaaaaacacaccaaatcaatttatgccattaaagctcaaagctttgaactcaatgttcaaagttacataaa

SEQ ID NO: 145264 - DNA, 916 bp, Cannabis sativa
gtatgattaaccatggtaccaaccacttctcagtactctagttttactggtattggtagcattaatacatactattcaatattacctaatatattagatatcaataccttagtgcaactctatgtacagttatactgctatctctgatatgctaggtacatggaaatatatacatgtataataaacatgtgcatatgtgcatctgaatagttttcttaccttaatttttgatttaggtgtgctggtcaatttgagtggaactttgcttggcgatcgaaagccctaagtcacattaatagctaactggtaagtgtctcactaaaacactttctaggattaaaatccaaaatttgaagtttccccatttctaaatagggtggcaataccctaaatatctctgatatgctaggtatattagatatcattccctttatcttaaaaagttcttcttagtaaaaagagctttttaataattccagagggcattttcaacaagatcttttcttggaaaaaatgcatcctttgattctggcgattgtacgatttcgagggtcattatgaatcgtctcttcatattctgcaattctcccaaccgttggatttttcaatacttagctttcttgtcactggactttgtgtatgaaaggacagcttaagcttatcatttttcataaacctctagctctttagtgagatccattttcaaaatggatcatctctttcctgccaaaatgtcccttctgagttcaaaagttcatccccccaaactcataacatccagacacaccaacccatttccatttgtttccaaggacttcaagcctcaaccgaagccggaaatgatgaattccaaggctgaggagcttccgaccaatccaaatcaggggaaccttgtagcccgccatgggcgatcctc

SEQ ID NO: 145265 - DNA, 758 bp, Cannabis sativa
atgcattggaagaaaagaagtaaaagtggaatgtgtcaaatctcaagatcaagcagcagacatttttacgaagcaactcaagagagaaacattcatcaaactacgaagtattattggagtcacaaatcaagtttaagggggtgttgaatccctttggaaattctgtttagtccctagaaatagttaaatctaatattttttgaaaatggagaagatgatcgaaaaaaatctcggaaaacaccataaaaaattgcctaggttgataaaatgtcaacctgggtgcagggctagccccaggtgtcaacctgagcactaggccatgcttttagcacctaagaaatgttgtttcttctctgaaaggacctatttctctatatatttttgatgaagacgaagaagataaaaaagtcagatctccgatttgatacttggaaggtgcctagattgacaaatttccaacctaggcgctgggtgctcagggtcccggggccctaggtgctcaaaaatgaacttgattcgattcttattttaatgtctcagatatgtcaatggtatgtctagttgatgtctcaatgtaagttttgacccttttgtactaagatggtcctataagccaaaaccctagttgggaatgtcaacttgcgccccaagtgaaaccctaggtgcccaagttggctttaggttgaaggctcatgtaatttcagctcttggggcttgtattaggttgctccatgtcttcatggtacagaatactgaaa

SEQ ID NO: 145266 - DNA, 582 bp, Cannabis sativa
tgtgtgatatagaattatgtgagaaagaagagaggaaaaaatgttgttggagattccacaaatgtgaaagattacgttcatttttattcagcttcttcctttaatcattttccttcccttacttgaacaaaaccctcagaaatccatagctgacacaatcttcccttcggaagtgaataatcttctagaaaagttccaaaatacaataagcaagatttgaggtggaaaggcaaatcaacatagctgcaagagagaatttcaaaaattcttacgagttgaggatttgttttgaactcaaaaaatcaatatcattaagaactttttcccattcagattagaccttcttttttctagatagtaaaacagctatggcccctaatgcaagtggtaagcatcgacattttttgagaatctcataagataatttcactaactcttcaaggtaacaaccattaaactcatgtctaaatggctttttagaaaaatagctcaagagccattttattgtaaaaaaaaaaaattatttcaaaatttattataagcttgaggcccaacactagcttgaggcctcatcatctaatt

SEQ ID NO: 145267 - DNA, 834 bp, Cannabis sativa
taaaacccaacaaatataacttaatatcttaatttgaaaattgagatatttctaatattatatttcaaatcttataatttaacaaaaataaataaatttgaaaataggaatttatggttaagatattatcattttatttaaaaatatataaaataaaatacctttcatttcgaaaattttagtgttagaaaatcctacaatatcaattaaaaaatatataacaaactattcaaaaaaaaaaatcatgttattttaacataaaatataaattttaataaaataatattctaataagataaaatgtcaaataattaatatttatctaatcttaaaatttaaattaataaaatgtatttaaaaataataaatttttgaaaattgatatttatggttagcaatttaaaattatctagattatctttaaattttattactattttaatgtcaaaataaaatcatttcacattaaatatgtaaatatagggataattgcggcaaaagtccccaaaaacttaaggttgatgcaagttagtccccaacctcgaaaattggcggtaatagtccctaaggtcgcaatatttgtaagtccattagtccttttttctaacggatcgttttctaatttaaaatgtcacgtgtcaataaataattggtccaaattttaattttaattcaaaataatttaaaattaaaaacaaaaaaactaaataaattattttaaaattataaagtattatcttttcctttttttttcttttttcgttttttttttcttctttttaaatttttacctcacaaaagacagtatcacaaacaattatcgttctagcatag

SEQ ID NO: 145268 - DNA, 543 bp, Cannabis sativa
cggaaaagtgttatatgaaccatttcgagctttcattataaaaaaaaaaaaaagaatttgtaattacatgtcaaggtgatatatttgtatacctaacttcttatgcatagaaaaacatttggtcactagtcttgatacaacttgtatttgtagtatttaaagtaaaacttccacatatatataaactatgggatacgattttgtctcgtaatgtactttcacagaatgtattctgtagtacattagatgggtctcaaggtacattagatgggtctcagtgtacgttaccatttttcaactctaattacccctagatcaaccctagccctcagatcaagtaactcccccatctaatggctggcgtacatcacactacaacaaatttcagtattaccggcagagacacccgccggtaataatagacgagaccgccagcattaattaataccggcagattccgccggtaattatccgccggtattaattggtcgctataagtgattattaggaacgaaaatggtattccgccggtaataatattaa

SEQ ID NO: 145269 - DNA, 580 bp, Cannabis sativa
tttcgttttgaatttcttaggtgtagaggagagtttagccgtagtaggaatcgtttttcctcttcgtttctgagtatgactggttttggtctcagtattaggtgtggttactttcctgggtcttcctcgacgcctgggagtggattctacagagacttgaccaagggcaaaagtgccagtaggttggggattactagatagatcgctgtacgaggttaatgaattttgagattcattaatggtttcttcattactcttgtttgctgagatgggaggaaaagcctttttatcattatttggcattggtgctgggctgagcaggataccgtccgaggccttccttttccgtgggcccttcaagtgttaatttgtggaccctaaaatcctcaatgttgaggatggggttgaagagttgaggctcacggtggaatttgtccacggttagagatccaaagaggagttcttgggctttatcttgggcccaacattattttgaaggccatgggacaatttggcactactacaaaattcactattcacgtcggtcaacgcgactgttcatcgcgttgaccgacgtgaa

SEQ ID NO: 145270 - DNA, 593 bp, Cannabis sativa
tattatgtaggtaatataaaaatatacaaatctaaaaaaatagatagaatactaataattttaacagtaacaaaattaatatgtgcatttttttactttaacctaaaaagataattaatcaaaactcacacatgactatagataaaaaggtcattaataattgaaaaagaagaagaaaaagacgatgttgattaagaacacttaaactcttttttcttcaaatagtacaaccacaaacccaaacatatataatataaacatataagtaaaatatacaaatttacaataagcatatctatatttcagtagttttatggtaataatttttcatataaaaaccaacttgatctacatcatgaagatttgggttgaacatgtggtgatgaaggagactgcaacagatcgagtttagaggcggcgataaatgtgagaaacaaatcataatagccttttgattcacttagcaaaagaaaaacaaaaaagcctttagattattaatttttttagtagaaaactctctctaaaatagttggcatataatgctttggttgttcaagtaacttgggaatagctagtatatctattctatataa

SEQ ID NO: 145271 - DNA, 823 bp, Cannabis sativa
gtcctactttactttatggagatcgaaactttagcttaaatgtacaaagtaaaataaactgaacaacataatttcttatcagaaaaatatccagatacacatgtttcataaataaaatacactaaggataataaagacaaactcccactgaatctagatatcctcatagtctaagacacctatacgagcagtgtgctcatgaaagaccttgggtggcaaaccctcagtaagggtgtctgcaaccatggaggttgtacctaagtgttttctacaaatttgtccactttgtactctttcttttacaacaaggaacttgatgtcaatatgttttaacttcgtcgagctcctgttgttgttaaaatacaatacaactgacttattgtcacaatacaacttaagtggtctttcaattccatccacaatgtgcagcctggtgacaaagtttctcaaccatatgccatggttgaatgcctcataacatgcaacaaattctgctgtcatggtagatgaagctatgagtgtttgttttgcactcctccacgatatagctctaccacctaacagatatatgtaaccccaagtggatctcctactatcttggcatcccgcaaagtcggagtcagaatatccaatgatctcaaagtgatttgacctcctatatatgtgagcatgtaatctcttgttctcttcaaatatctcataacttttttggttgctttccagtgattaattcctggattacttaagtatctgcctaacactccaacaatgcatgctatatccggatgtgtacaaacttgagcatacattaggctcccaacag

SEQ ID NO: 145272 - DNA, 642 bp, Cannabis sativa
atggggcccacaaataattaattttataaataattataaaaatataaaaaattagtgcaaattgcctttactaatccaaattagtaaagcggtcattacaattatcttctattccgcttgcgagaccaatatttttacccaaagtcactgttacttttgaactaggtaaccttgagtttgacattatgtctcttaacccttaccaatcaaagatcccacaggatgccagtgtcactttcgaggctgaactcatcgaatccaaggttaggtcgattggggcctacattggcggcatcttaaagtcctacagtatcaagcagagaaagtcataaggttcgtggctccaggggaatttagctgttttcctccaagaaagggtaatacgcgaggagtgaaagggacctagcacaagtaattcctcgggcattggtgcctggagcctcgagcacatcaaggttggggttgttcttccccttaggaattactttaaggagttctacaactacctcaggattgccccattccagctgaaccccatctcgtataggatcctttcgagcttgaatgtcatatatcatattttaggatgggagtgccctactcctttggagatagcctatttttactcagtcaaggcagttc

SEQ ID NO: 145273 - DNA, 586 bp, Cannabis sativa
atacatggggagaacaacgttgatcaattctgtaattttggccatccatacttattgggctcaaatttctatcttaccaaagaagttgctaaaagatattgaagctgtttgaagatcttttttatggaaaggcacacaagagagctcaggtccaggattggttgcttaggataatatttgtcaaacaaaaactgcaggaggtctcggatttagaaacatcagaaattggaatatagcagccatgggaaggtatgtttgggacattaaaagtaagaaagattatttatttatcaaatggattaataatgtgtatttgaaagatggtagttggtgggattataaaccaccttccaattgttgctggtcatggagaaaaattgtacgtgtgaagaataagctgaaacaaagaacagattctactggttttgtgcagcagagacataaaattcaacatacctatcaacttctttttgataacagggaaaggctctcttggtccaagaatgtttgggataggttaatcattcccaagcacaagtttattctatggcttgtgttctggggaaggctaaacaccaaagagagg

SEQ ID NO: 145274 - DNA, 635 bp, Cannabis sativa
gttcatatttagggtgttagacaacatacttgtgagtagatctaagatccttgtaaaataatatccaacattaatatatttaaaattaacttagatatgtttatagacatcttaaccataatatttttcaaattccaaattagttattttgtaaaatatttaattgtttataaattataagttagaaaaataatatttcatatcattttacttatcagaaatttataaatagtattttaaatgtttaaataacctagtatttttgtaaaattttgaaaaagacttaatttgagatattttgacatataatttggataattattatttttttattattttatcataaaaataataattgcctaaccatatctattttaaaattggtttattttttattttgattttattaaattataagattagaaaatgatattgaaagtatctatttagttattttcaaatcatttatcttattagatatttaatttaattttataaaataatttaaataacctacatattttaaatttagctagaattttaaattttaaattttgaagagatatttatggttatttttaacaaccctaaatttttaaaatagttggttagttaaaataataatttaattatat

SEQ ID NO: 145275 - DNA, 993 bp, Cannabis sativa
tgcaaactcgtagaggcctgactgatccggcaaattcacagacgctagatcctacatcgcagaacccagggagcacaggggttccacctgctgtaaatccttgacaccggcaagcgtggggaatggtgaaacagttcttattaatggaattgcacctggtgtacaggagactgggaataacagttccgtacccaaccaaggcgtccataatacgactgtttcacctggaacaaacgcccagacgaccattggagatgctactgaattacaaaatccctgtgacatgctcgaactcacgcagggtcataacaacaccctgcttcatgatcaggacgaactgcgtgctgcagtgattctcgcgttcgacgaacaaaggcttatgttcgctgaatggagagataaagagatggaggcactaagggctcaccatgcaaagagcctaccaaactgtaggtcagcaatcgccgaacgtcattcctctgggataaacggaagaggatccaacgatgaatacttcccagactactaatggtcagccgcccaatccccagtcacaatttccgctcgtggtcccaacggtaggcgagcagaccttgtccgataattcatcaggaggagtcatacctgatggctctaacaagatcaatgataccattccacccgtcaaccaagcgaatcaatcgctaagggaactaggcacttctgtgttcgaaaggttgggagcaacccatgacctaaggaatgatctaaatagaaggagggcaacagatgttccaaatgttacggcaaccgtgcagcccggagcccatactcaaatccccgttcagaaagatgttgacgtaatccaagttgaccagaatgccgagcaggttagcctagtcgtacaggctcagcttgacgaactaaaaaatatgtttcacggcatggctggacaaagaaataatgagcttgagttaaatcgagcacgcagaactcctttctcgccggagatca

SEQ ID NO: 145276 - DNA, 600 bp, Cannabis sativa
  modified_base (46)..(63): a, c, t, g, unknown or other
actatatgttttggatttaatagattttgtacacattaaaccatannnnnnnnnnnnnnnnnnaaacataaatgacttctaatcttccattgacaacaaatcatattatattggaatgggttttatttagagcataaaatcccaacaaactcccactcgcactaacataaaacaagtagtgcatttcaatcaatcatttgtcttgatatccagatcaagtgtagtgtacttgactaaacccaaattacaggaactgtaagtctgtggtaagcaactgctttctccaccattacttcctttgtgttcataaaacattacgcaacatcattttctatatgcattactcatctagggatactgaattctttactgtttattaagtgcatctgaatatacaaaagacatatctctaattatatcagaaagtgggatagagataacacagttaagaactttcttaagttgaataactttccagtgctttacaaaaccaacaaagttttgtatcttcactgatggagcttaaattattattagatggatttttacatccttctagaataattcctccactctagagtaaccaccatctcgaatagg

SEQ ID NO: 145277 - DNA, 620 bp, Cannabis sativa
aaatttcaaattttttttccttccttactcttacacactcgttagtgttctcttaaaatctcaccctacacatgtcgaaaaattgtgaaatttcaccgcgatgaagccaagactgttgtgcatcacttttctattggacacaagtactaccaacaattattttaattaaaatagtaaaaatttcacatttctgatagtggttcccctttgtgaaatgtggcccagacccatcttagaatattttttcccactagtcacaatgaattcgtactataagacgtgaatatgaagattggttttgcgttaaattttattaaaatgaccccctaattaaaaaattcaaaatattcatcttttcaaggtaaattttaataaatttttttcttagtcttatacccgttagtgttctctcaaaagatcaccctacacatatcaaagatcaccctacacatttctgatagtggtacccctttgtgaaaatgtgacctaaacccatctggaatatttttccccactagtcacaaaatttttttactaataagacgtgaatatgaagattggtttcgctttaaattcgattcaaatgaccccctaattcaaaaattgaaaatatttttctt

SEQ ID NO: 145278 - DNA, 1351 bp, Cannabis sativa
tatcagcaatggatttgggtttgtacttttgtttgatttgttgattcaattcaaaagtacgcaaagaactcatcaattcttccaccttcattgtactaaaatcttaagcttcctccatgggcaaaagcttagtatcaaacttgtctggaagaactctaacaatttttctaacaaggacagaatcatcaagcttttcaccaagagcaaaatattcattaactatatcatatagcctttcataaaactcagtcagtgtttcattttcagacattctaagctcatcaaatttggtttgaagcataataaatctagaacgctcaacatcagatgttccttcaaactgagtttgaaggatctgccaagcatccttagtagattcataagacaatataagtttaatataacattcacctactccattaaatatagcatgtaaagctttgctattgtaagcagattgtttattatcttcaattgaccaatcaagttcagattttattttaaaattaccttcagaatctgtcacaacatgagaagaccatcctgatagaaccatcctccaagctctctcatcttgagacttgatgaaagccctcattctaactttccaataaggataattagaatcattgagcaatggtggtctagaaatcgattttacttctacaaaaaacaacatattgcataaaaacacacaaaaatgttacactaagagtttagtgtcctgctttgatgccaattgaaaaactaagtttttgctaatgtcgataattattacagaaaaacagtaaaaatttaactgtaatagtctgcagcagcagaatgtaattctgttactgtagaaaacagttttgcagaaacaaactagaatcagaataataaaaccaacaaaaataaaaataattacagaaaataaaatcacttgacacaagagatttgtacgtggtatcaatgttctttcgaacactcctagtccacgggaccacccctagagaaagaaatcaattagtaaagtctcaaaaattacaaagacaattgacttatacaagtttagactccctctaaatctttgccggaatcctttgtaacacaccccacgaatctgatttctgaaccaccttcaaacagcaaactcccttcgtctttgaggtgtgagtgcttacttcttcccaaagtaaggcttgaataagtcttctcttgaagacctttctcttattcaatcaattgttctaaccaaccctaagagcagtataagaacagatatataaacactaaaacctaaatgaacaactaggttatcacaaaaagaactctctcttcacaaatgagaatatgcaaaaaaaaaaaaaaa

SEQ ID NO: 145279 - DNA, 540 bp, Cannabis sativa
agctcaaacggagacgtagccaatttattggtgaacttcaggaaaatctggtgtattctaactctaatctttctgtttttgtgtgtgtggttgtgaatagattagaccattttagatttgatcttggtgttgtgtttgtgcttggatttctgggtttgctagggtttgggttcgagtttctcagagagaaattctctgctaaggtttctaaacctaaacctagtgaaagagaaagtgatcgagaagagtctcgatcttttggttttgttcaaagacaaaacgaaaccattttggggtactgactttgaaaagtcagtggaacagtgaaaggtcaaaattgaccttgaaaattgattagttttgttttgttggtgtagagcaaaattgtaaaaagcaatttaaaattcctacaatggtatcagagcttggttaaagctagaaaaagaacaacattcaaactaatcaagaaggaaacttaagcaagaaatcaagaaacacaaacaagaaattcaagaactcaaccagatcaacttgaaatct

SEQ ID NO: 145280 - DNA, 573 bp, Cannabis sativa
  modified_base (384)..(388): a, c, t, g, unknown or other
tataatgatatgtgtgaattagtcttaatctttctttatttaattgataacattcaagatgaattagctaattagtttattttttaaaacaataaaataaatatataaaaggagtgtttgagatattgagaaataaaataatgagtaaatattattttaaattttgtgttttgtaaaaattattgattatattctttgttttgttaaataacaaattggatttgtaaagtagtatctataactaattttttgttaaaataaatttaataataaactaatctcaaagtgttataaactttaataaaatagtaccaggtattacattctgcatttgttcatgtcaaaaattgtttaaagttagatttataaaaaaaaaaataatannnnnataaaaataaaaattaaaaattgagcttagtgtactaatttaaattatttttgtaaatatatggtttaatttattatctcaaaaaataaagaatttaattaataatttttacaaaataaagagcccaaaacaatattatagtatttgatgagaaagagtgtacaaaaataagagatcaatataac

SEQ ID NO: 145281 - DNA, 757 bp, Cannabis sativa
actgtagcgtgccttagcattagggcgttacaacacatcctcaaacaacacaataaaagagctagagattcaacttgtaacactgaaaaaccacacaccaactcatataacaaatggtctacaaaatatctacaaaaaataagataaaaaaataatgaattatcccgtaacaattatattaaaaactaatagaagaaattatcaatagttagaagataatcgacgccaacagggtttataaccctggcccagcccatcatcttcctcattcgaccaaccaaccaataaacccccaagccaaagaaaccccaaaccctctctgtcaaccaccacggaaaatcacccccattttactatttttttcaccattttagctcgtttttgtttctaaatcttctatttttcatacctaaaactatatacctgaaaagattacatttttcctcattttatagggtaaaccaaaagtaaaggtagtgcttgtggtggttatacctccggccaccatttttagtggagaaaacaatgtatctcaacgcctattaaggtataaatataatttctactaattttagtaatgtacattgctttattttttattttataaattttttagggttttctatattattaactatgtattatgttgtaatgagtatgtatagtgtgtatatatattgtgaatgagaaatgtgatatagaagagtatatatgtatgtattttgtgttgtattaaatatgtattgtgtgtatatat

SEQ ID NO: 145282 - DNA, 1240 bp, Cannabis sativa
caagttgaagcagtcaataagacactcaaagataccctaaagaaacgacttgaagatgctaaaggaaactggccagaggaacttcctgaagtatgatggtcgtactgcacaactgagaaaacagcgaccagacagactccatttgccatggcatatggctatgaagccatgctgcccgtagaactcgaaccgccgtcccacagaagactgacatatcaccaagaagttaatcatgcactccttgcaaagtcacttgatgaagttgaagaaaaacgaaccgcatcaaacttgaaattgatagcccatcaacaaaaagtagctcggtattttaacaaacaagtgagagcacgaaaattctttgtgggagacatggtcctaagaagagtatttttgaacaccaaagacagtacgataggtgtgctcagaccaaactgggaagggtcgtatcaggtggtcgaagtcctagaatcaggagcatacaaactgggtaagtatgacgaaaaaatgcaactcattctagtaccaaggtattggaactgggaacacttaagaagatactatcagtaaaagtacctggttggatgaacatgttaagtacaaaacaaaataacatttactcttaagtgaatggcattctgggtggatcacgcccaaaggttcggataaaattacaaagtactcaggtcgggtgaccacttatgaaagtacaatttttattttctgcaatttgttttgtttatgctaatctaaagatcagattagatcaacataatagcttcaatgtaagttactccggtaacagacatattttcgaccaataaataaataaagatgtttattttaaattcaaattgagtcaagttcattagcatgttataaatttaccatctaatgcgtacaaaaggtatggtcatacgcaaggccccgaacagacaaaaagcatacttgtgaaaacaagtgaccaagagtcaaaagtctgctcggtcacttggaggcacctatacctttacaaaacatttggttaacaataaaacgaacacaattgcacaatgattataaacaagggatgaaattgattaataataacaaagcattcaaacccgagattaaaggttgcccggtcagccagttgtttaaaaaatgaaaaatattccaagtttaaagaccgcttggccggtgatgtcgcccaatttgttacactgcggtcgcggtattaaacgggctatatgtcgtatccaca

SEQ ID NO: 145283 - DNA, 580 bp, Cannabis sativa
gggagtgggacgttgccccagttggggtattctttcagtggcttaagtcatcttaagtatggggcactatactttgtatgcacttagtcaaatctatctttttttctttttcctcccttggtcaaatctatcttattttctttttcctccattgacattttttcttaaacctttgacaaggttctttgagttgaaatcatcaaaccaggttcttcaacaacctgtgattttgccccaatacagaagatttggagggtttttcgcactactctcccacagtgattcatcttccttatgatcataaagtgaacttatgcttcatcaccaagcacacaagcaataacccactacatctcaacaggggtctatctcgctgatagcagatagcttcaacatacaaacttcaaagtttatcaccctagttactaagagattaatggtgggggacaagagcagtcaagttcaaacagtatcaacgaaatttcaaacataatggcgacaaaggtaatggttaatgattgagcatcagcaaatattctaatcaaaacagaccttgaaaagaatgggtcactccctaaga

SEQ ID NO: 145284 - DNA, 826 bp, Cannabis sativa
cgaacaaagttaacaattttttgtcttttctgcttttcttttcaaaactttaattccctttcaaaaatagactcataatcatcatcataatcttcctcttcttcttcttcttcttcttgacaaaaacttacggtgagcttagatccaccaccctccggaccgtcatttttcaaacgtgtcagagttgtacaactgcctatcagtggtgatctgacgcttaaagtttggtgataatcgaagctgagacgcactcatacatgtggtgagaattttgatggaaaaattttgagttcacattaggatcaacgattatttaatggatggtcggtactcttggaattagcatcatgagaaaaacatcactcactaagtctttttcatcaactcactatttttatgtgatgagattttgggatatccttccctttagaagtattttcaacgaggttgttgcttgttgagctaacgagtagtggatccatgatctagtcatcaagagacttgttttgttatatgctgtgtcaagatccatcatcgatcctggaacaccattttaattggctaccgaaaatcatcattgtgcgtgactaaggtgagatctttgaccatatataaatagtatcatgttatatatcattggaaccagttttaatagaacattacaatgattataattattgtaattgaagctaagacactcatttggatcgtgcgaagttttgataccaaaactttgagtcgacattacgaccaattccagcgatcatttgacggatggtcggtaccattggaatcactgtgacgagaagtgttgggttttgtgccc

SEQ ID NO: 145285 - DNA, 946 bp, Cannabis sativa
gtaaatctgattatattgaaatcggttttatttagggcacaaaacccaacacactagtacgtcaaagtactaagggcatgtagtattatggctagttgtacttatactatggattaataataccaacactagtacgactagagtactaagtgcatgtggtattatggtcaatcgtactatggtcaagaacgttcgagactcagtcatacgtgtttgacatggtttatgacttgttgataagtgtattggcgcttagccgcaggtcgatcatatgttatgttttatgtttttcttactgagtatgtcgactcacaaatgctatgttatgtgcaggtaaaggaaaaattgttgttcaacggcagtgagtttgaagctggatgaagattgaacgtatcgagacagttcgacctagagtgttggatcttcggaacagctatcgctcacggttctgtagtcgttgtgtgacatcttttcattatgtatagttaaaaaatttaaataaaggatcccacattttataaatataatacagtttatgtttatttattaaagtttaaattttatcactttttgataaactctttgtttagcaaaggttgcacactaattataaaaagcactatggaacgcctaaactagtagggtgttacaagagcagtctcttataaaataaacacatggatccaatccccgaggaaaggatggaatgttaattgatgactctcaaagagttagccttgcttgatctgaacttacgagatgatgtgaccttgacagggtctaatcgcatactatgccttgcatagtcaaagacaagcaggaccgaaaggatttaatataagtcgtgaatatatccaaatatatgcggggactaggtagtcctctcctgtaactagtaaagatagcttctttacataaatatcagtctgaatgattgatcgtgttt

SEQ ID NO: 145286 - DNA, 634 bp, Cannabis sativa
  modified_base (594)..(598): a, c, t, g, unknown or other
tttctcatattttaaactttaattattttttaatttcatatttttttatattatttatttatgtcatataaaagtagactcgcctacattttcccatatatatatatgaaaaggaccccgatgaagtcacgcatgcgtgactggtcctgcattcattcgctattaaattgactcactaattgatttattatcctaaggctgctaacaaagataattaaataatacttatttattttttaaaaaaaacaaattctttggctattcagccaaatatattgtttttgtactcaatttaatagtcattcttctttaagataacataagttatattttcataaaaaaatataaaaaataagaaagaaagtgatgagtaagttgaaagaggtattttttttttttagtattttcaattattagtttatttgtacttaatcttccaagcttaaattttagtagtaaaataaaaccctttaaacgactgaattgttagtaaatttaaggtgtcatctattttttacagttaactgccaacatagactacttatatgtacgctcttgtacacgtagcacatttatattagtacacctaatatnnnnntttaaaaattataaaaaaaaatatttcaaaatttat

SEQ ID NO: 145287 - DNA, 922 bp, Cannabis sativa
  modified_base (864)..(896): a, c, t, g, unknown or other
taaagtgcacacacgtggcgtccctgttggacagggcgttacatgtggggtctgttactctttatttaaatgcctaaaattttcttggctagctccaagtctttcatttcaaattcaatactgagttgagacttaatattgttaattttgtttctttccttcccaactatcaggatgtcatcaacatacaaaagtagataaatgccattttaaaagtagacacatgtgtcataattgctcttggtgaaaccaattttcatcataaactcatcaaatctaaggttacattgtctaggagcctgttttaatccgtaaaatgatttgtttagaaggcacacctgacctggtttctcatcgtagccttcaggtatctccatgaagattttctcctccaaattgacatgaaggaatgcagttctgacatccgtttgatccacctcaagatcaaatcttgtagccatggatatgataactctgatggttgtttgtttgacaactggggagaatatatcattgtaattaatgccttcttgttaagtgaatcccttggcaacaagtcttgctttaaacttttgactctcactccctggtaaaccttctttttatttgaatagtcatttgcacttaataactctctggtttttcggtttgttaaccactgtccaggttttgttctttttcagtgatagtttctcttcctcaatatcctacagccatgctgcactgttcttcccagtaatagtatctgtgtaactagatggtttaaccacttatgtcttcagcaacactaagagcataggtagtgaattcagcatagtcataattatcaggaactttttgttagaattattttactaggatctnnnnnnnnnnnnnnnnnnnnnnnnnnnnnnnnntaaatatgaacttctaaaacgattct

SEQ ID NO: 145288 - DNA, 1148 bp, Cannabis sativa
agggtatatggtattgttaagtttgttcaataccatcaatgggaaaatactctcactggttttgaagggtatgtcgaaagtattgtcaaaaaattctatgccaatttgactgatgatttgcttgatgagaactctgaagttttttggtaaagtctatgttcaagggcattggttttcttttactgtcaaggacattgctgtggctttgcaacttcctgaaggtgtgtccaatgctatcatgtctatggatcgtcatttgatgctcactgaactcactggtgcacgggttgaatgaaaatctgggcagagtcttcgaattacacatctcacttatgttcatgcatctctcatgaggtttgcacttagcgattggcttcccaattccaataaaactatggtatctcaagatttggcatccttcctcttttgtatcacctcgggggcatccattgatctgccttcttcaatcttggaccagattgcttcatttcagagaggtaaaaagcgtactcataagcttgtgtttcctaactttatctataaaatttgtcctctcaaaaagatgtagcctactctcatgagacacttgagcctccactcactggcaccatcttccaaccctcggagcattttgatggagcctttcccaagcgtcctaaagctggcactactgttgctgctgctagtgcaagttccagttatgctcctacagatgtccaggaggtcaatcatgaggttcaacaggtgaataatcatcttgcttccatggaggaggttcaacaagagatgtccaagaagctgtcctcattgatcaagctctatggggcataagttcttctctttcattcttattttttttttgttggacatattttcatgttttcatgttttttttctttggcccttagataaacaaaaagggtgagtaatagtttgtttttaatttcttgtttctcagctctggaccctttttccaaggggagttgtgtttggtacttgtgattacttttaattaaaagttagcttgttatttggttttttcagttttcaattgtgtttctcaggcggagtgtttgtttgttcttgctaactttgatttgcaggtacttctttgttaaaaaatattttgattatctaaagtgccaaag

SEQ ID NO: 145289 - DNA, 585 bp, Cannabis sativa
taggaagaatataggggttgagaaaccaattacaaggaagatttgagttcctaaagctatggtggatgagaaggtgatacaagaggaagaacaacctggtcctagtaaggttaagaataaagtgattgatattttttagacagttaaacattctgctaagaacaaaatctgttcagtgcaattagcgttcttaactcttttggagctttgaatacgtattcgtggaatatatttaagtggaacataatcttaggggatgtttgattcataagaatagaaattgtaatggtaattaaaattctcattactttgtttgctttcttttttaaattttgtaatccattacattgtaatgattattatatttgttgtgtgaaacagaacaatcaatgacttacgatacagtttacagtatcaactaacacacaatacaaacaagaatcaaaatactaagagattacaagaattcaagataatgaattaagcagtaaaatagaagagaacaacactaggtttaacgagttcaagacttgtgcaatgctctacatctcaattggaacagcagcaaccatatctttattgata

SEQ ID NO: 145290 - DNA, 875 bp, Cannabis sativa
aaatttgttattggcttggcacatacaatcttgcagaaatttttgcacaaaaatatataccaatcaattgttttattgtgttataataaaaaatagaaattgaaataataaagaagatattacctaaaaaaacatttacatgtttgactaatatttttggaggatatcaaatataatataattaagtaagatgatgtagagatgaatatcataatcaaaataaaagatttgaaaaagcttaagagggatattaaaaaaaaaaatagtataaagtgcaagagaaggatatgataatcatgagaatgaagatagcctatagtatgtatactatatatatacatgcaaaaatgtaacgacaaaaaattaaagtaaaaacatttactgtaattaatattaatattcataatataagttttattattaattaatagctttggcttttcaacttgtatacctttggagaacatgagtataaaacatatatgatactgttggtctcacgcgagagaaggaagtttgactgtttgatagctcaaagagggccattattgttttgatttaaatgttgtattattattgttaaatataaaaatgaaataatatagaaaaaaaatgagaaaacaaagaaaatataggaaatgttatagagtgtaccacatcatcattcctagcaacagcgtaattataaatttataaaattgttatgaaatattattgatatttttttaggatgccacctaaattatatggtaatttcctttttttaaaaggtattatcactattttgttatgaatatatgatattttttgtgtttaataaataaaaattaaatatatttattttttataaagaatgccaatagttttaaaatgct

SEQ ID NO: 145291 - DNA, 862 bp, Cannabis sativa
gggcataaaacccaacaaattctccaacaattcacaaatttttcaataaaaattgtatagagagtcttagaattaatacctatatgagaatccacctttaatcaacctccattggagacaacttgaagttcttgagacagaagaagatgaataggggtttttaaaattttgggtgaggttttagggatttggggttgattttgagtgggaatgagtgattgattggaagaataatggtttttaaggatttgggataaagatttatggtgagatttgaaagaaaaaggttttgaatgggatttgaagaagaaaaatggtgtgggagaatgaggttcggcgtggaggttaggtttaagaaataagagaagtgtttttgaaatgatatggaaattgctctttttaaacttgtctgcacacctcgccgcggccaaaacacgactcgccgcggccactgaacccaaattaataggcctttctgtaacgcttaaacggccgcggcggcattacccctcgccgcggccagaggacctcgaaaaataagactttctgtaagtcttaaatggccgcggcggctctacatctggccgcggccactgggcgaaatcccaaaaaaaactttttttttcctatgcagtgcataaataacaagaaaattaaaaattgtttcactagttttctaaacaaaactagatagaacagaaaaagaaaataacactaaaacataaagagttcaactaaatcataatgaacactcgggttgcctcccaattagcgctgcctttgtcgtcgcacatctagacgttgatcgagttcttcatagtggcactagaatcatggcagacttggcttgatcaaattgacc

SEQ ID NO: 145292 - DNA, 673 bp, Cannabis sativa
ttttacatgcttgattttaattaacaaaaaaatttaactacccacacttttggtataattatataggatctatataaaaatgttttaagagcacacacgtggcgtccctattggacagggcgttacaaattaatttctgaaattttgaggcttaaatttcaaaatagattattttattttttaaattatgggtcagatttattttaaatttttttttaatttcattaatataatattgatatattatttaattataagattagaaattttaatattggacatattttaaattaaatgatagctttatcttttaatttgaaatattatattaaaattatcttataagattattaaataattaataaatttaaaattaacttagatatttttatagacatcctaactataatattttcaaattcaaaaatagattattttgtgaaatatttaattctttataaattatatgttagaaaagtgatattttatatcattttacttatcaaaaatttataaatagtattttaaattttaaataaccttgatatttttggaaaaatttgaaaaaggcttaatttcagatattttgacatataatttggttaattattattgtttattattttattcttaaaataatattttctatgctaattagtaatttttttccccg

SEQ ID NO: 145293 - DNA, 675 bp, Cannabis sativa
tgtttttactatttacactactaatactaattgtttatgtggtttcaagagtgttagtatagtgtaggatcttgatatggatacggtgttaccaacacgagtaccagggggtacgtcgtgcatgtggtacaacacttagtaattcctaggagtacaataatggctctacaacacgagtacagggttggtattttggtgcattttgtatagaagtcgtacttcccttaagaacattcttaaccacttggtgagctcgttattgaacttaggacggtttacgcataaagttgtactagcattaactttatatatgtgttgcatatcttactgagtctgttgactcaccagtttgctaccttgtgtaggtaagggaaaagcgaagctggagaaacagtgagatgaggctcgacagtgattgtacatatcacgacagtgcaacctggagggtttcaatctttcactattttgagttgcctgtacacgtttttttaaaatatatatatactagtaactttatattagtaaaatactttaaactgtattttgagattcgggatcccgacctatatgtttataaagttattatactatcaaattaatttttgagttagtaagtttcaaatacgggcgttacagtttggtatcagagccgccaggttgttcactgaagaccgt

SEQ ID NO: 145294 - DNA, 1268 bp, Cannabis sativa
gaaaactttaatttctcataaaaacatggaacaattaattaaattaccctaagtaattagaggcaagcaaaaaaaaaaaaaatagacgcaacagccttaaaacacatttaagccagcaaaattatggcgcaacaaatcctcacaatatataaaagtttgattcattaaatatttgactaataacaataagacttacactagacgatcaaccaattagcaatgaagtccactttcgaccttttaatcaaagactgccaacttttattatctaccctcccaaatgttaatttatttttcattatacgatcagcaaaccgagtagtacattatgttgctagacattctcagtatcaatctgatcgtaccatttctgatatttctaattctggtgaactcttacatcttttgtattcagaatgctaaatagtagcataaatctttatttatggtttaatttttattctgatgtgtctgttaagttctaagttcgaattttattgtgtatttttaatgtttgagttttagtgttttactaaggttctaatatttgagtttgtatttctgggatctatttttatttatttatttatttttatagattttgagaactttaaatttgatgttgtttctatttattattgaattaaagtttgccttttcattttattgattgaaaaatattagtagaaagtttatggaataagaattttgaatatatgaaaatagaattgaaaaataacattttaatcgagaatcaaagtttattgtttatggttaatttgtaaagatagaaaatgaaaaaattgatttttatttcatttaatacgtatataatattttttcttttttgaataatatgaatttattttaattaatttttgttttttaaaactatttttctaaaagaattattagtttggctaatactatatttaagtgtggcactttattgatcaactaacagaaagataaattgagtgttaagtttagaaatttgaggatatcaataggaactacaatgatgacatcaactttttatgattggaatataaaaataatgcattatgaaaaaaattgattcataatctcacacatattttttcttctacttaatcttacacctgctttttttttgttcaatttataatgtttgatttatagtaaattttttctataaaaaaatactttcatatcataatctcacacctgctttttttttttgttcaatttataatgtttgatttatagtaaattttttctataaaaaa

SEQ ID NO: 145295 - DNA, 676 bp, Cannabis sativa
  modified_base (251)..(255): a, c, t, g, unknown or other
  modified_base (622)..(639): a, c, t, g, unknown or other
gaaaattaaaataatatgaataggaagtcacgttattaatttaaataatttttttatgaagattttaaggaaataatgaaataacaaaataactatattcttattaaagtgataaaaggtgtgtatcattgaaattagttataataattaaaaaaaaaaaaaaaaaaaaaactaacgtattcattttttagaaaggaaaaaattatcagatcatgtcttagaatataggagaattttttttaaaaaaaaannnnnaaaaaaaaaaaactaacgtattcattttttagaatggtacaaaaaattagatcatgcatgtattataagagaataaaaattaaataataaaaattctatgtgtgatacctcatgataatcaaataaattacaacaaattattatcattagattaaaaattaaaggtttaaaaaataacctaatgggtgagagcaaaagtgatgctctcacctaagaattttctaataattttagttaaaatactatttaaaaagtttagaaaaaaaaatagacagcttacttgtaacgccctaatgctaaggtacgttacagtgcagtctttgctaataaaatttttttcttgaaaaacgtgtcaaataaaaacttnnnnnnnnnnnnnnnnnntttatattatatcaaaatatttacaagtgacgggatc

SEQ ID NO: 145296 - DNA, 818 bp, Cannabis sativa
aaagttattggtgagagagaagaagagtagtgagtgagtgaaaaaaaatgtgtttatttgcttaattttagttagttttagttttattttctctttagtaaggtaacatttaagtcttgtaaaaattggtattgttaagtgtgtttttctaattaattgtgcttgtttgttgttgaaaaaggaagaattaaatttataggaaaaagaaaaggaagcaaggaagaagtggaacacaagctgaaactggggtagattgctgaagcaatgctgaagcaaattcagcagtctggcaatgacgtggaaacatgagttttacttgtctacatcagcaggagggtatttgtcactaaaaatgagaccagctggaagctttgcaaaggggggactaaagctagtggaccaaagtgcaaaaaaggattgggcttctcattgagggagtgattttggtaccctagggacccaacaactaaaaggaaaaaaagaaggaaagtacatatcttatcttccattacgtaaagggggctgctgaattgatgagatgagttttaattgcagaagtacagaggaggaagaagaaaaagggggaccaaagtgcaagggagaaggacacaagtttttgtgtttgaatttcttttactttctctttatcttttttttttcccttttttccctttgttttatttcttgtctttagatatctcaaacttgttgagctgtaaaaacatacgggcagcagtcatggatgaatattttttagcttggattttattttcttacttgaatatgagctagactattgaggcttgaatggttatgaa

SEQ ID NO: 145297 - DNA, 603 bp, Cannabis sativa
aaggaagctctatgactttggggaattttgtttaaattgaaacaattaagaggaggagtgactgaataccggatagtcagtcatccatccatctttgcaaagagcccgacttatcatgaaaagagaaaatacatagatataagactctactagattagagagaagatagaagaaggactggttgaattagaaaaggtcagatcagaagataatcttgttgatgttgggactatggtcttaatagtaaacaagttcaaacattacttgaacttgataaatctcagaagttagtatactgagatttctggaacaccaagtatgatgactacattctttcttcatcaccgtcatattttaatttgaacgaactaagtagaatttgtggtatagttcctccaaatgaaaagatctccaaaagctgttttagttatggaaagataggtgccatctagaagggtgttcttggaagtctatcaattccacccgtaaggattctcaaggaaagctagtcttccttcgaaaaggagtttcagatggctagttgttccttcctagaagggagtctcggatagttgactccaactgtgcttttcctatctgaga

SEQ ID NO: 145298 - DNA, 667 bp, Cannabis sativa
  modified_base (200)..(207): a, c, t, g, unknown or other
actattactgctatcaatgtaatctaacaggcataacaacatgtacgctaaacatgtaataacatatgcatgatattataccaatcttacctcaattccgaattcaactgtgcaggtcaatctgagtggaacaactgctctgcgaattgtatgctcctaaataacatcaataataacacgcataagtgactcgctaaatnnnnnnnnggacttaggttttaaaccgaaaacctatctactccaacttaatatatcaataccccaaactagcagggaatcagccaactagaaacttgaaactgacgcgaaacaacaagttgaatttttgggtttccctactgccaaatccgggtaactggttttacaagcattgtaaaatcggttagccggttttaccgagagaaaccaaaaaattcaaaaccctaaccaaatcatttccaaacccaaccaaactttccagacctgcataatacaccccaataaacatttttcaagtgataaaacaactacccatactcagaattcaaaattaccattgatgagccaagctttgagttgaaaactctgttgcgatattttgcatacgctagtgtacgtatcgtttcaagtagtaaactcaccaagagtgaggtcgatcccacagtgagtgtagttaagtacgttaaaa

SEQ ID NO: 145299 - DNA, 1277 bp, Cannabis sativa
  modified_base (550)..(555): a, c, t, g, unknown or other
tccttgaaagacaccttatttggcaagtctacaataatttttggctcgctagtgtgagtaccaagatagaaaaagcccactgcggcattcttcttcgatggaacggccttaacagagtaaagatactcaatctctacgggtgtgggacaaccccaattcataattttgtacaaaactttcaaactagtgagaatcgtataagagatgggattcagctggaatgaggcaaccccaatattgtttatgtagtctttgaagtagtcccgaagagggaggatggcccctgcacaaatatgctcaaggctccaggcgcccaaactagttgaatcactagtacaagtcttaccactagttcctgggttactactagcaaagcgtgcagggggtgaaactgaattcaccctctcgtactgacctaacctggcatgatttcccaagtgcaattccagaggtcttcaacatctctcccgtatagcgtgagatagatcgcaccttcaattctatcaactcagcctcgaaggtgaagttgggatcctgaggagttttagannnnnntggcttgggaggcataatttcgaaatccaagtcacctggttcaaaagcagttgtgatgttaagtaaaaacaaaggctttgccacaagaataaaggacacgctaggtgattctggccaggctgcttctcacaagaatcggcatctgcattcgaatatttcttgcaagaagcacctatagcgactagaaatatcttcttgttgggttctcactgtgtgttccctagccctagcatcgtttagctctaatttggaagtggcttttggtgggttaggtttatatgggatggccgattcagtaggaaactcaaactctaaaacttctagacgataaattcctgaaccagagtgggacattgctgccagcaaaaaatagtcccaagccctggagagaattttatcaaaccagaaggtaatgagttggagatcgtaaaacaacctacacattgcctcaatcctagtatgaacagttttaaccctaaaacaaactaccaaaaccagatgagatgataatgatacaaacaaatcaagtaactaatccacactatgtaacaaacatgagaaagaagaaagtaacttaccgtttgaagttagggattggagcaatgcctggggattccgtcttcaaaccttcaaatgaagcaaggatcgctttgagaaattaaagtcagaggaaacttgcaggaaaaaggtcaaggacaaggatggcatgcaagtctttggac

SEQ ID NO: 145300 - DNA, 1373 bp, Cannabis sativa
ggattaatcttgtacttcacgatgcaaattcagaaaatgctaagtgttgatgcgctgctcgaattatccactgctcggctgggaagacactgtttgtgcaggtgtacgttgtgccctgctcagagcatctctctcaggcagatatggggaatcaggtccacgtgtcaccaacatgtgctgctacatcacagtgcaaaaaataggataatatttgccccccaagtctgtacgggacttctgaagttgcgtgtagacttcactcgagccgaccatacatctgagtgggtgacacgtgttgaatgagtatgtttgtgattctatgtgatcctgactaggagtcccatcaattttcggctaattaatgctctgattaattcattcctcgagacgcgcttttcttttgcacgcttttgacggttacccttctttagcacttgattgcttttaatttcgcaatatttgctttttggggggaaatcgaagtgtttggggtttaaattaattacactctttcaaaaattggcttaaaaatatggttgaaaattctcataatttacttttaccacttttctcactaagcaacttcagagcaaaaagagttttatctctcaagtctgtcgtgggattctagccgaacgacctaaatagcttcatcctaacaacacaaaagcttcaaacagtgagtaagtttctcatctttctctcctttaattttgtatcttcaattttttggcttccattgtagaaaatataattgttattaacttgttgtaggagatacatagaaaatctaggctcgatacttcgtaatttttactgtagtagatcgtacgactttgctgtttaactttaatctcgcaatggtcgatctccaccttgcccattcaaagcttcgtgaaaattaacccttaattcaaaaatttcaaacttttgggttacgaacttaacctttgcatgtttttcttctttttaatccatcgagtagacctggtcggtatatttgcctgtttttgttcgatatcccggcaaaatactcatctcgtgtattgtcttttgtagatgaaccatggtgagtttttggaggcgaacaccgtatcgaccaggatctgctccagcttttgtacgaggaccaacctcatctttgcgccaatatgtcctcttttagtgacagaatttctaactcaagatttgaagattgggaagtgagtagtgaacgttctcctactccagaacccgaggtgcaacatcacttttactctgagcagatcgcaggtgttgacctcacttttaggcaacaacagtgagtcttatttagtaagcgataagtaatttatagcgatagatatatagtaaagcaatgtaaagacacaaga

SEQ ID NO: 145301 - DNA, 520 bp, Cannabis sativa
aagtgtaaagagtttaggatttagagtttaaggtttagggtttaaggtttaagggtccgcttcaagtttcggttccaattttgagtcacagggtacgatttaaggtttgattgtggctctgggtctaagtcctggtgtgggtctaggtccgtgtttgggttcacgttcgagtcttggtcccaaatccaaacatcaacaacatgtcgagtctagttcgagttcaggcacgggttcgggttctggtccaagtctgggtccgggtataggtttaattccttgatttagacactaaatatgggtcgggtccaagcctcgggtcttgggtcctgggtcccgggtccagatccaaatcctgttcaaattctagctcttacattgggtccaggtttgggtctcaagtctaggttttggtcttaggtcctgagccatgggtctgggtccccaattcaggttagggtcctaggtcccagtctaggttagggtgttggaaatattttaccaggacctagatttactaaca

SEQ ID NO: 145302 - DNA, 540 bp, Cannabis sativa
acttaaaacgatttgtgtgtgattggatggtttcatgttgatatgtgtgttatatgatgattaattgatgcttgtaaaattttatgaaacaaaattgaatttttgtttctataattattttaattggatagtttggaaaaaattaacaattcacttttttacaaaacttaatttcgattttatttgaattagttatgattgtttgaagttcttaaaaaagatagggtgatgacacaccctcacgcgcgcggactcgagcttcactcggtccgcagcgtgttcggacagcctctgtccgaagaaacacgctcagggatgtctaaaatccctttctacgcgcgcggaaatcgtgtgtgcagcctcctgcgccgaggaaactcgactgtgcaaccagtgagcgcgcgcggatgagtatgctacccataccatcagtacagctcacaaattttttgaatttcttcattttttcatgctttttcatggaattaatttctgattttttgtgtagttttgtattttgatttttacttttcatatttc

SEQ ID NO: 145303 - DNA, 760 bp, Cannabis sativa
cacagatggattaacttgttcagcttcttggccgaccagggtcacgtcaggatctctttgagcgggattttgaacacgggcccagggctgaacaactggtgcgacatactgctcatctagacctctccttctgtttagatcatctctgagatcataagccgttcccaatctatttaagtacaccaggttgtctcagtgactggttggtttggccgattagttggtcagaaccgttaacttgggtggagttattaggtatgacctctcttgacgaattactcgataaggtcagtctgcctaccacttggcccacaggcgaaacctgtgaccggggattggccagctgaccattcagggtttgagaaacattcacggctggatctttgtctgactcccccagagggataggctcttcatatcaccacggtcgtctgttgctgattagtagcctgataggctcttcatatcagcacggtcgcctttcttgttcggtcgtcaaaggctgcttgctaagccttcgacgtttccacctctttatccatccattcagcgaatagacgcctttgctcttccaatgtaagatttaccgcagcacagagcttctcctgatcatgatgctaggtattactgtgaccttacattagtccaagagcagcatggaggttctggatctcggtgtcatctccaaaggttgttcagacatttgatgcttgcgaaactccagcattgggaataccctgattgggtgttgaactggtat

SEQ ID NO: 145304 - DNA, 595 bp, Cannabis sativa
tctaataatggggcccacaattaattaaattcataaataattataaaaatatcaaaaattagtgctaattgcctttactaatctaaatttctaaagcgctcattacaattatgcccccgtaaaaagtattttgtcctcaaaatctaacctaaatagctctggatgttgagtcctcatgtcagacttcaactcccaggtggcttcctccaccttacaatttctccagagcactttgaccaaggcaatggtcttgttccgaagaaccttcttctttttatcaaggatctgaacaggctcctcttcataggataagtcttactgcagttcaagggcttcataacttaagatatgagtcgggtctgtaacatatttcctctatattgaaatatggaatacatcatgaacagtcgacagtgctcgtggtaaggctagccgatacgctacctacccgaccttctcaagtatctgaaatgtcccaatgaacctaaggattaacttacctcgcttcccgaagcgtctaatacccttcattggtgaaacccgcaggaaaccatgtccccctgcttgaaatgtgacatctctgcgcttcagatca

SEQ ID NO: 145305 - DNA, 547 bp, Cannabis sativa
aaaaatatggaaaaaaaattattaaaactatcataaatatgacataaaaagtaaatgtcattaaatatgacattatctaaccaattaaactagaaatattactttttttaaaaaaaacaaaaaaccatatcaaacattaaaaagagaatatgaatttaagattcataaaaaataaaaatttaattgaattaccataaaaaatattaaaattcccttcatatttattttctaaaaacaataaaacaaatgaaactacagtgatcgccagagttgtcactcgtgccgaaaaaatcactgcagtttgttgtcggcaccgaaaaagtcgtcggagtagctggtggtgtcggaaaagtcactgtagtttccgtcggcgccaaagttgtcgaaattagcattgtcgccgaaaaaatcacagataaaatcaccaagaaattggtttctttatgaagggacacgcgttagcagacttcatcacggagtgcaatgaagccgaagctaccgcgaacatacccataccatcagtcccagcatggaaagtatttgtaga

SEQ ID NO: 145306 - DNA, 518 bp, Cannabis sativa
agaaggaaggaacgaagaaaccaatactactattagatatttacctagaattgaggatgcttatgatctaactaggtatgaccattagtggaattggaaaattgacaaatccgacaatgcttagtcaaatctaaccaatgaaacgctgagttggaaagacaggctgaagcggcaagggcaactcaaggaactattacacagaatcaacctgatcttggagtaagaaggccatgaggcagacctcggggttcaagaaccaagaggcaggaagtgaatcaaggaaatccccaaaacacctaggaggagcaactttgggggaatagggatgttccagtggatgaacaacaaaataaccaagaataacgtcgagaatgtcctcaaagatcccaaggatttacgaatcaggggaatgaatgtaatgatgtacaagaggcttctcttaggaataagggtatatggcagccccaaactagggaataagaaatccctcgtaataacgagagaaatcctaggactca

SEQ ID NO: 145307 - DNA, 586 bp, Cannabis sativa
  modified_base (47)..(54): a, c, t, g, unknown or other
caaggtcctatttgtacaattttggaaaatacaaggtctattttgtnnnnnnnnaaaacagagagtccaattaataacttttgtaatacacaaggtccaaaatagtatttactcataaaaatttgcatgtgtgtttgatgacattgtctacacaaagtctagtcaccatataaaatccaatctcaaaaacttttattaagaaagggaaaaataatgtcgccaatccatattgatgtggtaagtctagtaatataaattcatttaccaagttgtaaagtcaagaaaaataaaggtaaagtataaataataatcactagaagcaaggcacgtgagtcacgtgagatggaaaagctaggcaagagtccgaggctacggttattggtaggggcacatgttagataaattaacaataaactcaagatctatttgtatataatatagaacacaataacaatatataataattaagtatatgcgtacctgattgatccatagtagtcaccgcattttgatagtgcaatactatcaactaagtcttcctctctagatctctaaatcataagcagtttatttatctgattatcaa

SEQ ID NO: 145308 - DNA, 736 bp, Cannabis sativa
catacataataatgtatctttttttattttccttcctcttatttattttttaattttaattgtttatattttacttattttcatttccttatatacatattaaagtataaattgatatctatacatgtcacgaatttgagaatattatagacacgagtatttcttttcttaggtactgctattgataaataacatagctaaatatatttttaaaaaaataaaaaataaagaatagattatatgtaaatatgtgcacattaattttgtatatattatatattcaacttgcactaaaaataatcaacaataataattatattatatttatatagatagtatactcatgtgaggtgtggtgtggtatgaggtgtttaattattattttttttgaaaaaactcttttttattaattaagaggaattaataaaacatatgtaacaataaaaaacttatatatatgtattgtgcttatttatttatttatttatttttatcattactttctttaaaatatttaatttttgataaatcaaaaaatatttgagtaacttaatgggaatggcatagttgaaataaaagtataatattatgactagttattaagtaaaattaaaccttattgaaaatatgacatttgtcattaaattaaatagagagtgcaaaagagagtgtgatagagagtgtccttagcactcctcatctttttaatctgattttgtttttagttttttttttt

SEQ ID NO: 145309 - DNA, 910 bp, Cannabis sativa
gaacccatacccgaactcggaccccgactcaggacccgacctcgacctgagaccccaacccaaacccgaacccagacttagagcccgggaccccgacacgtagttggtgttgggattgagtgtattgaaaatatattataactttacacgatcaattaatacaagttaataccaataatgtattatattaaataatactaatacaatataatacaatagagcacaatctaacatacgatatatacggcgtactaaatgagccctaattataagtatattacatcgaacaccctaacacatatattatacgtaatgtttatagcatatttgttttggtgtaattaagattagaatggaatggagattataattatcatattgttcggttaagaatgttaatgtttgtaattttacattgtaatgagtattatactatttgtatatattataatttttttttatttttagtcataaaaaatctgtgataaaaattaaaaaaaattgtgactaattataaatcattatttttatattgtgattaaaaagtttttagctaaatgtattagtcacaaaaattatttgttgtatctaaatgtatttttagattaaattagtgataacttgtatctaaatattatgttttttattgtgactaaaaattatattttatcacaaaaaaatatatattgtgactataaatttatcattaaatattatattttaatccaaataatatatttttttataataatagaaatagtaatagtaattgtattcttattactattacaataccaaatggagcattgctaggcatcagtggtgcctagcacctttgcgacatgtcgcgttgcgattagctagcgatactttttaaaaactattatattaaagggtaaatatcattttg

SEQ ID NO: 145310 - DNA, 507 bp, Cannabis sativa
aagtcaaccaaaatagttactgaatattttctaaattcttctgtcaccttgttgaagctttcggtagcgttgcttgtcattatgttgtactgatcgcctggacaataaggatgaccccacttttcaaaccctgtttgctcgatgtatgtagcaatggcagggtccatctgtttcagcacctcaaaatgtctatcacattccgtattgttccatgcgtaagctacaagccatatttgctggttgcatacatcaatcttaattttgtgaacgagattcttagtaatatgcttgaagcatgacagtggcatgcttttgggaaaacaaccacaacaacatgttcaatggtttgatgcctatctgatatgaacataagattttcaacctcaccaatggcttcctttaacttccacaagaaatacttcaaagattcatgattctcactgtcaacaattgcaaaggctaccgaaaacaattggttgtttgcatcgtacgcaacagcaactaaca

SEQ ID NO: 145311 - DNA, 1103 bp, Cannabis sativa
agaatgctaaaattggataatctaagttttatgtgaaacgaaagtatttgcataacctgtgtgatatttatattattgcttaaagctgaccacatgttaatttaattccgaaattgattagataacaggtgatttagggcctaaaagatctgaaaagagttcggttaatttgtttaatttgtcattcacatcaagaaaaagggtagtaattagcattaacaattgggtaaataaatcaacaggattctcttccctattttatcatcttcattaaatcttttgctgttaattttagtttcctgatactctttgttttgtttttttttttcaatcataaaattattggtttgccaaatagaatcataaatttaatctagtggtattcagtccaattccctgtggttcgacctcacatgtgtgagtttactacttgattacgtgcacttgcgtattgttcatatttttcataacaacttgcacacaaatctgcttagtgcagcaatgcattttgtttggcttcatacttcctcaattgttgtcggtgacttcatgtccaaaagggcttggatcttttctaagtttgatcttcatgttttagctgcaaaggattttgaagcattgtctaggtcctccatatgcccctcgcctttttggacttggcaagcatgtcatccacacacacctctatgttgcggcagataggaccattgaacattttgttcacaagcctctgatatgtgacccctgcattcttcagccttgcagggcgtgattttgtagcagtataagcctaagtctgtcatgaagcttgtacgctcttaatttggtggatgcatcttctctttcttggctatggacaaggccaagttgtaacagtgacttgcagatttttgatcttctctcaacatccttccccctacgttgttgggaatttcaggcaaaggtggtagagggatgttaccgccttcaggttgtataaggccagtcagcccatcataccattagaagccgagggaatgttgattacgatgaactatgccatcagagttctggtggttggattttctccaataatgagaggtaatttgatatactcgatgggt

SEQ ID NO: 145312 - DNA, 529 bp, Cannabis sativa
attatttagggcgttacagtagtgttcgatgccctgagtaggaagggtcccgggcagatagctagtatggtttagatatcacctcagttagcaaaagacatactcagatctagcatcgagtttgttgtaggcaagcttcataacttgacgctacaatctgctctgttagaacgaattaaagttgctcagttaattgatcctagctagtaaagatcagagaagagatatcagctggtcaagccaaagactttatagtgtcagacagtgggatgttattgttcaaaaccaaggtttgtgttcctaatagtgtagaactcagaaataaaattcttgaagaggctcatacaactccatattccctacatcccgacaccaccaagatgtatcaagatcttaagctttacttctggtggagagaaatgaagaagaatgtggtagaattcgtatcgagatgcttaacttgtcagcagatcaaggctgaacatcagacaccggtagggttgttacagcctttaaccctacctgagtg

SEQ ID NO: 145313 - DNA, 724 bp, Cannabis sativa
tggataagtgttatgtcctttctagggcattgaaaaagtatgcttggatcggatgtatagtgtacacatcggactggaccgatattaaacttggataagatatcataaacttaccgttatatctaagtcaatatcagttagttgatcttaggtcaatagatcttaatcctgatatgattaggttcgatctcatttgtgctatttatgttcttagagttgttcgttaaatctcgaacggcgtaatacttatatcttgggaacatgatagtataattgagtggaagtgctaatcatagatatgaaatctatagcttctataaatgtttagaagtgaaaccataatttccttcaagcttgacttaataaagataaatgattgaggcctcatttcagtaattatattagtgtattgactatcatttaatgatagttaagtgttttaaggataaaatacattgaagggtataatggtaaatttgtccctattagatgtagatcatctattgaggatctttgactatttggattaaaatgatggataattcatagtgtatttatatcttggcatatatagagtgttctatataattaagagtaaaattaagaggatctttaactgcttgcagactcagttaatttgttttaattaattaattataatttttaaattagactatgccttatttatgaattttcacttagcagaggcttaattgtgaagaaa

SEQ ID NO: 145314 - DNA, 794 bp, Cannabis sativa
  modified_base (730)..(739): a, c, t, g, unknown or other
cccaacggagggaggctgagctggcggcgaagcatcgggaggcgctgaaggcggagggtgagtccgtcgccaaggctaggcgtgaccttcgggaggttagggaggccatggatgaaatggctcccaaggtgaagtccttggaggagttgcaccaggcggacttgcagtctaaggccaacctggccgtggagttgaaggagctgaaggactttagagaccaggccttcaagaaggctaaaagagatgagctcctgacccccgtttcctgccagcagtgcgtcaagcgcttcgacaacgacgtctctatggcctggtagtcaaatggccaaagcattaagctcgacttttatcccgagcctgaggaggctcttgccaaattctaggagaagaagaagaagctcgatgatatgcttgaagcacgtcggggccctcaccttcctccgcgtattgattaggccgttgagtccaacccattttaccaagattatatctctatttttttcttttttacaactatttttcttttattcaagacaatcttaattatgtagctgctttattttctaaggggagacgattattatggcccctccccaggccctttgtattatatatatattttttttaccttccctttgggtcaggatattttatatatatatgatctctttgatacatatcctctttgtttttacttttgccctgttttacatctgtccgtgtggtatgnnnnnnnnnncccctgagtggcatgaaaactttgtttttatggcactcagttttatttaaaattt

SEQ ID NO: 145315 - DNA, 613 bp, Cannabis sativa
  modified_base (43)..(43): a, c, t, g, unknown or other
agacaagcaatagataaagtgaacaaaaacatacacaaatgantgaaaaatacttctgtttttttattgatgttgaataaaatagattacattaaaatggagttttatttagggcataaaacccaacatgttctgcctctaagattgtcaatatttgcaattaagctccaccttgtaaaaatgagctcgccggcttccactattttctaccaaaataggctacaatcactccaaaagactctaaatgcatttttactcttcaaaatagcctaataaatcataattacactaattaataatttaaagaattaatataagaatattattacataaattagctatatttataagacaaaatatcaacttatcacacaacgataatgaatctatgtctacttcgagtttttatttctcacaagaattataagaaaactggctaagtgtagggctcttgtaatatcctgaaaattttattgatatttatttggccatattttatttaatatatagttatgtggatattagagtaagattataatcttacttaagctaattacgagttaattagtggaattttagtaaatgaataaataaagcgtaattgattaattac

SEQ ID NO: 145316 - DNA, 762 bp, Cannabis sativa
gaacagggagaagacactgttcaaatggaacagggagaagacaatgttcaagtggaacagggaaaggacattgttcaggtggaacagggagaaaacactgttcaggtggaacagggagaagacactgttcaggtggaacagggagaagacactgttcaggtggaacagggagaagacactgttcaggtggaacagggattgaacatcgttcatgtccaacaaggaaacctaagagaaagtctggcagaggacttggaggactaccatttgactaaagacaaagctgaaagagcacatagacagaatcctaagtatagcttcaacatttggaatgaagacattgcgtatgcactgttaagtcctttgcaacgacagaagaacaaaccacaaagttggggagaagctataaagtacaagaatgcaaagaagtggaacggtgctatggatgacgagacagactctttggtaaagagaagacttgggtttgtgttccaaaacccaagggaaagagtgctgtgaaacatatatggccctttagacagaaagaaaaatgcactaagacaaataaagagttggaggatatcagccagatgctcaactctaatgggattggttcaaacatgtatttcatgttgagtatcatacaaggtacagcataaactatagttgttgttagcaagtatatggtattgactgggaagatacattggttgattatcaaatagattttaaggtacttaaagaagacaacatgcattatac

SEQ ID NO: 145317 - DNA, 742 bp, Cannabis sativa
gcacattttttgtaattattttatttttgttgtacatttatgaaaaaagcccatttttttatatttatgaaataatccctttgttttaatttctaattttcttttacaactttgtcttcatctatattaaactttttgttaaaaaaaaaatagataattgcggtaaatatttttaaaaatttaagtgacattatttagttgggaggaataaaaatataagaatgagaatatgaataaaaataaaatggaataaaatttaaaatgcataaaaaattgattaaaaaaacgaaaaatttacaaaaatactgaaattttggttaatttttacaaaaatactaccatacggatttttttttttcaaaaatactatatttttataaaacagcagtgaaacacaaaatagactaactaaaaacaacagtggaacaactaaaaaacaatcgtagaacaagagtgaaaacttaatacaatacacagtatttttgaaaaaaaaattcgccccacagtaaaaaagtaaacaagttagaaattttcagtatgtggggtaaataatctataaaaaaatcattaattttttttttcattttacattggaatggtctttctttccatttcaaaatggaatagtccttccaccaaaatagtagaaagggtattccattagaatgacattctaatactttaaaataaaaccaaacaaatgaatgaaattaaaattatttcctttccattccattacatt

SEQ ID NO: 145318 - DNA, 590 bp, Cannabis sativa
  modified_base (413)..(413): a, c, t, g, unknown or other
atatatattttttttatttggtttaaaatttttttatatctattttctccaatatttttttattattttttttaaaaataattatataatgttaaccttaacgattgcatttatttttcaaaatttgtatgtatatatataataatatacacacataaattatatatagctatatatctattaatcctaatatattgctaatacaataagtattgtgattcttacctatcaataggaatagtaatttgtagcctttgatttaatcaaatgactcaaattaacccttaaaaattacaccataattaatatattttttatttataattaatcttgaatattattaattacaagtttaactaacaaactccaaacctaactccaaacctataattttttttttacttatttatctnatgactatttataattttcaattaattatttttttatttgaattttatatatttatttttaattaatattattttttacttaacacaataattgtacctagaaaattataaaatatttaagttatttaatcctagtacaaccaataatataataatggtgtaagtgataaagttatt

SEQ ID NO: 145319 - DNA, 599 bp, Cannabis sativa
  modified_base (89)..(94): a, c, t, g, unknown or other
tgttttctaaagtttaaatatgttattttatgttgatttaagcttgatttagtggttgttagtaggtttaaccaagttttgagttttannnnnnaaacttggagctttaatggtgattttagattctgaatttgggttgttgttttattgcttggaaatggtttatttgggtataatatgtaggtctggaaagtttggttgagtttggaatcgatttggtgaagctttgaatttttttgggttttttggggaaaatcgggtaaccggttttacaagtacctgtaaaaccagttaaccggtttttgcagttgggattcctgaaaaattcagcttgttgattcgtgttagtttcaggtttcgagttggttaattccctactagtttaaggtattaccatattaagttgcagtagaaaaggttttggttgaaacctaagtcccagttgtgatttagcgagtcacttatttgtgttgttatcaatgtgatttaggagcctataattcgccgaaacagtcgttccactcaggttcaccggcacacctgaattcgaaattgaggtaagattagtataatgccatgcatatgctattacatgttta

SEQ ID NO: 145320 - DNA, 932 bp, Cannabis sativa
tgccacgtgttgtgatcccaattaatgagggatatgggtatttaacccctttgattcgaatcaaaattcctcattttccctcattttcttaacttccctctccctctttctcagagatttcaaagagattttcacaccttgcccagatttctacctttctctctagaattttctcaacctcaagagtaatcacaggaacaacttaccaaaactaaaggttagtttcgagtttcactgcatttttattttttgtttggagaaaaaaaaaactattttctgggttttggtatttttgagggtgtttaggaatgcatgtttgtaggaaatacatgtaggtctatttttttaggtatggaactgggtattctcagagaaaatgacctaaaattttcataatcgtgaactttaggaagaatcattgaatagtcgcaactttatattttgaatacacgcgggtattcggatgaacacttcgaatgctcgcatgtttgttcatcttaggtttcacagagactttatcacttctaggtgttacttaaaactttaggattttgcactctgtatgttttgttgtgagaacattggttaagtctttcaaatggtgggcgtgtcacaatattctaatgttcatatatgtgattatatgttccttgaagtactgtgatacgcccagccatttgcgacatgctccaatgttctgataagcgcattctttggctggcagatttgctcgaaatggtgggggtatcccagtaacttcagggtcacgctccggaacgcatgccccttgagtcactgggatacacccagctgttttttgaggtacatctctagttggagacgcgtgacatactcccaggttgtgattagttaggttcctcgaaacggtgggtgtttcccagtcacttcagggtcatgctcgaaaacgcatg

SEQ ID NO: 145321 - DNA, 674 bp, Cannabis sativa
  modified_base (453)..(457): a, c, t, g, unknown or other
attacaaagttgactgtaatctttacaacgattatcccctcaaatcatgggatctgattacatatcacgttaagcaaatatggtttttatttaaatttcacacaactgtgaatatcccacttttactaggtcaaaatgaatgtgtattaaagatatatggtaagccttatcgtattggaatatctcgctgggaatggagccgagttaaccttgatggcgagttggagctcgtcatatgtcttcccaaggttgataatgcttttactttaactctgacaactgcagtttctagtgacgagatgatctttttcgcgtgcatgccttcctacggcgatgtggatgcctcgctatctcttgctttggttcacccatctgttatacttagtttgtatactgtacattgtagctaagtatctccattgtcattatatctcctccacgtaacgaggttannnnntcgtcttgtacacctaaagttacatggtttctcatcgaggtacaaggcaacaatttgtacatttttatctcgcataagactgttcagtcagtcgagttgtaaacatactttgttaattatgcttttaacgagttattcccatgtcaagtgtaattataattacgtgtttgagttctttattcttcccagcttgacacgtgtcttcctctgatgtact

SEQ ID NO: 145322 - DNA, 691 bp, Cannabis sativa
gagtcaaaggctataacaaacctacaggtctctgatgttcagcttaatctgttgacaagtcaagcaccgagatacatattctagtttctaccacatccttcttcatcttgcaccatcaataaaagagttttaagtcttgatacattttggtagtgccacgatgcaatgaataaggagtggtatgagcttcctcaagaatctcatttttaagttccacattgttcggaatgcaaactcgagttctgtataatagcatcccattacctaacactgtgaaatctttagcttgaccagctaaaacttcttctcgaatctttactaactctgaatcagctagctgagcagctctaattctgtctaacaaatttgattgtagcgtcaaattattaagtttactcacaaaaaactcaatatctaatctaaccatgtcatcaacaagctagggtgaaatcataaccatgctagatacttgtccgggacccttcctgcttagtgcatttgccactacattgaccttcctaggatggtaaaggatttcacaatcataatccttgactagctccaaccactgcctctgtctcatattcaaatccttttgagtaaaaaaatatatgagactcttctggtcggtgaaaatctcacacttttctccgtagagatagtgtcaccaaatctttaaagcaaaaaccac

SEQ ID NO: 145323 - DNA, 1022 bp, Cannabis sativa
aggttcggcactgtctaggtatgagttgggatctaggtttgggtctcgattcgggtctaggtcttggttggagtctgtcacctggtctggttacagttctggtctaggtttaagtcctgttacggttctagttctaagtctaagttctggttacggttccagtcccgttcccgggtccaggtctacttcaagtctcggctcggtcccagtctgagttctagtccaagttcagttctcggtcctagtctggatctaagtccgagtcctgatctatgttcgggtctgggtcctgagtttgagtcctagttttggtacgagtccgggtctgggtccaggtctaggtctgggtttgggttgggcccagttttcagtccgtgtttgtgtccaggtcttggtctgggtctgggtttgggtctatgttcgagttttggtatggaaatgggttctggtccaggtctcgggtcacgagtcctagggcccaggtcctggcgcaagtctgggtccgcgttcgggcctggatcctgttattgatcctagtctgggtctgggtctgtgttcggttccgtgtcttgatccggttttggatcaaggtccaattcatgttctagggtccttattctggttcttgttcctatttcaggtctcggggtccaagtttgggtttgggtcctggtctagaaaattgttccaggtcgtgggtcaagatccggatcccaatcttgggtcccggtctcatttcaattcggatcctgggtccctgtctatgttcgtgtccgggtttgggaccgagaccggggttgggtctttggtctcagtcctagtcctgagtcttgattctggttctaattttgagtttaggtccccaatctaggtctaggtcctgggtgcaggactgagtctcccatcccggttcgggtcctgggttcgagtctaggtccaagtccgtgtctcggttcgacttcgtgtcccgagtcccgatctgagttttgattcagatccgcgtcctgatccgggtccgtgtc

SEQ ID NO: 145324 - DNA, 640 bp, Cannabis sativa
aataataataaataaaatacttactttcgaggatagaaactctgaagcaaataaaatacgcggtgacaaattaattgtagcaacaatttcaataagtgtaatgaataaaagaagtgaaatcaatcttacgataacagatcaaagaaattcgaatatattaattaattaataacatcgataatggtaggaaatagaaaaattatgagaattatgagtgatggattaatttttacttacttgtttgtttcaactgtaactaattctcttgttgattgcattgtattttgtcactatataaaccatgtatgatcaacactaatatgagatatataccgattgtattcttaatcgtcatctaatttaattagttataaatatcataaaatatttcattttattttctaactaaatgaaaaaaaaaataaagtaattttaaaaaatttaatatatttttatatttgacgatttaaaatcttattttttttatattaactatttgaaaatattaaatatactaaaccgtatactaaatcgtcatcaaccattgttttcatcccacagcctatttcctgaaacaaatgtgtaacgccctaaataattaggcacgctacccaaaatgcttatgaaaccctaatcccct

SEQ ID NO: 145325 - DNA, 1413 bp, Cannabis sativa
caccaactggtcaatcttgcgaattggaaaacaatcttttggacacaccttattcagatcagagaagtcaatacaagttctcgaagtttctttaggctttgggacgagaataggattaactatccatgaggatagaatacctcgtgtataaagtcgttaactaacaacttgtccatttcctgttttagtgccccttgcctcttggaatccaagggtctctttttttgtctctttgctgggtagcttggatcaacatttaaatgatggcagataatattagggtcgatccctaacatatctccatggctccaggcaaactgatctaggttcgccttaaaaaagcttattagctgctatttgagttgctcgtctaggttcttcccaatgtatatacactttgtgggatttcctagatcgagaataacctcttctaattcctcgattacttttaataggtttctctcatcttgaactcgggggtcaagatcttcatctttcttctcgttttctttcgccaagatcgccatcaactgataaccggcttttctatgttgcagctcaatgcgatagcaatctcgagccagcatctggtcgccacgcaccactcccacgccatctggtgtttggaatttcaaagataggtgcttgattgaactaactgcccctagtccgatcagtgttggatgacccaacaatatgttgtaagccgagggcaggtcgacaactaagaagtcttgcataatagtagcagataaaggtgcctcacctaaggttgatgcaagcttgattatgccaaggctagtgatgctttctcttgtgaatccgcaaaggttcatcatacaaggccttaatttggcctttttgagtcccattttccgtagagtctccttataaagaatatttaccgagctcccattgtctattaagaccctcttgatccatttattggcgagttgaatggtactcactaatggattgacatgaggatacctcacgtttttctcgtcttcccccgtgaatacaatgggaggctccttgttttcaccttcttagaaggttttggggcaaaggccgactgctcattctttatttctttcacatatcttatctgggcattattgcattccattacaatatgtcgccctcccgaaataactaggacgtcctctccttcaataggaagagattgtaacccttggttgtttgggttactgggcagattgggctggttatacccctggccctgtcttttcacgtactgcctaaaatgtcctcgagcgatgagactttctatctcatctttcaattggcgacattcgttggttgtatgcccaatatccttatggaatttgcaatatattttaggatttcttttgctcctcgaattcctcataggctcgggtttgccaaagg

SEQ ID NO: 145326 - DNA, 594 bp, Cannabis sativa
agggcataaaacccaacagctacgagggctgaaacttttttcctcaacttcgggtttaatgccaaatgagcagaagacgacgatctattgttcaggcatgtcagatgctgaagttggaagaatcctggaagcctcacaattcaaaagaagctccataccattcaagtacctcggaatacctatctgctcaaagaaaatttctcattctgaatgtcagattttgttagagaagatggttagtaaaatcagagggtggagttctcgaaacttgtcctatatgggaagagtaactttgattaatgttgttcttataactatacatacttactgggctcagattatgatattaccaaagaagttgctcaaggatattgaggcaatatgtagatcgtacttatggaagggaactcaaatggcgatgggtcttggtttagtgggttgggagcatgtttgtatccccaaaagtgctggcggacttggacttagagatattcagaaatggaatacagcagttatgactaggtatgtatgggacatagctagcaagaaagattgtttgtttgtcaaatggatacataatgtatacttgaaaga

SEQ ID NO: 145327 - DNA, 575 bp, Cannabis sativa
aaaaataattaaaaacttactcaattaattaaaaacttaagaactaagccaattttagctaaaaaaaaatgtgaaaaataactctaatttctagagttatcatataacgataaatatacataaaaataaaataattattcattaaagaaatatatttattaattagaaattattaaattttatcatattatttattaattaaaataagtatttttatatattttatcagtatgttatttatttttgttcgctatgttatttatgcacaccatatacataaaatttatgtataatgcatatatatatatgttattgctaataatataaaaataactcagttaaaaaaaaaccgatctcacagactaaatatatattataatattttgtttataataaattataatttaatggtatttaaatttatttattaattcaaaaatattattcaaattaatataatggaagggaataaggaaaaacagaaaaatacataaaaggaaaaaaaattacaaatatactatagtccggccctttaaacgtttatacaatccacatacaaatatttacaaaaatac

SEQ ID NO: 145328 - DNA, 1375 bp, Cannabis sativa
  modified_base (58)..(59): a, c, t, g, unknown or other
  modified_base (1335)..(1335): a, c, t, g, unknown or other
ttaaaccattagcatgtataattcatgcaaacataaatcacttcaaatttcttatatnnataactaatcagattgtaaaggattttatttagggcacaaaacccaacagtagctcgtcgacccacctacctttggaaacatctagcttcttcttgatagtatccttcaaggttttattaacaacttccacttgtctattcgcctgaggcctatatactgacgagaagctcttaattattttgttcctctcgcagaacttagtgaacaagtcaccatcaaattgagttccgttatctgatactacctacataagaattccaaacctaaagataatgttctcgacaatgaagtcgaggactttcttcgaggttatggaaacaagaggcttgacctcagtccatttagtgaagaagtcaactgctaccattgcgtacttggctcctcctcgcccggtgggtaatgccctgattagatcgatcccccatatagcaaatgggtaaggcgaggtcatcatccttagttccgttggcggcacgcgaggtatatgttaaaacctctgacatttatcacattttttgacaaactcatgggtgtctttattgatcgttggccagtaatatccttgcctaatgatcttcttagataggctctgccaacctgcatgaaccccacaaaaaccttcatgaatttctctgatgattttgtttgcttctgtagggagaacacaccgaagtagaggcatcaaataacctattctgtatagtatgccttcaattattgtgtatcgaggcactgagtacaagagttttcacgcctcgtttttgtcagttggaagttgcccgtcaagtagatagttgattataggagtcatccatgttggagagttgtctatcgtctctacatcttccttttcacatatacttggctcacttagcatctctactggaaccaagtttaattcatccaaatcgttctgcgaggccatttttgccaaggcatcaacgttagagttttgttctcttgaaatttgctcgattttaaagtaattgaatctttccaagttctttcgaaccttctctaaatatttacccattttcaagcccttggcctggtattccccgagaacctggtttacatgagctgtgagtcactatggcagatgagattcttgactttcaatgcctcggctatctttaagccaacaattaaggcttcatattcagcctcgttgtttgatgcgtcaaattgaaatctcaaagcataatgaaactcaaagccttctggtgaaatcagtattaccctgcacctgagccctgctcgttggatgcaccatcnacgtataacttccaagtgtccgcgtctcggtgaacaggca

SEQ ID NO: 145329 - DNA, 552 bp, Cannabis sativa
aaagtaatttaaaattctatatacacattaatcataaacttcttaataaataaatgataatacttttttattcctattagtatggtgtataatagcattaaataataacaccggtgtataattttttttttaataaataaaattattaccactaataagtaattagataatttgattttaatattagaataattttttaaaaattattatttattatagtgataataatcgttttatattattatactaacaaaattattacaagccgcacgaagagcggctatattacctatggtggtacagtagaaattcccctatattttataaatatgcttataaactaaagtaataattaagctcctatataatataggggaatttctactgtaccaccgtagattttgtccctatggtatgaggttgaaatactgaacgttgatcaattagaaaaataagattgtttaagattaattccaagtacaattgactattttgtaggagataacttaataattatttttttttctcaaaatgcacacataatttcttcta

SEQ ID NO: 145330 - DNA, 554 bp, Cannabis sativa
  modified_base (378)..(392): a, c, t, g, unknown or other
gtgttgagtgctctgcacggatcgttgaatatcttactcaggatgtgccagcaaggcatcctgctcggtctatcttcccgagtagatgctccaagcgggctccacgtgtcaccattcttttgatgccacgtcagagtgaaaaatttgggataacactaacaaatcaaagaacatgaatatgttgtaattatcttaccaggatctagatatactaacaagtatgttattaacatgctaaatatgaacttctaaaacgatatgaaataaatacatataaagtattagaaaccttacaatggttgcagtagaatataatgtctccttccactcagatctctaacccttatgtcctttctgtagcaaagtatcaccaagatnnnnnnnnnnnnnnncttctcttgaaactggattcttcaaagccttacacacaatgattgagtactacttgatttgtttgggcactcactattttcactatatggcttcggttttgaagagagaaagagagagagagatggtttcggctagggtagtgaaggaggctttgaaatttt

SEQ ID NO: 145331 - DNA, 542 bp, Cannabis sativa
ataaatacataaatttaattttttacggtaataatacttaagttatgtttctacaacttccgtaagtacttgactattaattgttaagtcattatcatatgttattttcttattagtatatttaaattaatttttaattaataaataaaaatttaaagacctggaccaatcaaagaatgtgacgtggtaatttacttagtcagatacctacagaaatttcagaattataacttaagtattattactttcaaaaattaattaaatttaagtatttatttaacacgtaaaaacttaggtaaatatttataaagtaaattactctttgatttttgacaaaaatatgtaagaaaatatcaacaaatgcattaacttttaattgaaagtgtataaaatctaattaaatatataaataaaatgggaacagttattaatggcactaacatgtgataaaagataaataaaaaaaagtaatattattgttttgtaaaatttgactccttttatattttagattatttcacaaaaacataaaaataacaaaa

SEQ ID NO: 145332 - DNA, 596 bp, Cannabis sativa
agcccctccaaaaattaaacactttatttggagagttgtgtctcacacccttcccgttgcttcttctctcttttctcgtcatattatagattctccactttgttctttttgtaaaagtaattctgaaacagttcatcatgctctgttagggtgttccagattgaaaaaggcttggaaatcttctaggtttgttgatctttatcttaaatttaaacatcttgatattactgattttttgttatcctcttttgaggtgttagataaggaatatgttggcattttgttttgctttctttgggcattatggaataacagaaataactacctacatcataagcatgctatccctgttaaagatacttttgattggagtatgaactacttttttcagtatgtggatgctcagcaaaaacttcagcagaatcgtgtgttggctcaaaattcaaatagggaatcgacaagtacttctggttcttatttacaggtttttactaatgctgccattgatgttcgtggccaaaagcatagttatggtattgtggtggctgatgagtctggcgctgtcaaagctggtgtggctaaaccttgtattggga

SEQ ID NO: 145333 - DNA, 534 bp, Cannabis sativa
aaaattgttgggatactaaatatggtcataggctatctccaagaggtccttggaaggatatatcatatctctatggtaaatttttggagctggtaaaatttaaagtgggcaatggtgcaaccattcggttttgggaagatatctggattggagaaacaacatgctttccggacctggcagtggtttcaaaggtgaaaaatacgagtataaaagatcttgttgccattgaaggagaggtaggaaattgcgttgcaagctggaattttcagtttagaaggaacttgatggagagggaaatgcctattcttatggatttactgcaactactggaacatattagactgcttaatatctcagtggatatcagagtatggaaaccaaatcctggtggaattttctcttgtaagttagcattcaaatggtttacttcagacataatgttggcgagttattttggacgaaaatcttatggaaaagcaggtgcccttctaaagttaaagtcttcggatggttggtggcattaggaaaaattaa

SEQ ID NO: 145334 - DNA, 570 bp, Cannabis sativa
  modified_base (511)..(514): a, c, t, g, unknown or other
cttgtaatggtcactctatccgcatttagaattctcgccgccttgaagtattgctcgacatcccaaaggaaattctctaattccttcgagtttcgactaccattgaaggcttttggttcagggactttgatttttgaagaatgggctgaagatgagtcggttccttgggacggatttgctatcgcccttttaattactgctacatccgcatcgagagccataaatctctccttcacagaatttgataggtccaatagtttgtccaccacccccttcatcttctcatcgaactctctttgcatatcaatcatggccctgccacaacccgcaacttgatctgacgcttccttcaacaaatctcgagccaacatctcaagggactccagttaatcagaatgttgttcaccaagaacaaacaaacttacactatcctcttcgttgggagaaccaaccaactcttcgagcctttcaacatgagaacaaagttcagcattcgtcaccatgatttttnnnntttcccaacacgattcccgctctgataccagttgtcacaaggctaatttctcacac

SEQ ID NO: 145335 - DNA, 740 bp, Cannabis sativa
  modified_base (690)..(700): a, c, t, g, unknown or other
aaatagcttctatctcattcactatcttcttaggtaaaatcattatctggctccaatatgagtgaatggtcacgagaactgaattcactagaactgcccttcttgcaaaagagagattcctagtactccaagttttaattcgggatgtcattttctcagcaagctctttgcaatctttgcttgaaattcttttggcacatatcggcaacttcagatatctaaatggggcattgtgtctacataaactagacatatctaatattcgttgtatttccctgtcatgcattccactaaagtagagagtagttttggtaggattaggatgcaaacctgaggataatgagaatagcttcagtccttgctctctgtcctgggatttcagcttcactcaaatcacattgacttgtcgatgcttcagttagaacctgaaatgcattgaccattgttgttggaaccccagctggtttctctttaaccttccacacttttctagctggtatgaaaccctctgaatccgcctctactggttttttcccctgttttttctctgttggcagtacaccagtgtccttcttatcccctgtaactttgatagcccattcctgcttcgatcctgatttctttctacactcagcagtggcatgtcccaaaccatagcagtgagcacatttaatgttgggttttatgccnnnnnnnnnnntccatttcaatgtaatccattttattcaacatcaataaag

SEQ ID NO: 145336 - DNA, 804 bp, Cannabis sativa
  modified_base (472)..(479): a, c, t, g, unknown or other
cataatgaataaaaacaaataattcaaataggttattattaaaatatagccggtttcgtaacataatgaataaaaaaagacacaaattaactcaaattagttatcattaaaatataatcagttctatatcagtgctataatgaataaaaataaataacacgaaataactcaaaccggttatagctaaaatagaactgcaatataacataatgaatacaaataagtaatacacaataactcaaactgattacaattaaaaaaaataaagaggaaattagtacctaaaacactgaaacataaattaaaaataaaactagttccacaacaaaatccttataacacataatacctcataaaattggttctaattttttttttttaaaaaaatagggatcaattccaaaaaatattgaggcataaatataaaaaaattggttccataataaaataaataaacacaaataataacacnnnnnnnntcaaatataatataaagaaactgggtatatttatctactagttaaaaatttaagacaaaaaaattagttccgtaaagcaacttagacaaaaactcacatacaaaaaccaattaaataaaataactcaaacaaaaatatccattcaacatgctccaacccaccaaataattacactcataccatatttacccaaaaatactcatttattatattatttaaccggttctatcttagtaataattcgtttgagttatttcatgttatttatttttattcattataacattgttatagaaccgaatctattttaattataaatggtttg

SEQ ID NO: 145337 - DNA, 665 bp, Cannabis sativa
ggtgtactcttgaggtattggaggagtctgtgagtagcatgaagatgtgggactctggggcaagttaagcactgacttaaataattgacaacatatgttatgttaggtcttgtgattgtgaggtaaataagtttaccaatcaagctacgaaaaatggtaggatcagcaagtaagtcccctttgtctttacttaattttatgtttatttccataggggtagaagtaggtttggctcctaagtaccctgtatcagctaaaagctgaagagtgaagggtctttgggagattgatatcccttgttttgttcggccaatctcaagaccaagaaaaaaaataaagtaccccgatgtctttgagtttgaattgagcatctaagtgatttttgaagtgtgcaatatcagtgtctttattgctagcaacgataatattgtcaacataaactaaaacgactatgaaaattttgtttgtgttttttatgaaaagagaattatccgagagggattgttggaatccatctgaaagtaaagtttggctaagcttgccaaataattatcttgaggcctgcttgaggccatatatgcttttgttgagtttacaaactgtattgggaggtgctttatagcaaggtggcattttcatgcagacttttgttgggctttgtgccc

SEQ ID NO: 145338 - DNA, 840 bp, Cannabis sativa
  modified_base (197)..(198): a, c, t, g, unknown or other
aagcaccgacaaaggtggagtaggtgcccgcacccattcaggttcactcctgaccagctcaaacccaaccttcggtggtccagacctgtccaagcttccttcctgagactccttcgacttaaaagcttttggggtagaggggtttgcagaagttagctcctcggaaagatcaatgacctccccagcaggcctctttnncttagaagaggacccctcaccgcctttagacttcttggccggaggagaggcgctagagctttcgtccattctcttctcttgagcgtcaagcatctgccgagacatgtttgtacagaacaaaaaacaacatggttagaaaaaagaggcatcagaaacataaggcataaaagtgaagaagctcaaaaacaagacaacatagtatgcaaggtgactacccaaacaagactcgaaagttcatcgacacctgacatcaatcttattttagacataacgactttccctttaccgaacacgtgaggggatggcagaacaggtgaaatgggctccctgatgcgaatggcatgttcaacaggcctgggcagggtcgaaaatttcttcttcctcttgagcggagtcacctactcttcctcagcctcattttcaggattcaagggctcctgagcatactgcttggcccttgcacctcccttcaacttcacttcgtgcttaagttgagttcattctctggatgagcttgttcggtccgtccagcgcctgatttccactacttccccgtcacggacttaggaatgaagtccgtgggatagagcccgtacttcacaaaattatctttgaaggtcaactggataatatttcggtctt

SEQ ID NO: 145339 - DNA, 706 bp, Cannabis sativa
  modified_base (350)..(365): a, c, t, g, unknown or other
  modified_base (561)..(564): a, c, t, g, unknown or other
tattgccgctatttttggaccttggggactaatcagcatcaacgtgaactttttggagacttttgccgcaaatttcccattcttccttgcaacactatagctttggaattgcactctcaattatatcgaacgctctatatgttccacgatatagatacgctataaattatatctatttgtaataattctaataatcaatgatcctttatagatgatttatattgagttgggacaaatttatcgttacacccttcaatgtattttgtccttaaaacacttagctacctatgatatttcagtgaactaatataatcactcaaatgatagctcaatcatttatctctatttannnnnnnnnnnnnnnnatcatcgtttcacttttatgtctagataaaagttatagattcatccataattagcgtttccactcaattgaactaccatgtccttaatttatacgtcacgagaagaactattggttgactttaacgaacagattgaagcacaaataatacaattgtactggaacctaaccttctcaggattgagatcatttgatcnnnnatcaactaggtgatattgaatttataaatattacgtatacggtaagtttattatatctgatccaagttcaatattggtcccttccgatgcatactccattaatccaacccaaacttactttaaccaatgccttagaaaggac

SEQ ID NO: 145340 - DNA, 1507 bp, Cannabis sativa
atatagtttaactcaaaaggacaatttagtcaatttaagcattctgattacgtttcctaataaagtaaacaagataaatcacaactattatatttccaaaaaaatcagtaaaaaatatattacgaatattgattatgattattttttgtttattctggtacatttctctattaatttattctgattctgaatattgtatggtaaacgtgccattaatggcattccttacaaaattagtggggaaagtcctccctttctgttctcccttttttaatcaagttctccctttcctaattttaaaaatgaaagtaaacaaatgtaagggaatcattacgttaccattgattcccattacttattagtttacatgccattagggttttgtgattttggcgtttggggttttatggtttggggaattggattgggaacggattgggaatgggaatgagattgggaatgggcatggggattgggaatgggtaggggaatgagaatgggtcagggaatgggtaggggtttggagtgaggggtcaggcttaagagtttatggcatgtttaccaataagtaatgggaatcaatagtaaggtaattattctcttacatttgtttacttacatcattaaaattagaaaatggagaacttgattaaataagggagaaaagaaaaggagaacttttcccactaattttttaaggaatgccattaagggtaatggattttaattatttttatattataatttaatatataatataaaatgaaaattttgtcttttaaaatatatcttacaaaataactatcatataatatagtttaactcaaaaggacaatttaatcaattgaagcattttgattatgtttcctaataaacaagataactcacaactattatatttccaaaaatatttagtaaacaacatattacaaatattgattgtgattattttttatttattccggtacatttctctattaatttattctaattctgaatactgtatagtaaacgtgccattaatggcattccttacaaaattggtggggaaagtcctccctttcttttctcccttgtttaatcaagttctccctttcctaattttaaaaaggtaagtaaacaaatgtaagggaatcattaccttaccattgattatcattacttattagtttacatgccattgattatcattaccttaccattgattatcattacttattagtttacatgccattagggttttgtgattttggcgtttggggttttaaggtttggggaatgggattgggaacggactgggaatgggaatgaggataggaatgggcatgggtcggggaatgggaatgggcatggggattaagaatgggctggggaatgggaatgggaatgaatatgggaataggagtgggaataggaatgggaatgggtgagagaatgagaataggaatgggaatgggaatgggaatggggataggaatgggagtgggaatgggaatggcaataggaa

SEQ ID NO: 145341 - DNA, 595 bp, Cannabis sativa
  modified_base (347)..(369): a, c, t, g, unknown or other
aataaaactttatacatattataataatatttaatatatatttattttaaaaaataaataatattaaatataaaaaaatttattaattttgaatttgaattattatttttttaagttaactctcatgtaaatcttcacagtttctgtaccaatattattgttgctctaattttttcctcactcgatatattaaattagtgtgttctcctttttttttccttttttttttgttgggaaatatccttttcttttattcatcaataaattttaggggttttttttatcaagtcattttttttatcaattttgactattatattacgttgtcttattattattattattannnnnnnnnnnnnnnnnnnnnnnattattattattattacaaagtgaattggatcactcaagaatttataataaaaacatcaacagtcggagtgggaatctctatttttcttttattttattgattaatagattatataggttcctagattaattatatagaacgttttatatattccatgatatagatatgctataaaaatttaaccatcattttaatcctaattatcaaagatcctctatagatgat

SEQ ID NO: 145342 - DNA, 693 bp, Cannabis sativa
  modified_base (33)..(40): a, c, t, g, unknown or other
acatgaaagtagcaactgtgagtcaacagactnnnnnnnnaaagcatataacaaataatatattgtcgacttgtatctaggcacccatacacatgtccacaaggtttatcagataagtaagaacgttcttaacatttggtactattgaccatgatatcatcaactaccagtactatgattgcactgcggacccgacactatgttcgtactgctatgatagcatcaatagtacccaaaagtacaattagccataatatcattcttaaccagtactatgcacgtactgccgaactggtactatgctcatactgctatgatagcgtcaattaatactttccggaaatatttcatatcagtcataaccagtactatgctcgtactgctgacccaacatgatggttgtgccgctatgatatcaattcataacttttacaactcacataaatggcatgcatatattacacatacacactatcacatatataacatgttctatgctagtctcatatacctcatttctgaattcaagtgagttggccaacctgaacgaaaaatctcgtgctggatggatgccctaagttacatttatgtaaacaggtaaataacataccaaaaacctaatccgaaaatccaaactcactactaaggattctgctatcgataatcattataacaataccctaattatcgagg

SEQ ID NO: 145343 - DNA, 670 bp, Cannabis sativa
  modified_base (187)..(187): a, c, t, g, unknown or other
  modified_base (625)..(643): a, c, t, g, unknown or other
ttttattatgtgtatttttaaaattttataaattaaaggaaactacttattaattttttatttttttaaaaaataatatttaaagttttaaaaattaatataaagtttaaaaatattgaacatactccaatattaaaaatcacaataaaaaaaaataatacatttacaaataatatattaatatttntatatatttaaattaatctaaaactgatataggttcaattaacttaaaataaataatattaatatttatttatatttaaattaatctaaaattcggactgtgacaatctgaaccactgtagaccgtaacccgggaaactgtttttggtggtttggttaattcagaccatttacggcgtaatggtttggttgcggttcgtaataaatagttaacggttattaaaccagaccggaccgtttataataaataattgatttttatatatattttatctatgctatatgtataattttgaatttttttgtgtgtcaagttttttattgcatgaattttagatttttatatcatgtttgatttttgagaatgtttatatattattatttatatgttatacatctattacttatcatgttaaatatatattttgaaaaataaaannnnnnnnnnnnnnnnnnnagtacaattacttaaaaaatatgaata

SEQ ID NO: 145344 - DNA, 640 bp, Cannabis sativa
tttaatgtaatgctaggtcgaccagccttatgtgacttaaaggttgtcacatcgatattccattcgtgcctgaagtttccaacaaagaatggggtaggatgtcgaagaggaaaccagcagactactcgggaatgttataacctcgcagtggccaaggctaagaaggaagtatcctccaaccagagcacagacaagggcaaaaaatatttccaagtagtgaacttcccaaggtggggatgaagatgtgaatcctctacttggggacccaagcagcaatgttggacatgtggaagagttagaagagatcgaaatcgatccagatatcccggccagaaagctaaagatgggaaagggtttgttgctcgaagtaaaatcagaattgataaaatttcttagagcaaacctagacgttttttcctagtcacatgcggatgtggtcggaattgatccttctatcattcgcacgttctgaatattgatcccaatttccgaccagctcaacaaaagcgaaggctattggacaaagaccgagcactagccctaaacgaagaaatagaaaagctacgcaacaacaatttcataatagaagctttctaccaagcttgggttgccaatcccgtattggtgcccaagccgaaca

SEQ ID NO: 145345 - DNA, 825 bp, Cannabis sativa
attgatgttgaataaaatagattacattgaaatggagttttatttagggcataaaatctaacagcatgtccctttgagttatactgtgatggacgacaactggtttttgaacaaagaggcatatggtttttacaccgtcaaaagctcctaccattacttaaaaaccgttaatggtaatgggagttctaatatggaggctgatttttggaaagtgttgtggaagattaaagtccatcctaaggtgctgcattttgcgtggaaatcactttcgggatgcttgccaactcgatctcaactctagctcaagcatgttcctgtggagcttaactgtgtattctgtaatggtgcagaggaatcaatattccatgtcttagttgaatgttcctttgttcactcttgctagaaccgtttgtcactcggtgttggtgtcatggctgcaacaacatatgttgactggtttatggagttggaagcatgtggtaattctggtgtacttaaagaagtagtgatggttagttgggctatttggaaagcacgcaatgacctgctatggaatggaaaatattgtactgcatcggatgttgtttggttagctcgaaatactcaccggcaatggatctttgcacagtcaaaccgctgaaattctcttgctctagagctttcactggttgacagcaacaattattggatcaaaccagtagcagacaagctcaaaattaggggtgagtaaaaaaatccaagaaaccgaccaaaccgaccgtccgaacaccaaaaaaaccgacaccgaaaaaatcgaaaaccgaaaaaaccgacttcggttaaaac

SEQ ID NO: 145346 - DNA, 677 bp, Cannabis sativa
  modified_base (648)..(651): a, c, t, g, unknown or other
ctcctaccaatagcaagtggggtctgcacgcgtcagaccgttgtcctcaaaatagctatcaaccgtataaatataaaatactaaagaaacaaataaaaaaagttttagttagtttctgtaaatattccaaaaaataaacattaatactttttacttattttaaaaactatgaaatataattcgcacgactaatttaatttttttagtattataataaataattatttaaaaatataattcgaatatatagtaaaactacgaatatattatcttatttcatattatcaatctatctatatatctatatatataaaggaaaagtataagacagtgatatagcgctttaaaattgctttattctaccttattctttttcttattttttcacattttttaagtattattaaataataattaatcaattaattaaaaaaaatcacgattaggtctataatagttaagtaaactatctatatataccaccacataatctcaataaacataattactttttatcattcattcaatctctcttctcttcctttcacacaatctatagaaattattttttgacgttttcttatttttattacatctattcaaattgacattaattgatggtattctatatctttatatattaaaagnnnntatctaacggcatttcttggtttaac

SEQ ID NO: 145347 - DNA, 531 bp, Cannabis sativa
ctttattcaaaaaaaaaaatgataaaaaaaaaatatgatattaaagtgatgaatattaacattacttgggagaataagcaaagataaaaatctggagaagaagagaagtggtgtaacgaccaacaaaaaaaattagaggtatatgattttgttatatatattgggatggaaaaaaagagagaagagatgagatataaatggattttgagttgatgagatatattgttattctcagctaactcttacaacagcaaaaaaatataatttcatgaaaagggcgtaacttgtacgtagcttgttcaattaaaaaatatatatatagaaattatttaacttatacattagcttgcaagtaagttattcaagtactattatcgatcgaagaatggaagagacaggagtgaattatatttacacagctctcatcggcctaatcattgtcgttttagtatataaactcttcatcaaaaccccaaaacgacaatacaaaaaccttccaccaagcccaccttatcctctcccactcatagg

SEQ ID NO: 145348 - DNA, 955 bp, Cannabis sativa
aatttttaaatatttatttgtctggactaataataatattttgccacgtgtacactgtgtctacgtaaacaatccaacatgttatttaacaactaaatttggatggaaactataaattactaagggttaattctagcaaaatccccaatacttttatttcactagaaattaacctccaaaactcaaattttagcggtaaaacccccaaaactcgcaattagtaattttcatccgttttcatctgttaactaccagaatagcagtacacgtgtaccattcacgtgtatacacgatacacgtggtacaattttattagtccacgtaagtaattattataaaataaataaatttaaaattaaaaaaaaatcattttaaaacaaataaaaaaaaaaacctaattttttgtctctaacatttttttttcactttttatttttcttattcatttttatagtttatatcataacatcaccatcaccatccacagaccgaatcaccaccaccaccaccaaccaccatcaatactggtaccgaaaccaccattattcaccaacaccatcagtgtaacttattttcaaacccaaatcacacagaaataaaatttaaacaaaatccaatctgacaaacaaacaaacacacatatatatgtatgaagctccaaacccagatctgaacatacctaaaaaaaattaaacaaacccatatcacataaactcaaacaaacaaatacatgcatctcaaattcatggaagaaacaatgtaacaaacccagattgaaaaataaaatctcagatccaaaaacgaatcaacatctgtcaacactggagccattgattccgttcgtcggcgctacccattgtcctgtcgatgcttcccattgagaagaataggagcgagaaaagacgaagaagacgaaggagaaatccagaacgggggagagagagagagagagaga

SEQ ID NO: 145349 - DNA, 554 bp, Cannabis sativa
attttctcaaattctttaacatattacataatcttattcaattaaacaataatataccaagaatgaggagattgctcagagaaccaccgataaaagaagaggggactttatttgagaccaccgaaaaaatcaattaactcctaaaaaattaaacaataacatttattttttgagaaaaaaatattaacataaaataaataataaataaatatatacaacacaattataaattactacacatatactaaactttctttacatataacattaatatattattaacctaaactaaatcacataacataatttatctaaactaaattaaaacaactaattaacttttacaataataaattaaataaataaaatttttacacaaacctaaattttttcttttctaaaacttttttccgaaatattttcttacaataaaaaatactttaaaacacatgaaatttattccaaataattttttacacattatactataacaactataaaatacattaaattttttaccttataaatatatatatatgtaaataaatatatat

SEQ ID NO: 145350 - DNA, 1154 bp, Cannabis sativa
gaacctggtgagtctttacaagactattttaaggattttaatgctgaagtaacaaaagttgagaaggctcccgagtcttcgctagtatgtttgttaataataggtgtcgtgccaagaaccgatttttggaaggaactgcaagctcgaagaccagaatcgctggtcgaattctttgccatggcagaatcgcataagaggattgagaattccctggcagagtcggagaaagggaaggataagcgtaagtcaccaatgccgcgaccacgatcccgcaatcccaagggaagaattccagaggacgaagcccaagaagaggcagtccacggagacagcgaagtccaaaactggccaagtcccctccaaagaaggaatcctccccgaaaagaaaaggtggaccatgcttcgtgaactatactgaactcgcagtacctcaagaccatatctacgccatcgaagagaagaatggggtcttcaagaagcctcccccgatcaggggaaaccgcgacaagagagaccccaaaaaataatgtaagtaccataaagatattggtcacactactttggagtgttgggtttcgcaggacgagatcgaagagctgatcaggagaggaaacttcagcaaatacaaaaagaatgaggaaagtcatccccgagcggatgataaagaagaaaacgaatgcgagtggttcaagaactcctcgcaacatcctgaccatcataggcagaccccatatcgcaggtgattccagaaagtcgcaggagcgatatgcaaaagaagccaaagaaaaactgcttcccaatgtgaacaacctgagagagcgaccggagaagttgttcaaaagagagtgcgacgacatcacatttatggaaagtgatgcaagatgagttcaccacccacattctgatgcattagtcatcgttgccaatattggcggagataacgtccaccgtatactcgtggacaatggaagctctgtgaatcttttgaaattccaagccttcaaacagatggggttgcatgagaaggatctgcaaacctgtaacgttgagtatatacggttttactggcgacgtcattgcactaaaagggatgatgaggctaacactagtactagttaataaatgatggaacaaatgccaaaaatgtatagaac

SEQ ID NO: 145351 - DNA, 657 bp, Cannabis sativa
  modified_base (28)..(34): a, c, t, g, unknown or other
  modified_base (62)..(68): a, c, t, g, unknown or other
  modified_base (94)..(100): a, c, t, g, unknown or other
  modified_base (126)..(132): a, c, t, g, unknown or other
acttattatcaaaatttcccttcttgtnnnnnnnattatcaaaatttcccttcttgtccttnnnnnnntcaaaatttcccttcttgtccttgtnnnnnnnaaatttcccttcttgtccttgtaatnnnnnnnttttggttactccatatgaatggtttgaaccatagtactcttagttttgcttcttagttccttattctgactatcaattacttgcttaaattaacaatggatttttatcacaagtgtctcccaagtcataacagggtgagttctttaaaaccctcctactatgacaaggtaccgtgactttttgtctaggaacattaatggtattatcctcgtcggttgtgtcaagacaacagagatagtgggaccatcttatgtagaataagatgatagaacactatagaattgaaaatatctcctctactttgctacttagttttcagatttagtcaagttctcagaaaagtattatttgttgaaacaaacactttcttatcttaatgaccataggatggtacacccctaatcactttagactagctattaaacttgaaaaccttagttagtagttctagcttttcttaagttcatgattaggacatccatgaatctagtaatggtgtgtactaagtatataaccattccatc

SEQ ID NO: 145352 - DNA, 864 bp, Cannabis sativa
  modified_base (259)..(261): a, c, t, g, unknown or other
tcttcttcttcaatttttgtcccttatagtgatagagtacatgcccacgcatagcaagttggtactcaataatagtgtgtaagactgtaaagaatccaacacccgaaggagaattgagcttagatcttgataatactctacgacagaaaggatacaaggttagagatctgagtggaaggaatcgtttaattcagatgcaaccaatgtacaatttcttgaactttatatgtgttaaaatttcattattttagaaattcannnttaggatgttaaacaatatacatggtagtaaatctagatcttagtaaaataatccccaacaactggcctcagagccatagtaatgatttattttcatgaaatatggatttaaaataatgattgtgataatttggatgtgttcatgttggtttatgtgcatatttgatgattgtatggaaatcgtaattttacgataataaatattttttgtttcgttctgaaagtattttttttttggaaagtagatgaaaattaataaatttaagatctccatttgaattttttatgaattagttatgattttttaaatttgaataaaaatatttaaagctgtgcaacacccatgcgcacgcgaacaagggcatgcacaccatttcagacacggcttgaccaagatttctcagacacaagctgtttgaatgagaagctaaccgagcgagcccagccaggaaggctgtcggcagccacttttcacgcccaagtccccctcttacgcgcacggggagtatggattgcatactcccctcgaccaaacttgtttttgtgatatcttttgattcaaaaatcatttttcagtggaataaaattcaaattttgatagaa

SEQ ID NO: 145353 - DNA, 592 bp, Cannabis sativa
atcacaaacggaaggctgaggcttaccagaatcaggggggtaaagaaagttctggggaaatagaggtggcggtcagggctgcgggtcctcattccgatcatatcccgagtgtcctaaatgcaagaagcaccatccgggtgagtgatggagcaaggctgcatactatatttgatatggattatatgaattgggtgttcaaggattaccttgacagatgtgtgatcgtgtttatcgatgacatcttggtgtatgttgaatcagaagaagagtatgagttgcatcttagagcatttttgcaacggttacgagatcataagctatatgctaaattcaaaaagtgtgaattaaagttatcttgtgtctctttcctagggcacatagtggataaagattggatcatggtggatctggccaaaattgaagctgttcgggattggccaagaccaaagtcagttactaaagttagaagctttgtaggcttagctgtgtattatcctcggtttgttgagggattttcaaagattgttgtacccttaacggagctgactcgaaagaacttgaagtttgtttggactgatcggtgtgagaaaag

SEQ ID NO: 145354 - DNA, 522 bp, Cannabis sativa
tttttctcaaaaaaaaacaaaaaactatcatgatactactggttactatggttttgaattaaaataaaagaaaaaaaaaagttttttaatatgataatatagatataattgatttatactataataataaaattaaataatattttataaaaaaaataacaaacttatatttccttacatttttctaagagcaaataaatcgctaaaggaaaattggtgaaatgttttaactcaatctcaattagagtcctaaattttgtgttttaacttttgtttttttttttaattattgtaacacttgcttatttatgagaataatccatagaaaatatttaattttatgttcattcgtttctaattattttttaaaaacaaaattaggattcaagtttttaagtaatgaataagggataaatattattttgaaccttgtatcttacaaaagttaccaattgaacccgttgttttattaaagggaaatttgacattttattctaaaaaaacacacatggtgttatttta

SEQ ID NO: 145355 - DNA, 869 bp, Cannabis sativa
  modified_base (433)..(435): a, c, t, g, unknown or other
taaatagttttgacatttataagattgaaattaaaaaatatgacattagtgaaagaaaagattaattatgaaataaagtggaaaaattataactagtagaatccaccttgtgtgggctggccacttagtgattttttcctattattttatatttttaatccatataattaaatccttaaccttagttgaaatactataaaagaaataagatgctctcgttctcatccaactcaaataatttagtttccattttttgagacaactagaaattgagagcctccgtcttagttattttgaatcctcttctattgttcttcattaaattctaagcctttagtgatagagtaccatgtctactcatagtaagtcaagtactgaatcatagtgtagaagactatggttaaccaaattgaaggagagaagatccaggttnnnatcttgataatgctctgctactgaaagaaatcaagggttagtgatctgaatggaatgagtcattatattttgctgcgatcaatgtaagaattttttaatctcttatgtgtttatttcatcgtattaggaaatttatatttacggtgttagattatagaattataatcaacatacatgttagtaaatctagatcaggtaaaataatttccaacaactggcctcagagccatgttaatgatttactttcatgaaataaggattcaaaataatatctttttaatttagatgtgttcatgttagtttatgtgcttaattgataaatgtttgtaaattacaatttttccataaaaaataattttattttagttttaaaaatgatttatttagactccttgtgaaaaatttagcaattttgttttttacggaactcgatt

SEQ ID NO: 145356 - DNA, 1042 bp, Cannabis sativa
  modified_base (981)..(987): a, c, t, g, unknown or other
taataagtaaatctgattatattcaaatgagttttatttagggcataaaatccaacaccttctgcttcaaccagtcgttttcttatataatagactggatgttggacattattttcttctcttataagcatagctgttatagcgcattcggtgacgaccaaatatattcctaattcttctccatccaagggttttgagagtacaggaggctttgcgagttgtccttttagttcttggaaagcattctctcatccttctgtccattcaaactttttattaccttggaggatgttaaagaagggaacacacttgtctgtcgattttgaaacaaatctgctgagtccggctggccgaccagttaagctttgaacttctttcgtttttgttggcgacttcatatctaggagggcttgtattttttctagattgacttctattcctctagcattaacaattaatccaagaaacttacccgagctgaccttgaaggaaaactttaagggattgagattcatgttgtactttctgaggattttgaagcattcatccagattctctatatgcccccaacctttttggatttgacgagcatgtcatccacatatactttcatattttgtccaatttggtttttaaaaaattttgttgactaacctctgataggtggctctagcattctttagactgaacgacactactttataacagtatagacccaaatttatttgtaaacttgtatgttcttggtcaggtggatgcattatgatttggttatacctcaaataggcatccataaagcttaagatttcatgtccaactattgcatccacaagctgatcgattcttggaagtgggaaacagtccttgggacatgcctttttgaggtcggtgaatcgatacatactcgccattttttatttggcttggccattagtactgggttagccacccaagtgttggaatatattttacaaggatctnnnnnnnctaacaagtatgtttttaacaacctaaatatgaatttctaaaacaatgaaaataa

SEQ ID NO: 145357 - DNA, 754 bp, Cannabis sativa
  modified_base (210)..(210): a, c, t, g, unknown or other
  modified_base (331)..(332): a, c, t, g, unknown or other
  modified_base (655)..(667): a, c, t, g, unknown or other
ggggcctccaaaatagtggggcctagggcgtatgccccggccgccccaccatctggccggccctggtaaccatccaagctcaaattttggtactaaaactctcaaaactactaaattgtcagcaaatttaaggtgtcatctagttttcacagttaactgtcaatatgaacggcttatgtgtacagtcttgtacacgtggcacatttatantggtacacctaatattattatttacaaatcataaaaaaaatatttcaaaatttataatattttttattttttaaatattttataattttatctaattttaaaataataatattaggtatannaatataaacgtgtcacgtgtacaagattgtacacataaacagtctatagtgactgttaaccagatgccaccttaattttactaataaggttcagtagtttagaaagtttaccaccaaaatttgagcttgaagggttaaagcatgcatatccaaccatgctctttaaacatatttttttaactaaaataaagtgatgcttaaaaaaataatctccaatcatacaaaaaataattctctatagtagaaaatgaatacgaaactctctaaatataagaagctctctacttttttgcttatattttttagagtaaatagcggcatannnnnnnnnnnnnttaagtttgtaagtggcataaacccaatgtttatttttagcggtataagtatccaatgtttgtaaaactataattttcctccagttt

SEQ ID NO: 145358 - DNA, 594 bp, Cannabis sativa
aaattccaacttttagagacttgaaaggtaagatttttgatttgtcgttgaataaggtgattctcagtttcttcactgttttatctttgttttgtgccagtttattaatctttgttttttttttatttttttgtttcatatttttctcttttgtttctgtttttcagttaaagatgaaacattcatctatctgatgaggagaggtagaagttgcaattggaaggcttatttttagatgaatctattgatgatcgtggtacaactaagcaatcattcgagagtggttcatcttctaaaaaatctgattcagaggacatagaaatgttaaaatctaagttggaattggtcatttccaataaagaatcattggctgaagatttaatatctttgaggtgttttgttgaccttaatttcaagtctgtcatgactgtaattaaggatattcaaaaaaaaagttaatgtcatttatgatcgaccttcggttgagatatttattttcacagtttttgtttcacactttttttcctgttattgttggttgttttcctgttttattttagttgcactactattttgacttaaaacgatttgttt

SEQ ID NO: 145359 - DNA, 523 bp, Cannabis sativa
ccaatttgacctgcactacattccacgcatttccataaaagggcaagcgctagcagacttcatcacagaatgcaatgaagctgaagctaccgcaaacataccccaaccatcagtcccatcgtggaaggtatttgtagacggagcctccaacgagaatggatccggagcgggggtcgccatgatatctccgaacggacttcgactccaaggagccctacggcttgacttctcagcttctaacaatgaggccgaatacgaagccttaatagcagggctgagattagcaaaaatcgtaggggctaaaagagtagaactctacagcgattcccaacgggtggtaaactaagtgtcgggggaatatcaaacgcgcggaaaaagaatggccgcatatgtagcaatagtctgggaactgctccacgagttcgcggactataaagtggaaacaatccgcagagaaaagaatgctcacacggactgcgtggctaagttagcgtcagacagcgaaatcgagaaactaggggtg

SEQ ID NO: 145360 - DNA, 762 bp, Cannabis sativa
atttataaatacgtatcttaaaaaatcaaactaaaattattgagaatttaataaataatttaaataaactaagattttatgaagaaaaatcaaatttatatatatttatgagactcatatcttaacaaataaagaaaaataatcaaaaatttaataaaaatataaaattattttgacaaaaagttagaaattaaactaaaaaaatattatctttacttaaataaatctatattttttgagaaaaaataatatactcaagtttgttccgtaaaatttagtttttacaaaaattaaatttttaattaaaaaataaataatttttcaaatcacttaattagttttaaaatttaatttattttttaattttcttaatcattcaaaataattattttaagatctaaattaattttttaagttttacaaaaaaaaaaaaaatattgaatctttctcatttttattttgagggtgttgacttcaaaaagtgatcaactgatagtaggatcgtatagatctgatgcttgccacgtgttgcacaaacaagaatgaaaagtaataaacacacagatttattatagaggttcggcccccttgtgatagtaggtaatgacctgctccctttttaatcgtattaatatcaaggattaatactatctagatcactatagatggaatctactatagcacccttaggaatacagtgtattaatcaagactggcaaaactcaagtgatactgttgttggaatatattgtaccaggatct

SEQ ID NO: 145361 - DNA, 1020 bp, Cannabis sativa
ctcaacttcatatgaagcccaattctcaatctcttcctcacatgcagcataaattgctctttaaaactaccaaggacctgaaaaatcaagactctcgattaagtaagaacgttaaataaaagatcaaaaataaaagatccataacacactccaagtcactcacatctacttttgatttatctgcatgtacagcagcataagctttgaaattggcttggctgcatcaattaaataaaggaagggaattataaatattgttttcaaaactaaaaaatattagcgcaaatataaaatcaaataccatattatgtactactatatatattaatagagtaatttgcggcataaatacctaagtttaactttgagttgcaaataaacacctaacttatttttttggtggtaaaaataccttccgtcaatattttgttgcaaatggggtacctaacgttaagttatctgttaaatgccaactaagtacacacttggcatcatttaataggtccaagtcattttttttaattttatataagaatcattaaaattaaaataatattttaaaagtaatattttaaaagtaaattttaaaagtaaaataaaataaaaaaaaataaagaaactttttaaaaacaacttacgaaacaatatctgactatcttttttaatatcaaaatcaattcttcaaaacaatcttacaaaaaaactcttcaaaagaaaaaataaacaacaccagatattctcatgctctcgttcatcatcttcagcatatatataaatcaaattgcagaataaaaaaattcaaaaatttaatgggtcattcttccacaaacccatcagatccaaaataaaccttgaactttttatcaaaagtataaaaagaactccagaaatttattatctatttgcccaaggaacccactagatctaaacccaagagaacccccacgccttcagagaatcgtcgaagctgccaccgtcgtcttcagaggatcctgaaaccccaaagccccatctccctct

SEQ ID NO: 145362 - DNA, 917 bp, Cannabis sativa
  modified_base (864)..(877): a, c, t, g, unknown or other
tgtgtatttatatcgctataaaaaaaatattaaatttatactacttacaaacttataattttgggtacttatactgttatttacccaaataaatgttaacgaaataaacacaaatcataggaaaattatgttacaaaattacttagcgagtaatttgattatttaccaaaagttattgataactcaaaggtaagaaattggtaacttttgtcattgcacaatattaagttggtaacaattgttactagtcatagttactgtaatattaatggttacagataacaaacaaatagtaacaaaattgttgatgattaatttttctttttattttttgtggcaatgaataactgttgatgattaatttggtaactcttaaaaatcatatttaccaaattattaataactattctaataactcgaccaaatcattattgataatgataaattgatttggaacatattggtacctcaaaataaataaaaaatgtttcatactgattaggattggtaattcctggtaacaaaatcagtaagtatctaataatactcacagttatcaaattggaattcattagtggtaataaccaaattattgctttcagtaactaaattattactaacagcaatcaaatggcaatgcatagttacaaaacaaaagtattatattttatgacacttttagagggtaaataccattttggaccctgtattttacaaaagttatcaattggaacttctgttttgttaaatgacaaaatgaaccttatatttttcaaaatgttaaaaataagaccttaagctcaattttcaacaattttattttttactataaaaaattttaaagacaatttctaacacgaacannnnnnnnnnnnnnaaccagttttgtcataacatctctatatcagattattatt

SEQ ID NO: 145363 - DNA, 1263 bp, Cannabis sativa
aattactttggatcaaatttagaactcactgaaaagaacacaagaatggctagttacatagaaggaattgcagatatgatagtggatgcaactaaacaatcagataacagagaattagcaacacaagtaattatccatccttaacaaattcaagttggaaaacttttcagaaacaaggaaattttaaagactgccatcagcctttactccatcagaataaaaccaacctttcaaagttaaaagatcatcaccagtagattacaagctagtatgtttggatgacaattgcaaatggagtttgctagcatcaaagcatggaaaaacattgatgttcagaataagaaaaattgaatatacacacacttgctcaatagacataacctctggagaccatcctcaagcaacaagcaatctagttgggaatgttataaagagcaattacataaatccaaagcgaaattaccctccaaatgaaatagttgatgatctgactgataactatagtgtcataatttcatatcaaaagcttggagggctcgagagaaggctaaggagcatattagaggttgtccacaagagtcatatgcagatatacctgcaattttgtacatgatgcagcaaaaaaacccaggtatttcatatttttatctatatctgaaaatttcaatagtagctaaatacaattaagcttccatagcaaatattaagcatgcttactataaaatattcaactaaatagtagttgcaaaccttatattgtcaataatcatacctggaactgttagttacaatttacaagttttattataactttttgtgttactatatagaaaaatatattaattgtaaaatatttacatgacatgaactgttaaagacttagtaacagatgaaaatggaaggttcaagtacttattctttgctataagagcttcaataagaggatggaaccattgtacaccaatagttgtaacagatggcactttcttaaaaaatccacatagagggacattactaattgctaatgcacagaatgcaaatagacatatagttccacttgcatttgcaatcgttgactctgaaaatgatgaatcatggcaatggttgtttcaaaaattacaagaatcctatggggaaagagatggacaatgcattattttcgacagatatgaaagcattgcaaaggcagcaaaagagaatttcccaaatttaatgcatggtgtatgttgctatcacttgttcaaaaacataaagtctaaattc

SEQ ID NO: 145364 - DNA, 578 bp, Cannabis sativa
aaaccaagcagtaaaactcatcaacaaacactaatcatcatttcaccattaaaggtcaaggtttgagttttcaaactcaaaccttagccaaacctcaacaaagcttatcattccagctcaaaacaaacaacaaactccccacctaatccctaaacacgaaaacaaaccatcccaaacctacagtaccctaaacacccaaattcatgaataaaacatacattaaacttaggaaaaatcaagggaaggagagctaaaattatttaccttgaattggagtgttctaatcaatcaagattacaccaattgagctaaccacaacaattcccagctggttttttttggtgttcgagagaggaggagaggggcttggaaattctaagtttccttcaatgctaagttttcccttcatattaattaaatcaatttctttatatcttaataaaagatataaccagcccctacaaagccactagaggccaaaaaaattaactaaggaaaagaccttcttgcccccatcactaattaaagtaataaaaacatcacaagggtaaaatggtcatttactaaaccccaaaaat

SEQ ID NO: 145365 - DNA, 503 bp, Cannabis sativa
  modified_base (189)..(192): a, c, t, g, unknown or other
gtaggtaaaatttattaacattaaatgtgtaaccgtaaaaaatgaaacacatgcgatgtgtatttgtcgagtgaatatcgatacaatgttgatagcttgtcgatagttgaatggattaattaccattgtacacgtgtctgacatgcaaattgcattatggagtctatgtcgatattatgtcgatggtgnnnngattatatatcgatgaggactgccaacctcatgtttggtaattttgtcaacataatgtggacagtatgtcgactatttgtcgatgaaaacatggtatactttctgctgttgtttttatcgacataatgtcaatggatatcgacgggatgtcaatatttcttattttttggtattttttcctgtactcaccttgtttggtttgaaattgcaggagacaacgtgtttcttgttctatcgtacgatggtgtttggttatgtgagaattataattggatttacaaagcagaaggcagcttggcgttgacagttac

SEQ ID NO: 145366 - DNA, 603 bp, Cannabis sativa
atctatcaacattaattaataagtctttcgtcaaaacaattgtgagaaagaagattcattttagttcgtatcttgcttagtttttcatttcaaatataatgcactcaaggtgtttgaaaatattactaatagaaataattaagcaaaaacatgaaactttacatataatttttatttttgttagggacttgctcccgagactcctttgttttacatggtaaaatctttgagctaatttactcaattaattatacctttttttaacaattcaatttataaattaatatattttttaattgtttcattcatttgggaatatttgaatggaataccaagattgggatttcaaaaataggatgactaacatgtcatcaagttatacgtaaatataaataatattaatttttaaaaaaaaaattaacaactataaatattatctattggatcaaatttaatggtcaacccattcatggataatacctattaagaacacgcccatatatatatatatatatatatataattttggctaattttagttaattaaataaatatttgtaagacaactataaattttttattataaactatatcaacaaattg

SEQ ID NO: 145367 - DNA, 558 bp, Cannabis sativa
tgtaaagggttttatttagggcacaaaatccaacaatctggtgcaggccggcctgaacgagctcataaggaggatgagcttattcatcttaagcgcgaggctaagttgaaaggaggtgctagggccaaacagtatgctcaggagccttcgaatcctgaagatgacgccgaggacgagcatgtgactccactgaagaggaagaagaaactcccggcctcgcccatgcttgttgaacatgcaattcgcataagggaccccatttcacctgttcggccatctccctccttttccggaatagggcaagctgtcatggctgagataagatcgatgtcaggtgattatggatttatgagtcttgtgcgggcggtcaccttgcattttactttattatgttcttgagcttcttgattttcatgccttgtgtttctgatggctgttttctaactatattgttttgttctgtgcaaacatgtcttggcagatgctcaatgctctgaagaagagaatgttgggttttatgtcctaaataaaactccatttcaatgtaatccattttat

SEQ ID NO: 145368 - DNA, 623 bp, Cannabis sativa
gatattgaagctttggaggacactttgcatgagttacacacctactacatcagtgatgcccgtgtcaacaaaatacctgcaagataccttaaaaatggcacaaatacgattatggctggacgccaaactcaaaaacacaagttgttgaagtccaagaagaaggcaaacaaatttctaagccagtccatgaattcgttgcgtttaaaaacttgtcatcttacaaatactccaacacaccacaaggtaattttggatccccacgatataacacataacaaataatttacgaagttttaactaacgttacattcaattttcagatatcataggagtagctgtcaaaataaacccaacaaaagtggtgaacacagtttatagacagcgaaccataggagaaatatatctattcgatgacaagtatatatattataatatacaaatacataataataatctttattggagcactcataataatttaatatggatttaaaattatgatacatagaaaaactaataatagcattacttttttcaatcaaagttgtagcttcaacccgatatgcttgactctgtggggtgctttggtacaagatatatgtgaaaaattgtctgaagttatt

SEQ ID NO: 145369 - DNA, 511 bp, Cannabis sativa
ttgggaacagctgtctaaagattttaagaaacaatttcagcttccgggaaggaaggctaaagctatataaaaattcaagcttatacttcacttgaaaggattaattagaatgcatcacgaggggtaggatagacttcaagcatcccttttgttcaaggaaggagggttgaagacgtatcgcaccccagtgatctttcttgaacgaacgtgcttacgagagtcatgttgaatttttatgtaacaaactttggcttctggaaaggaaagctaaagctgtatgaatattcaagcttagacttcgcttgaaaggatcaatggaaagtatctcgaggggtagggtagacttaaagcagcccttctgttccgggaaggagggtggaagacgtatcgtaccccccgttgatctttcttgcacaaacatgcatgtaagagtcatgttgaatttttatgtaacaagcttcaacttctgggaaagaaggctgaagttgtataaaaattcaagctcagactt

SEQ ID NO: 145370 - DNA, 898 bp, Cannabis sativa
tggactgcaatctctctcttgtcgatttcaatggtggaccacaaagctattccttgatccaccgtcaccatgaagctcgagttccctctgctcaatttctccttctcttgtctccttaccggattcaatggcggaatcgccatccccaagctcctcttgcgagaagacgagatctaccacaaaaggccaaatttggatatgggtttggctaaatagaagattatagaggtattggttgtttgatttttttttgccatattttcttctgtaaatagaatattgaaccatgaggaacatatgatgaaatgttgctatttatttgtgtataaatctgagtatagtcgtgtagttgtaaagaattggtttgaatgcaacaagtttgaatctgaaatttattggcttgtttgtaatttttgggttttagatatttatggatttatttggatttgagattttatttgtttatataaatttattttctaaatttttgaaattgaatgaagaatagggaaggaaaatagtgagttgatatagatagggtatatatttttggattgcttttttttttcgcgtttgaagttggatatctggatcgatctgggttttgttttctccctttcaatttctcaattgagtttatttattaattcaaagaaaaagaaatggaaaagaaataaatgttaaaaaataaaattaattataattagtttttttattaattttttataatatttaaacatttaaataataaataaaagaattaatgacatggaccaattaatgagtgacacatagatgccgatcagtcagttaacgacgaggtacctacggaagttccacactagtgacagaaggtatttttaccgccaaaaatacgacttaggtatttatctgctac

SEQ ID NO: 145371 - DNA, 602 bp, Cannabis sativa
tatgatttattaattccgcactttatacttaatcatgtatgtttcagtttatacatataaaagtctaacatggattcgttacgttatttgctcgtatcggcttatatttcttaaataggtcagcccgttttcatattcgaacttaaattcgtaatttattttttcatatcattttacaattactaaagtatatatattatagcttagttgtatttatataacttttaaataatattttacacataatcatataaaaaaaatattaacattattagaacttgaatatttacttataaatactcaaattcttacatcacaccctataaataaattaatatgtaaccttaattgttcagattttaatagttttaattatataattacgatatttaggattacatttaaactttattattattttaaatattgataaattcatatattattattataaggttttttaatatgtcgtgttttgttttttgagcttgtcgtatgttctattttttgggttagtctattcatgcttacgtgtcgtgccaatttattaaaaaaattatatttaatatagggtaaatagcgacataagtacccaaagtttt

SEQ ID NO: 145372 - DNA, 863 bp, Cannabis sativa
  modified_base (422)..(423): a, c, t, g, unknown or other
tggtataggtgagagtaatatctaagattagactaaataattggagctcgggacttgagagctaagatcgtctttgtaacaccctaattctaaagcacacaataatgctttctcaattacagtgctaactccgctaattaaagatttttctctaaaaacgtgtcaaattaaaactttttataataaatattaaactttataatttacataattatttacaaacaccgagatcccgtttctaaacttttatacaaaacataccaaaatacaatatccaggccgcacaacgactacaaaatataacccctggtgtcccgagaccgaacactccaggtcacgttgccacgacatgtacaacctcatctcagccaagctcactcctgttcagctttcgccttttctttacctacacatggaagcannactgtgagtcgacagactcaacaagaaaagtatataacatatcatataatatcggcttgtatctaggcacccatacacctatttacaaggcttcacatatgagtaagaacgtttcatactagggtacagccactataccacatataatacgtaccttgctgtacgagtgttggtagggtttgattcgtacctcgagtaccactgagtgatataccacagacaccctgtactttcccatacttgtgctggtatcactgtaatgtactcttaaacaatattcagtataccaatgcactttgtaccataactttacaagtgttggtagtgcaactaacacataagcatgtatatagacttaacacatatatacactcagatattcatatacacattatacacagttcttaccttctttccaaattcaagtgtgttggccgacc

SEQ ID NO: 145373 - DNA, 980 bp, Cannabis sativa
  modified_base (616)..(617): a, c, t, g, unknown or other
  modified_base (676)..(678): a, c, t, g, unknown or other
aaccgggttggcgggcgggtttgcaggttcaacctgaaacccggtacccctaaaatctcaacccgccaacccacccgaagggtaccgggttgaacccaacccgcccaaaacttttttaaaaattcttttttgcgggttcaccagttcgggttcgggcgggttgctcgggttcgggtcaaacccgctcaaaatgttcagccctatgttataccatgataaatatgttggaataaagaattatgcatctaaggcatgactaagctagactcggtaaactagtaccttgagttaattttaatgtggtctaggattattaccgtagactattataaaagtaagaaagcaataatgtatggttatgttgctaattaaatgaaggcataagctagggttattaccctcaataaatgttatttcgggcataccgtaatatgttgtacgaattagtatttagtatgcaagttagggttattaccctaagattctatatgctttgattacgtaaatatgtatgaatagggttatgggagcaaggcataaccaggttagactcggtaattataaccgagataaaccttactaaggccttattataaatagacgtgtgagagcaacnngtaggtctatgccacatagacatacataggcgtgtcaggtctatagcaaatagacaaannntgcagtggcaccattaattatgtaatttatatatatttagattaaggattatgcgttcaaggcataatcaggctggactcggtaaccagaaccaagatgaactattattctaaggccttattgtatttagacgtgtgagagcaacaagtaggtctacgctatgtagacataaatagacgtgtgagagctacacgtaggtttataccatgtaaacataaagaggcatgtgagcgcaacatgcaggtctgtgtcacagagacaaattttaatggcattgttgcttatattatatgatgagcata

SEQ ID NO: 145374 - DNA, 597 bp, Cannabis sativa
  modified_base (301)..(301): a, c, t, g, unknown or other
aagaaggaaaaataatttcattcatgaattaaaagatgaggccagttcttgggttcagtgggggtcaggtctgtctcaggttatggtagactactacactggtacttttcattctatggggtcgaattgtgcggaggttcttcatgttatgcaaccatccataacatatgaggataatgttgctcttttacagccagtttcggaggaggaggtaagacatgttgtcttccaaatgcacccagacaagtcacttgggcttgatggattgacgtctgctttctatcagaagtgttggcatatngtgggtaaggatgttgttaagatggtttaggaattcttccaatctaagttcacgcctcggggtctaaatgctactaatcttgttctcatcccgaagaagaagtctccttctgttatgggcgatctgaggcctattgctctttgcaatgtatcatataaaatcattttgaaagtcatggctaatcaactcaaaagcttattatcgaagatcatctcagagtttcagagtgcgtttattcttgggaggctcattactgataatgttcttgttttgtttgagatattacattatcttag

SEQ ID NO: 145375 - DNA, 866 bp, Cannabis sativa
tttgtgactcgattgtgatcaaggtaacgattattattattatttgtgactcgattatgatcgaggtaatgatgagaaatgattaagattgtttgtgactcaattatgattgagagaaagatacggtcattaccgttattgagaatggataaagatacggtcattaccgttaataaaaatgagtaattactcccttaaaatcgtagataggtttcttacttatcgggtgctttatcgggcaacgataatgacatacaaacttcatggataacgagtgtgagaatgctatatgaagcatcaaagtcagattgtcttataagacaattaattgagtgtgtaatgtgtgattatgtatatgtgaatatctattcattatgatgatgtagttattggctatgaattgctatgattttctcataatgcataatatatgtgtttgtatttacttgattttcttgctgagtctttatgactcacgagtgcttcgtggtgcaggtaagggtgaaagaaactgtgcttcggccaagagtcagaggtcttccagcgatgtacatatcaaccgcagtgcctcgacttccagtagacaggatccacccttttgattgtattttgaattgtaaacctatgttgtagtactaattttggaacaaaatctagaagttttatgcagggaatccccgtacttaacagtggtttttctttaatgaaagttttttttttttttttaatttaatcaaatgattttagttaaactgcattttttcttaaactaataaactagactataataaatttgtaaaagcacatacgtggcgtccttgtgggacagggtgttacatcgcttctgttgtgatattttgcacacg

SEQ ID NO: 145376 - DNA, 884 bp, Cannabis sativa
atatatatatgtatctgttgataatttgggatttgcagggtttcttagtccttttaagtactgttgcaaacactatggggataatggtctccaatgttggaagacagaaaagagaaatgggactgaatattttgggacttcatgtagtgaccctttgaaacacattagctgggatggcatacattatagtgaagctgcaaacaaatggatagccaatcatattcttgatggttcatactcagatccacctgttcccctctctaaagcatgtaccagttagttctggttcataacttgtatgaaactgaagtttatagcaaaatgagatattttggttgtactagttatgatcattctacaatggctttgtcacaattgctggtattggtggtctcgagtgcttccaactgttcgagctcatatgattttgatggtatcctgtttaggacaagggttcaacctcagcattggtgaaagattctttcaagctattgttgtactagtgatgttgtattatgacattattgcctcctctactacaattttgattttttagagaacatagcggcataagtacttaaagttttgaataattttttaacggcaagtactcaatgtttgtaaaacagtaatttttcagtttggaagtaactaatactttatgttttcgtcaagactcaatgatttagaatttaggccttatatgtatcatgtttaagacaataacaaagtttgtaatgacgaaattggaaaaaaattataattttgcaaatattgagtaccatgtgttagacatttatatatataaactgaaatgtatatgtttaagtattaagtgcggaattaatcaaacatatatacactatgaataaggatcgaaatac

SEQ ID NO: 145377 - DNA, 577 bp, Cannabis sativa
aaagaaagatggtgaaaatgagtttatgtgccaatgctcattggtatttataagcaagtcacgaaaagaggtaatcatttcaaaaggatctcagacgcctcgtttcgctctaaaaagcgaatatgggaaatcaaaaataaccaagtgcagccgtcaaccgtggtgagagaaatcagatttcaaaatattaattttcagagcattaattagccgaagaacgaagggacgccaaatcagcctcacatcgagtctcggacagacgcgctcgacacgtgtccccatccaaaggcagaagcacctcggatgaagtctacacgcaacttcagaagtcccgtaaagacttggggggcaaatcttatccaatttttgcactttgaggtggcatcacatgatggtgacacgtggaatcaactttgagtatttgctcaaagtgtatagtccgaacaggatgcctcataggcatgtctgcaacaaagggatcagcaatccgcacagagcaatcaacacttagtgaattcagcttccacgtcgtgagtcagcaaagaaatccctataacttagggatcagatcacagag

SEQ ID NO: 145378 - DNA, 632 bp, Cannabis sativa
atgacatgatggtaactagttagtaccacatacattttaattttaaaataactcacttttttttactggtaagctgtttttgtaaaatttaatgtggtattaaccagtaaccaatttctaaaaagggagggaaggtggggaaaaccccacgaaaatgtaatcgtaataataaaggggctttttcatttttacactacaaaataattttttttttacatttttacgaaattctacatagaaactcttattacaactagcactgcaaactaaattgtaacaaaaaatcgtatacaaacccctattgcaactgcaactagcgttgcaactactttagaaacccaaaccgtaaatttgaaaaaaaaaaaagttaaaaaaatagtatatggagtaattcctcccaataataaatcgatagaaaacacacaaagctattttttagcatttgtgaattttttttttttgaaaaaaatgtaatctcctcattaagatacatatctaatggaaaatttataaaaatattggaatttgggttaacttttacaaaaatactgtcagacgatttttttttcaaaatactgcgtttttataaaacaccagtaaaacacaaaacaaaacaactcaaaacaacagta

SEQ ID NO: 145379 - DNA, 746 bp, Cannabis sativa
  modified_base (68)..(68): a, c, t, g, unknown or other
aaaataataataataaaaaatagatagagaacaaggagcttccctacttttttttttttttttaattnttttattattattttaatcaaaaacacttaccttgttcattatttcattaaattattttatatttcaaaaattcaaattataaaatattattataataatcaaatgctaactaaagtaaaaagtatagttgagaaaaataataaaaatatctatttactttaactttttagctaatttaattaaaaattagataaaaaataagaaacacatagaagctctaagagcatctctaatgatagtatttttaaaggtgctatatatctccacattagctagagatataatattttattttatatttctttcaggtcatttttagcactctattttttaaaaatactctaatgatatatataattttttttattgaactattatatattttatagctttaattttttatttaaaaaaatatagcgtcaatgctattgtaaggcatcaatgtaaattttaacaataataattttttatgtctaatagtataacatccttatattttgtcacttaaactttctacctcatcaagcattctctaaaacagggctggtcctgagctaagacgaatgaggcgaccgccttccccaccgcttagggccccatttcgaaaaaaaaaattaaaatatagttagtaataaaataaataataatacttctaatgctaaatatgtgctgtagcc

SEQ ID NO: 145380 - DNA, 774 bp, Cannabis sativa
ttctcatgagggatttctcgttcatcagtttccagttgtctcctatctggctattcgttctggttctcagggagtgtctcattttgcccgggttgttcttcccaggcgttttcctgtctcttggttcgtgagccacgaggtctgcctcgtcgtctctcactccaggttcaagttgattttaagcattcatcccctatgccgcccaggccgaggctgcatcacggtctaactcagcgttttgccactgtgcccctttcaaacggcgccttaggcagcagttttctgtttcataagttccttctcccacagattgggcacctctacgattgagctcttcatccttcgtcctgcggtttcataagttctcctcgagctcgttgtccgcgtactaggaccaatgtcaggtcgagttctctaggaacgtgtgatccgcacactaggaccaccctcaggttgagccttcctggaacgagttgtccttctggactgaggattggtagattttctggagcccatgggctctttcccagaacaatgaatggtttcttcatgtgtggtgttaacattttctggattttcagccatgaaggaggttatttttcttcaaaagaagggagggtttttttcagaactttttcacagaggctctcaatgaaagcacccaacggttaaagcagactttcattaactaaatttgagcctcacaatagtgattttacattgaaaaaataaaagctatagaaataatagtatgaacacagggttttttacgtg

SEQ ID NO: 145381 - DNA, 1215 bp, Cannabis sativa
ttttcgtcaaaataaaacttaataataacctaacttaaaggtgttataaccagacttgttatattttcatctgttcatgccaaaagttagtttcatggtagttatattaaaaaacaaatttgacgaaaaatgagttgagaatatttattgttattttggaaattacaggattaaagctatcatttaacaaaataaaataaatggttcaatcagtaaattttgtaaaatataaagttcaaaaaatatttaccaaattacttttatatagtaatattggtatctctctatacacaaattagatattgaattttaataagtttattaaataatataatttagctaagataaatgcttagtatcatcgaagatattatatcgttattagaataaataatataagtatgagatccaatataatttaatataataattttaataaaatgtcaataatcattcttaaaacatcacttcataaaaacagtactagtacctaagagcatctctaatataatgtcaaaataatagtgtatttctatattttgacacacttgataaaaactattactctataatgttctagtgttacatttagcacatgctaaaagtagtgtattaaatttagcccacaataaatgttatttttttttatttactatagtatcactaattattatgattcattaattttaactaactttatattttttatttaccatattaccattatttaaataataaaaattaatttgtgtatattctcaataaaatatttaataaccatcaatattgttgacttagaatttggtcaactagcaacggagccttatttatgacagacaatcaccacacataaataagtacaataaatgataaaagagacacaaagatttatagaggctcgacccccttattaagggggtaatgacttactctccttttagctgtattgatttgagggataatatcactcaaattataaactttaccttataatttctagaggggctctctatgaatactacaatagcgagaacaatatgctaggaagatctcaatcgagtgagatgagaaatagacttagtgtcttgtatgatgcaagtagtgtgtgggagagagaaggagagagtgcaagtgctctaggatttccagagttagaacttagaactcaggaattagaacttagcccattttagtttagtttagtgctctttatat

SEQ ID NO: 145382 - DNA, 694 bp, Cannabis sativa
  modified_base (153)..(153): a, c, t, g, unknown or other
  modified_base (448)..(453): a, c, t, g, unknown or other
aaaactaaaaatttcttctgaaacttaaggcgggcttttcctttagcttggaccgatactaattcgccatttccaactttgagcttcaactcccctcgatttaaataatcccaagtttcaaggaacttcaatgaagaacaaacatggttagtngatccagaatcaacaatccagaaggatttgtcatactcttaaacacatgattcaaaaacaaaagcattaccttcattagaattttttagaagtctgggacatcgttcttcctgatgtcccttctcattacaatttaaacattgaagtgtactaccatcaattgtttcaggaattgtacttaaagaagcagcactgttagaagcttcgtacttaattcttttcctcttacttaagtctgtaaaactggaggatggcccccttgcaggtaagctccgttcataagcacgcaattctnnnnnnagcttgtccatgtcggatgagttaaaattgatgatcatataagatacaacaaatccattatactcaggaggaagactattaagaatgaattgaacccattgttgtctggataaatcgattcccagcaagtttgctttctggaatttcagattcatcattaacaagtgtgaattaatcctctttccaggaaacattttcacactatagagttcatttgcaaaggcatttactaggagagggt

SEQ ID NO: 145383 - DNA, 627 bp, Cannabis sativa
atagacctttcttgcaagagtagttttgcccaaaccacccatcccacatacagagatcaccttatgcttatgagggttctctttttcagtcaaaaggccaaccaaatctttaatatctttgtcgaatccaacaacaacattgtcttcaacaaaagaataagcttgccttaactgtctttcttgttgaacatagctgcttgaagaagcttcagctgcattgtgtattgatctgcgtactccaaaagcttctaactgtgaagtccaagtatgaatgtcggatgagatcctctcaatctctgttccaactttgtggacgtcaatttcttctctgaagatgcaaataaatcttttccatttgcttccttcattccccttcaaagccactttgaagacataagtctcaataacatcttccaagtcaagagcattttctctgacttggacaaccaaaaggcgaactctctcatcaccatttcttaccaaagcatcagcatcttttaagaaagcactcatacattgaagcctgattcgtgcattcccaacttgggcttcaactccacccaagaattgagcttcagaaatcaccaagtctccaagcctttcaatcacaaatgaaacaacagcatc

SEQ ID NO: 145384 - DNA, 506 bp, Cannabis sativa
ttgactctctcctaccggcgcaacgttggatttttattttgatcgaataaaaggttattaaaatggtgttcattttagatgagctgacaagtctaaacaacaaatgatgtctttataactctcacctaccaggacactatatgtcgttgagttgaaaaccttagaatttatttaggatatatttgttttgtattttaccatgtcattcctacttgctaaatgtttaataatttccgaatatgtgtatgattttgcattgaaccttatttaatatatatttaatgacatttgtagtttcacttatgactatgaacaaccctattatataactgttgactgacaacaagctctctagagctaactttgctaaacggagagagaatattaatattgctcccataggtaaaaattcactgtttatgttaactgaagaagctcctgagcaaccaggtgagaatgcaaccaagatagttaaggaaaagtttgagcgttggcaaaatgctaac

SEQ ID NO: 145385 - DNA, 836 bp, Cannabis sativa
atatcatattaatgtgatacaagaaacatgtagagagtcaacgtgaagttttaaatcatcgaagggtacatatatatagtccagcagatgacaaatgttttttttttctttttctattgaaattgaggaatttatgttcttgaattggtgagaaatatagtgcatgtttgacaatgttttctgtttttgtttttaaaattatattctcaaaatcaaaaataaaaacagttttttgtaatttttaaaaagtagagttgtttggctaatgtttttaaaaatagttttccaaaaacaaaaaataaaaaacatgtttggatgtgtaaaataatttgttttttgaaaacaattttttaattttaattttattagtttttttttctattttttttttataataacatcctaaaatatttttttattattcaattttatataattaaaaaaataaacatctccttccaaaaaaaataacatctatatagttttaatttttttttaaaaaaaaaacaatagttaatctaaaattatcattaagtacaatatgtctaaaacgataattttaatactaaaattattctcccatattgaaatatagtaaactaattcctgtttgtataagcactccacatagcttgagcaatacgatcccgacaacgtgccatagctgcagaagattcatctgatataaattcactacaaatcttgatacattggtgctagctctttctgtattgtcttcttcctcaaattttttttcttcccattctctaaacatatgagggtaaataccattttggaccctgtgttttgccaaagttacagattggaccctgtat

SEQ ID NO: 145386 - DNA, 573 bp, Cannabis sativa
aaaactgttttcaaaaaacaaagctaaacaagccaaattgttttcaaaacacaattttttatttttaaaaacaaaaaaacagttttttagttataataccaaacatacactaattttttcttttactttttttttctcttcttcttctttttcttttttaaaattcccttgaagcaaagcgacttggggaaggaagtggctgttggatctcttgtgatagcgtcgatgatggggaaggaagttagtccgaccgaagacccaacgctttacgttcagttggctatcactgctactttcttcgatggtgtttttcatcagtctgctttaggatttttagggtaacaaacataatattatacatacatacatacatgtatatatatgtactcttaaaattaatgtatatatatatatatatttaaaatatgcagacttgggtttgtgatggactttctatcccacgcaacaatagtgggatacatgagttgaccccaaggcgctttgcttccagggaattttaaaaaagaaaaagaagaaagaagaaagaagaaagaagaaaaaagaaagaagaag

SEQ ID NO: 145387 - DNA, 626 bp, Cannabis sativa
ccgattggattttcaaaatttacatccgattcgatccaattatgattgtattcgattctattggatcggtcgtttttatttgaattggatgactttcagcacacccctatatttttatggctgttatttacgttttcggaaggaaaacacgtggcacgaaggtgaaggtaatcaccgtgtcaatttgggactcaagcttccctagtcgcagaaggctaagctagattcggattgggcccaagccaagtggagggttagggccttcccttgaacgcaatgatctcctaagacccagaagtttgcccaacctcccggaatgcataagggacaaagccttccaggcgtattagagggtgcgcggaagcctaccgaagaatagaagctggatgtcacccctgatgtgtccgcttctctgacttagggttagatcttgtcccttatgttagtaggtctgagttgttgtcttctttttgtagtattggtcacttgggtttaattaaagctgctgatgtggcaggcttattatctatatataggagattagaactcaattaagtgggtagagaattaagtatggaggtggaggaggggggcgcctggtgtacactataggaggccgagggagt

SEQ ID NO: 145388 - DNA, 511 bp, Cannabis sativa
gagcttaatgaaactcaggagaatatttacctcgcacataagcagaaggtggccttcgacaagcccgagcccatgaggaattcgaggtataagaggtatcctaacaagtattgtaaattctataaggatattgggcatatgaccgacgaatgttgccaattgaaagatgagatagaaagtctcatcgctttaggccattttaagcagtatgtgaaaagataggccatggatacaaccagccttgtctgcccaataaccgaaacaaccaggggttacaacctattctcgttgagggagaggacatcttggttatttcgggagggccacatatcgcaggagaaagcaataatgcccagaaaagatatgtgaaagagataaagaacgaacaatcgggcttcgccccagaatctttctagaaggtgaaaactgaggagcctcccattacattcacggaggaagatgagaaaaacgtgcgatatcctcacgtcaatccattggtgataaccattca

SEQ ID NO: 145389 - DNA, 902 bp, Cannabis sativa
ggttctagttttgggtcaggggtctggtttgggtcctggtctgagtcccaagtctagtttgggaccgagattggggtgcggttctaggtccctgccccaattgtgggtcccgattctgcttccatgtttgggtctgagttcgagtccaggttcggcatcgagtctatgtctgggttgggatccaagtccgggttttggttcgggtctaggtctgggttggagttcgggtcctagtccggttacggttccgagtctaggtccaggtctgattacgtttccaggtccaggtccaggtccaagtcttggtttctaaccttgttccgggtcccagtctacttccagtttcagttctaatttcggctcacaaggtacgtgttcgggtccaggttgcgatttgggactgggttcaagtctgggtctagttttgggtcctggtctaggttcgagttcggggctgggtcccagatccaaacaccgactacgggttcagtccaagccccaggtccagatcatgatcctgatctcgggtctcggtctggttccatttcgtgtgtcgagtcacgagttgggtcctagaattaagtccgggtttgggttcgggtcttgggtcccggtcctagttccgtttcccaagtgcgtatctcgattctgggtctaggtctcgatttgggtcccattctatgttcgggtttgggtcctagtcgaggttcgggcttaagtctcggtttgggtttttatttgggtttgggctctggtctgtgtcttcgtcttggtcctggtcctagtcgtagtgcaattctagttccagttgcgattccgagtttgagtttgggttcgagtttgggtcagggttcgtgtcctagtttgagtttttgtttgggtccagatctaggtctaggtct

SEQ ID NO: 145390 - DNA, 725 bp, Cannabis sativa
  modified_base (96)..(103): a, c, t, g, unknown or other
cagattttgtggcactacaaaccggctagccgatttgcaccaggttttccaaagtctttcatttgttgctaaattctccaccaaatgcaatgaaannnnnnnnagtacctaataagggcatacacaataaatttcagtcagtatttcacagaacaaaccaataaaactcaagttgccattaaagctcaaagcttgagtttcaaaactcaagcttgcttaaaactaactccatgaaccaaaatcaactaccagaacctctaagcaaaaaatattgaccataaaaatcgaaccctaaacatttctaaacctaacagccccaaaactaagaatcatcacataatcaaactaaagaaaaagcttaaaaacatgaaactaatggtctagggtttacctccacttgaaccttgcttgaatccttagctgaaaactccaatgttcagcagcaaacgcccttaatcttgctggtttcgaagagagaaagaaggaaggagagagtcgttcttcttttttggtattttctcttaagttttacaaaatgagataaattaaattagggaatatcaatttctcttggctgaagtaattggccccgtgccacacacctaggcagccacccaacccctatctaaaattactaattttccctttaggttataacttaggtgtttctaaagctagaggtaaaatggtcaaattccataaccccgctcaaacccaatatttta

SEQ ID NO: 145391 - DNA, 581 bp, Cannabis sativa
  modified_base (431)..(436): a, c, t, g, unknown or other
gtacatgtccgagccacatcagaccaagtgggttaagggtctacctgtgatatattttgaaactctattttggcgtttaggctggctgaaagaaaaagacttgtaataaagtttgtaaatatttttgggatcccatctgttgtaaaggttaaattattacaagttttattttcattccgtttaatacaaaagtttaaattctatgcctttttgattagcaatcctgtttaggggattagggttcttcgtaagtaacttgggtagcgtgcctaattatttagggcgttacagattattcattcacatttttatcttgacacgtgtcctccagttgaattttgggtataacaacagtgtcccagtaggcgagagtcaaagataacatttgttgaatagagtagtcagatcatctaaaatggacaccattctannnnnnttttattcgatcaaaataagaatcgaagttatcccagtaggtgagagtcaaggtccttctcattttatgagcttccaccattgtttcatactctgtaagtttatttctaagtagtcaccgcaggggagagtctaatagagacgaa

SEQ ID NO: 145392 - DNA, 743 bp, Cannabis sativa
aggcctggcaaaccggctagcccgtttgcaccaggttttcccaaacaagctccaacttgctcaaaactcatccaaaagcatccatactttccagaccacctaaacaatgcatatacaacataacccaaatagtatttcacaaaaaaactcaataaaatcaaacatgccattaaagacctaaacttgagtttcaaagctcaagcttgagcaattctatcttcatacaccaaaactagtattcagagcttaaaaccaacttaaaatcaacttagaaattaggttatacaacaattaaaccctaacagctcctaaattcaaaaatcacatactcaaaccaaagtaaaagcttcaaaatacataaccataggttctagggtttaccttgcctcagagctacttgaatccctagctttaatccagaaaaacaccaagttttgagggtgattctctctggtttgcctcagccgaaagagagaaagaaagagagttctattctttttatttttccttttaattttccttattttctaaaaatgagaaatatggttaatcacattaaccttggctgaataattttagtggccagcgtccaacataaaaatcaaccacctaatcccctaattaaaaagactaaaatgccttttaggttgtaacttaggtatttctcaagactaggggtaaaatggtcaaattccataaccccgcttaactccgatattttattttcttcaatacacatccca

SEQ ID NO: 145393 - DNA, 983 bp, Cannabis sativa
atgatctccttcgagcttggctgaatagagataaatgattgaggcctcatttcagtaattatattagtttactgaagtatcatttataaacgatgtcctccataggctctaaagttttttttggatcccacgctgggatccaactcatcttcttccaccaaagttggttcaatgccctcatggaccactagcaccggcaaatgtgctgcaacattatagcactgcctggcctctccctgattacccctcacggttcctactccagcttcctgagtgggaaatttcaggcacaagtgccagatggatgtgattgcaccgaagtcaaccatggccgcccggccaaagatggcgttgtatgcggttgggcaatctaccaccacaaaggtgcagtacttaaaagtactctgaggggtatctaggcatagagtgactggcactctcacttttcccattgggataagtgtggtcccattgaatcctttgagccgggagccgctgggcgacaaatccctatccgtgaggcctatggttgtgaaggattctttgaacaacaaattcacggtactcccattatcgagcaatattcttgccacaattttattggcgataggagtctctatgaccagagggtcatggcgagggaaacgcaccagtttcgcgtcctcttcagtgaaagtaatgggctggtccatgagtcgaggtctttgtgctggaagctgggtgacttcccacacttcatcgtgctttatggctctaacgtagcgttttaactcttttctggtagttcccccaatatggggcccaccagagatcatggcgactctcccattggttcttggtgggagccccgggacttgctgagggattgctccccttgggggtacaacgggtgctagtgctccgggtacaccccctggtgccccttgaggtaacgggccccctactggaaccgggttgagatggggtagccggttcttaatcca

SEQ ID NO: 145394 - DNA, 677 bp, Cannabis sativa
  modified_base (162)..(167): a, c, t, g, unknown or other
cagaagtccatcatcacctgacattgatcttatctcaggcttgaaaatcaagaagctcaagaacaaaataaagtaaaatgcaaggtgaccgcccacataagacgcataaatatccaaacacgggaggagaggccgagcaggtgaaatgggctcccttatgcnnnnnncatgttcaacaggcctgggcgaggccgggagtttctttttcatcttcagcggagtcacatgctcttcctcagcttcatcttcaggatttgaaggctcctgagcatattgcttggccctggcaccacccttcaacttagcatcgcgcttaagttgaatgagttcatcctcctcatgagctcgttcggcctggccagcataagattttctcttcttccccgccacggacttaggagtaaagtcctcgggataaagcccatacctcacaagattatcattggacgtcaacaggataatattctggtcttctctcggcaaccgagcaagtttatgagctctatccctaagaacaagagtgaggggaggacggtgataagtcggaatctgctgaaaccgagtttgggtaatgttcacatccttcaccatgaagtactcatcagcaaaatgccctattttgctgatggccttgtcatccgtgccggtcaacaacttgaagcctggttgagagaaat

SEQ ID NO: 145395 - DNA, 799 bp, Cannabis sativa
  modified_base (31)..(48): a, c, t, g, unknown or other
agtcatttaatttcgctgcaaccaatgtaannnnnnnnnnnnnnnnnntgtgtttaaattctattgttttagaaattcatgtttaaacaacatatatagtactaaatctagatcttgataatataatttctaatatttcctaattttcttaacatcatttttttaaaataaaaattcaataataataattctagattctaatttttattgtactaatagaaactttttaattctcttctttattagttatataaattttttttatatataatatgaagagtttctttggagataattaacaataatatattcatattataattggcaagtttttttaataaaaagttagtttgagttttaattgaaatattattatgcaattaaagtttaattaaaataatagtcatttttagtctatttgcttcatacactttcagttaacaaatttattttgaatattttttttgttagttttggtctaaattaaaacataaaatagaataaaataactcattaatattcatgtcaaatgttaaaaattcttaacaaaattaaaaaataattaaataaaaagataaagcatgtgttctaaaattaaatcttcaatttaaataatgtcttttaattttcaaaaaaaaattaaaataaagtataaaattatataatataaatttactcccaaattatattcatttaaataataaaaagatttcttcaaaaaaatattaaataccatttaactaatactctcatatatctttatatattaaaagtgcctatctaacgacatttcttggtt

SEQ ID NO: 145396 - DNA, 1206 bp, Cannabis sativa
tctttgttcgccgactttaatggcggatctgagatggaggagatggtgggtggtggctttaatggcttcgaagtcggcggaggaggacgaggccggaggaggacgaggccagaggaggacaacgccggaggaggttgaggttcggtggttgtggaggatcggggacagaagaagaggaaagagaaagggatagtgcgaagagaggagggagatcgagagatgtttcagagaaagaaaaagaaagaaaagaaagaaaaagaaaaaaggaaaaaaaaagaaaaaaaattataaataaaataatttttttaattttaaataattttttttttgaattttttaatttttttaaataattatttacgtggacaatccaacctggcagttaacaactaaatttggacggaagtgttaaattgctaacagtttcctggttttgggggtttagccgcacaaatttaagttttgggggtttagtgaaaccaaaacgaacgtattagggggttttgccgctatttaccctatttttaattaattaaatatatgttacaaagttacaagtttgttactaaaatatttatctagtgggaattgttatattattattaaataatataatatatgaattaaatatgtgtaataaactaataatatgtacaggcccggccctgggcataggcgggctaggcctgtgtctaaggcccacctatcccaggggcccaaaaaaaaatatttaccttttaaaattataccatttttttttactgattttgaaaaatactatatttttttctaaataaggacccaaaataatttttttttctatggcccactaaaagtcagggccgaccctgaatatgtaacatatgacaatgtatattatctgtcattattttgtaacatataggagagttacttgttactatgagtaatctccgtttatcaccaatattaaaaggtgttacacatcttaatttgaaattcatgctataggatttatggtgtgtgcatgagttacatttgagtccataacacccatgggggttatgagtttgaatttcaaatggtgatatcctaaagactatataaagaggtctaaggtgctcttattgagtagagaaattttctatcaagaaagcactttgctagaaaaccctaaaaggcttgataattctcaaagttattttttatgagagttcccttagtgct

SEQ ID NO: 145397 - DNA, 539 bp, Cannabis sativa
tcgggctgtgttaactcaaatcttgtagttgtagcttccatgactttgggctaaagttttgacaaagagtatcactatagactatagtagtgaagagaatgagttgtgaatcttctgatagcattacttttatacgatcgagaataaaagagaaagactaacgggtaagaagaagtaagaagccaacaaatgttgtcaattgtcataataaaataatagaagatagagagagagaaagatttatgttggaaaaaaatcacgtgtcccataattccattgctgctgttgctgtcctaagaattagttgttgccactttcaaataaaatgtgagatgtatacatttaacggctcaaatgttattaatagataaaaaaatttaagaaaaaattacaaaaatacatcataggtgtttttattttatgctttatatatttttatggctaattagtaatcgttccctctgaactttgacatgtagtaaatcgtgtccttgaacttttttgactgttaaaaattccctcaaactattgagattgtt

SEQ ID NO: 145398 - DNA, 693 bp, Cannabis sativa
gcatttgaagtcaaaaaaatctcatcatctgtcatagtgattcgcaactgatcgtgaaccagatcctcggggaatactagcccaaaggcttaaaaatggcgatgtgtttagagaaagttcagaagaacttggaaatatttaattactttaaaatcgaacaaattctgagagagcaaaactccaatgtcgatgccttagcaaaattggcctcgtagaatgacttggatgaattgaacttagtttcggtagagatgctgggcgagccaagtatatgtgaaactgaagatgtcgagatgatagatagctctccaacatggatgacacctattatcaattatttacttgacgaaaaacttccaaatgacaaaaatgaggcgcaaaaactattatattcggtgcctcgctacacaatgatcaaaggtaaactatatagaagagggtactcaatgcccctacttcggtgtgttcagtgaattctgtgtgaggaatacaattatcaaaagcttctcgtcagtatccaaacctcaggcaaatggacaagtggagctgttaataaaatcctaatggatactatcaagaagaagctagaccctacaaaaggcagatgggttgacgagctacctcaggtactctgggcccatagaactaccgagaatactgttgggttttgtgccttaaataaaacacatttca

SEQ ID NO: 145399 - DNA, 1225 bp, Cannabis sativa
  modified_base (1197)..(1198): a, c, t, g, unknown or other
atttagttttaattgtgtttggagcattttcacgcttgttatcttttatttttgcagatttaaaataaaagaatattaaaaaatatcaaaagaataagatggaaaataagataaaagatttcacaaaaagataaactatagaatagagaaaattgtgcaaaaaaataaagctaatacttcaagcctaaatttgacttttctttgatccgattttggagaaagtcaaaacatgaaagatctagatctttcttttatctttccagaacatcttgaatcgtctaattccaagtaatatcaagagatttatggctaaaatactatcagtcaacgctgcagaaaactcacctcttcttctaatccttaggagaataggttttctaatcctaaggagaattagggttttttcttcagcgatttttatttaattttatcattttttggctataaaagaaatggacttcaatagttttggagcaagcaattcaaaaggaattaaacatagaatacagatacgaatttcagagatcaactgcaatactaaaggcattcttcagaggattttcagcattattttcttctctattttcttctcttttcttaaagttaatatgtgtgatttttcttccataaacatgagtagctaaacacttaattagggttagacggacattgtttgatattgctttatggtattaatatgatttatttccccctaatttctatgtattctatttcattcgtgcttaactacttttaatttcctgatcaccaattaaatgtctatgattttgatgcgagattcgagaagtgagtgtcaattatgctatagtgagatagaactaaatttcaatataggatgagagtacctatatggtttagatagtttataagatttctgtgtttaatgcctgttgcatgttaaatttatcacgagagtagaaagtttgcacgtgattgagatttatatatctgggaagactataaattaccttagtaaacctgttattgcataaaaaatgataatagggagataatcatattagaccataatcaatagaaacaattgaagtcaaagcccttgtttttattaattgttaattttctttttagtttaattgctcattcttgcacttttattattttctagttttaattttttcttaatttttattcaaccaaatagaagtaaaagtttanntttaacgtacttaactacaattctcgt

SEQ ID NO: 145400 - DNA, 801 bp, Cannabis sativa
ttattcactcttcctattcatcatgttcttcttcttcttgttcttcttttttctctttgcttcctcaagttctctctatctttttccattaagatataagttttttatttttttttcttgttcaatcattcttcttcatcttcttatttagtttttgaagtttttagtcacgtttttcgaaaagataagagttagtttgattttttttattctaattttccagaactaagcttgcaaatataacgtctattgcatctagtgttgaaactgtgcagaaaatggttagctttatttaatcattttttttattcttttgtttttttatttgttttagtgctgttttaccgttgtttttcataatttacttttttgacgttgatttcactgttatagctccatctcgctagaatcaatgattgctttctgggtgttttcatggtgctgtggtggttctatccgtgggtgtggaagatggaggctataaaatacatttcttcttccttctttatggttattttgtggtttttttaattctggttctcctataagtacatttgacgagcttactagaaaaaaggttttgaggagtgtggttcttttatgtttttctaagtggttatattgcttattgttttacatttatttttgtgttgtttcagtagttttttttattctgatttgtaaaattaggcttgcaagtataattgctattgcatctggtattgaggctgtgcagaacattgttagtttttttaatccttttttcctttctttttggtttaatttattttagtgttgttt

SEQ ID NO: 145401 - DNA, 631 bp, Cannabis sativa
  modified_base (270)..(276): a, c, t, g, unknown or other
ttgctccatacgcagttccatagaactcatcatggatctaacgaattcaacaagctctttatcagtcatagtaccgatctctcactgaaatctctctctgatattctcttaatgaaagcaccaatgatacaattactgattgtatcgaattgcactcttcgagtcagtgccaaactccaataggaataatcctaattttctctcattccattcattgctccctatttgtgtaatagtattacatatttatactaactaggcaatactaannnnnnntaattagtccctataacttttcatgtaacaccatggccatggccatggacatgatgagcattaggtattccttctgcttcgctttatctgcaattttcatttgaatgattttttatacttgcaattttaggtgttcaaaaggtttcattccataagaatactttcttcttacttgggtcccaaacttgcttggcctcccaatcccaaccccatgtttgaattgatgattgcttctgcttttaagaacggtaatggcgaagaaggtgttaaaacgattgaacaagaagctttagtttgtgggtcttctgggttgttgagtaatgggcttgagtctaaaattccgtattttaatatt

SEQ ID NO: 145402 - DNA, 825 bp, Cannabis sativa
ctaacatcctggtaaaataatttccaacacaataggcctgtgcttggccgaaagttttttcttccttttgagcggagtcaccttctcttcctcaacctcgtcttcctactcaagatgcttttgaccatacttcttggctcccccacctcccttcaacttagcttcacaattgagttgaatgagttcattctcctgatgagctccctcagcctggttagcactggatttcctcttcttctccatcacaggctggggattgaaatccttcgggtagagcccgtactccacaaagttctctttcgaggttaaccaagtgatattctgagtagcacccgttaactaagcaatcctttgagctctaaccctgagagcaagtgtgaagggtggacggtgatatatagggatctgctggaactgagtgtaggtggtgcccatgccatccaccatgtaatactcgtcaacaaaattccaaattttgctaacggccttgtccctggtgcccgtcaaccacttgaagtctggctgagaaaaataaaagtatcccgacctaccctacttgggagtagacttcaagtcaaaaaactagcttacctcttgaggagaaggcataccccacttttggatggccaaaagaacaaacaaggcagatagaaacttgatgcccttgggagtgaattgggtcagacaaagacagaagaaggttgccaccttcctaaagtacgggtgcaaaggaaataatgccccttgtttggaatgagcacccgaccaggcacacatccccttctttgggttggaggctcggttgttcgaggcaggaacataaca

SEQ ID NO: 145403 - DNA, 834 bp, Cannabis sativa
atcttgagctggaccgagcacgcgaaactcctttctcacctgagatcaatctcctagcgttgccccacaagtttaaaatgccaacatggaagatgtacaaagggagagaagatccattttcccatctcatgtacttcgaaatgcaaatggatttgtaaggggtacgaggagatgtatgctgtagaattttccctgctaccctgtcgaaagccaatcagcaatggtatttcaagttggctcctggaaagtttagttaatggaaaaccttctcttcagaattccatgcgcaattctcctcctcgcgccagctcccattgcatttggagatttggtcaaagtaaagcaacgaccaggcgagccagtccgggaatacatcagcatattcatgacggaagcgaccaaagtttcgcgggtaaccgaggatggaaagttatccgcgatactgggggcattgaagtcctcagtgaactttagaaagatataaggaagaacgggccggtagactcaatgagtgatttcctcaaccgagctgaaggcttcatcaagctcgaggaagccattgaacgagcagaaggtgaacaaaagctgagcaagtcgaaggctccttccactggaacattcgcccagcttcccaactattccaataattcaagctcaagtggcaagcgttcaagcaacaaccacaatcaaggaaacagaaagaaaggaaagttcgctgataaatccggacagactcccagagagaatcatgccaaatacactgcattcactattttgactgaagatatagagagtgtatacatggcgactcagtcgttgatcccgtacaagaag

SEQ ID NO: 145404 - DNA, 629 bp, Cannabis sativa
  modified_base (333)..(333): a, c, t, g, unknown or other
aaaccaaaaacctatctacagcaacttaatatggcaatatcccaaactagcagggaatcaaccaaccagaaacctgaaacagacgcgaaacgaaaagctgaaaaacgggttttgcttgctgcaaaatccgggtaaccgattttacaagcattgtaaaaccggttaactggtttttcccagaaaacaaacaaaaattcatacgctaaccaaatcgtttccaaactcaatcaaactttccagacctgcatattataccccaataaactatttccaagcaacaaaacatcaatcaaagctcaaaattgaattttaccattaaagctccaagtttgngttctaaaactcaaaacttggctaaaccttcaaataactaccaattcatgcaataaacaacataatctaacatatcttaactgcagaaacctaaatcaaacatatacagcaactatagaactcaatttctcaaaacatgcacaaattcataacttgaagttcaaggaaaccaaaggaaagttgtctaggagcttaccttagctcgaattcactaagagttgctggaaatcacaacaaactgatgaagaaaacaagaaccctagttgcgctaggattttcgagagagagagagagag

SEQ ID NO: 145405 - DNA, 1050 bp, Cannabis sativa
  modified_base (403)..(405): a, c, t, g, unknown or other
cccatgctattgcaaggcactctctatttattccttgtggttgcatcttagagcaatatatctggcccgatttgagggatatcttgttttctgaatgccttaattaaatgaagttgatatttcattaaaaaaaaacaaaaaaaaaataatattttctattttcaaaaatacagtgctaacaaaaatcgcggaggcagctcctacttcttcgtgacccagccgaaccacactgtaatattttgataagcctaatgataaataattagggtttatatttatattatgggttaataagataataagtaggatttggttctactagtctatttcagcttaaaatttaaattgctataagtgagcaaataaacgtaatttatatattacggagatttatatagcatgnnngaatgtaatatgagctatatgtagaataaaatattttcaggttcggcgatcttgaagatccgataagtagataaataagcataatttgttaattatggagatttatttaaaatatgtggataaaatatgagtatttatgaaataaaaatattttcaagttcggcgccctggagacccgattagaggccaaaaatatcacaacggttttagttagaaatattgaaaggataagttgattttagaaatactggagtattttagggtactcgaagttgaccaaatactctagaattagagatttctagtggctaagaaataatagataactattaagaataaattttttattaatattattattaattattattattataatattattatacatataaaaagttatcgttaatacatatattataagttacagtaaacataagcgaaacgaacgaacaaaaattctcattctcttcgattcattttcttcgatttttaacctgaaatctagtgatctaagtttcggtacaggatagcaaatccttgaagtaggaaagcttaatgtatgttttaatttcattttaagtttaaaaataattggtttcgtatagggattttgtgaattagaatagttatgaaggttctgac

SEQ ID NO: 145406 - DNA, 569 bp, Cannabis sativa
aaattttcctagaaaaattttattaccacaagattaaacttttcgtgaatttaattcaaattgtctttgaaattataaagattattttactaataaaaattcaatgaagaataatgtaaataaattacatagtatattttggtaggattctccaatagtatatagttttggcattttgtgaattaagaaagtttttttcaactatgtaacattaattttgtttccttaagttttaatatttgtattcatggtaggcattttaaatagggataatgaatggtgctcgaaagttgaagatatgaccaagattatcacaggcttttatggacagttattcacaacaaggaccccatctttaccaaaaattgaggagttacttcaagtagttaaacctatagtaacagaagaaatgaactcaacactaagaaaaccatttagagccgaagagataagaaaggctgttctttccatgtctacagataaaggaactctaattctacaatagtaactcttattcccaaaataaaggaaccaacatctgttagtgatttcaggccgataagcttatg

SEQ ID NO: 145407 - DNA, 760 bp, Cannabis sativa
taaatatataggtaacctgctaatagtgagggtcggctgatcaaattaccactaagttacaatacatatttaatattaaaagtattattttttattttattactaactatattttaaattttttttcgaaatgagagccaaagcggtgggaggcttaaggcggccgccaggggcgcagccaagattaagttcttgggggggccaattattaaaagataaatattgataaaaaaaattaacatttgtttcaacaataaaaattgatactttagataaaagacatattcacataaataagaaagagttttgaaagcagtacaatcaacatataatcaaaattttaagagaagaactaggaaaattaaggtcaaagtttttattaagaatattctacttaattactttcttaggatacttaattaattaattaaaaataatagaataaatttataatacctacacctcttaaaaagggtgtttttgacatcttcctatttattttgatatttaagagaatttttaatctttttttttttcatgattgtgtagattataattatttaagatcgcttataaatttttaaaagattctaaatagtttgtactgccaaaaaataagatttaaacaattacttattctccaccgaaaaagaaaaaataatctcttgtgtaatacccggtaaaaatatacatatattttaaattttatttgatatacaatttgtgtgagaataagtatttatttatttctactaatagt

SEQ ID NO: 145408 - DNA, 804 bp, Cannabis sativa
  modified_base (739)..(757): a, c, t, g, unknown or other
tttgttaatttatctttaaatttgatttaagattaaggaggattggaagaaaaaaatgaaaatggtaaagtaaattgaatttcatgcaaagtgaagagcttcactaaaggattagaattattcaactccaataagtttcttttccaatttttatttttttcaaaatttctttcatttcaatagttaaaattttaattatcccatttaactattaattgataattaattaaaaattaaaaagtgattgatgaatgtatatatgttttcttattttttttactgtaaagttgtttttggacaagttagatgccaaaatattttttactttatggtgatatttatttgcattcataactgattttctcaccttgtttattcggtttttattgctcgtttctatgttaggaaagatgtatttttcagctggatttttctttgtttggaaacttcttgtaagagaagaaattctcttatggaaagttagtttttaaaggaaactttgttctttatcattttccttgttaagttcaattttatcttgattatatcagatcatattcgctgtttatagcaggtatcaagacccaatacaagatcagactcgtttatggcaagtttccttttctgatatgatttgctacgtcagaatctggttttgaagctgcagatcatgtgtatcttaggaaagctttgtacaactttagatttgaccttgtggctgtctctagggtttctatgnnnnnnnnnnnnnnnnnnnagagcagccattcgaatcagctattctagtattcatttttttttttt

SEQ ID NO: 145409 - DNA, 1106 bp, Cannabis sativa
gaaaccctattattggtggtgcggtatgaagagggatgtggtagattatgtgtcaaggtgtttgacttgtcaacagatcaaggctgaacatcaaaaactgacagggttactacaactattgacacttcctgagtagaaatgggaagatatcatcatggattttgtggttagattacctagaactaccggaacgtatgattcagtttgtgtaattgtggatcgtttcacaaagtcaacacactttttgccagtaaaaaccacctttacagtggattagtatgctaagttgtatgttaaggagataatgcgtatccatggagctccggaatccatagtttcagatagagatctattgtttacttctaaattttggcaaatctccagaagtccatgggtacaaagctaaagtttagtacaacttttcacccccagacagatggtcagtctgaaaggacgatttaaattttggaggacatgttacaagcatgtgtgttagattttgaaggttcatggagcaagtacataccattaatagaattttcttataacaacaactatcaaagtacaatagggatggctccctatgagttgttgtatggtaggaagagtcgatcacctattcactaggatgaaactggagaaagaaagtatttgggtcttgagttagttcaaaagaccagtgatgccatcgaaaagatcaagacacggatgtttacttcccaaagtaggcaaaagagttatgttgatcctaagcgccgagacatagagtttcaggtaggagaacatgttttcctacgaatttcaccaatgaaaagtgtaaaacgcttcggaaaaaggggcaagttaagtcctaggttcatagggccatttgaaattctcgagaaggtttgacaagtggcgtatcgactagctttacctctagcattatcaatagtgcacaatgtttttcacgtatcaatgctggggaagtatgtatcttatccgactcatgtcttgagttatggtaccctagagttggcaccagatctatcctatgaggaacaaccaattcagatcctcgataggaaggacaaagttctacagaaaaagattatctccttagtcaa

SEQ ID NO: 145410 - DNA, 965 bp, Cannabis sativa
tttttttttgtaattttctaagaaaccagtttcttggtattttttcggtgacaatgccaattctgatgacttttctgacgccagcagcaactccggttacttttctgacgcctgtagctacttcgacgatttttcaagcgccggtaacatccttcggtaatttttttggtactaatgataaataaaacttcctaaataaataaaaatattaaatatggtttttgaaaacctaatttatatatatatatggcatatcaaataccatataaattaatcaaacttaaaagtatcatatttaagtaaataacttttaaatcctatagtaaatataattttctgttttgttatatgatagtgtatattattattattggaatattatatgaatttttgaaaatttattttataatattaaaaaatttaatgagttacttttattgaaatattaaaaaaaattaaaagacttgtaaaaatagagttagcccaccgtgctgtttttgataaatcaattttcatattttatttttttttaaagaaaaaattagcggtatcatgtgtacaatttttttcttaattcttattggcccatttaacttccctatttcatgagataaaattatggggacgtacactagatttcccctatatatatacactcctcactaactttaaaagtttgacagagagaaagtatatatatataaatatgtgtatattataatataattatatatatgtacgaatgagactgataaaaaaatatagagcccatgtgcatggtcagtgaaatagggttttatatatacctatagttagtaaagaagaaaaaagaaaatatatatgcacccttatgcaggaccggtcctgaaatttagtgggccatagggaaaaaaatatttttagcccctcatttagaaaaaaatgtggtattttttaaaattgataaaaaaaaatgtgtaatttta

SEQ ID NO: 145411 - DNA, 605 bp, Cannabis sativa
acaatatactctgatacttaatgtaatttatgagttattccataaaagcaatggtatcgattctttaccttgacatgtgtccttcattgaggtggcagccaaattttgagtattacaattgccccttaaaaagttctttttagtaaaaaagagtgttttaataattacagagggtattttcgtcaagatcttttcttggaaaaatgcatcctttgattttggcagttgtacggttttgagagtaattatgaatcgtctcttcatattctgcctttcttccaaccgtttgatttcccaatctttagctttcttgtcactggactttgtgtataaaagggcagctcaagcttgttatttttcacaaacctctgactttttggtgaaatccattttcagaatggatcacctctttcctgctagaatgtcccttctaagttcagaagttcatcctcccaaactcatcttacccagacgcaccaaccaattttcacttgttcccaaagacttcaagcctcaactggagacacaccaatccaaaccaggggaacctcgtagcctgccatggccgatcctcacaagtgatcccagagggtatagatcttgtg

SEQ ID NO: 145412 - DNA, 512 bp, Cannabis sativa
tgatctttttgatcaactgaaagggaagacggtcttctccaagatcgatcttcgctcaggctatcatcaactgagaattcgagaggaagatgtcgtgaaagctgcttcccgtactcagtatgggaatttctagtgatgtcttttgaactcaccaatgccccagcggcattcatgcatcttatgaattgggtattcaaggattacctagatagatgtgtgatcgtgtgtacttatgatagcttagtttattctaaatcgaaagaggaacatcagtttcatcttagatctgtattgcaacggttacgagaccacaagttgtatgctaaattctaaaagtttgaattctagttatctcgtgtctctttcttggggcacatagtagataaagatgggataatggtggattcggccaagataaaagctattcgggattggccaacaccaaaatcagctactgaagtcagaagctttttgggcttagctagctattatcgtcgatttgttgagggttt

SEQ ID NO: 145413 - DNA, 985 bp, Cannabis sativa
gacaatacccgaaattgtgccattatagttatgcttgtcggagcttgtccaacagtgaggggtaggcaaatttgccgactctttggccggagaaaccatatacgggcaaaagacaaggggttagaagtttgagttaaagccccatcttttcatatgtggtcttgagtaagatgttagaagaggcttcattatctatcatggttctggccaccatcttgttggctatttggacttccacgaccaacgggtcgttgtgcggaagtctaatcttgacagcatgttcatcattaaatgttatggttagttctcctgctcgtgggatcttctgcttaatctcttctacggctaggactacttcttcttgctcatgctgtactgttcggacatagctctcccaggctttgcttgaatctccagctatgtgtgggcctccaataatgaattgcagatgtccatctactagtggtggtagcaagtcttggatgttatcgccctgtttattttgatcgaccttgacatacttctatacgtgcggattatttttccttatcaagcattcgatttcccgcttcagattgttgcattcattcgtatcatggtcataatccccatgaaaacgacaaaattttgtcatgtctctcttgctgacatcttttttcatgggtgcggacttcttgtacggggctaatgactgagtagccatattaacactttccatgtcttctgccaggatagtaaatgcagtatactttgcaggattctcctggggagcttgttcggtcttgccagtgaactttccatttttcccattcccttgcctattattgttgctggaccgtttaccatttgagcttgaattgtttggataatgggggagctggacggatgtcccaatagaaggagcttttgacttgccatgtttttgttcacattctgctcgctgaatggcctcttcaactttgataaaaccttctgcacggtcaag

SEQ ID NO: 145414 - DNA, 793 bp, Cannabis sativa
  modified_base (215)..(216): a, c, t, g, unknown or other
tccctagtctggttccatgtttcgatctgagttcaggttcgggttcgggtcgcgagtccaggtttgggttgggatccgggtccatctcacaattcgggttttggtctgatttggagtcttggtcctggtccggttacgattctggatctaggtcaaattttagttatgattccaagtccaagtcctagttccagtcccggtcaactttcggtttnngttccaattttgggtcacagggtacaagttcgggtccacttttgggtttgcgactcggttcgggtccttgtcagggttcgggtccagggctgggtcccaaatccaaacacagcctacgggttttgtccaagccctaagtccaaatcttcatcccaatctctagtcccagtctggttcaatttctagtgccgggtcacgagctgggtccaaggttcaagttcgggtctgggtcggtcctgttcgagtttggattggagtttgggtccgggttcgagtcctgttctgagtttgggttcgtgtctggatttcagtctaggtccagattaggctccaggtgtgcgttcgcatcttgggtcttggtctaggttgggtcccagtcccaagttcctatcccgatgtgagtctggaatcagttctaggtctaagtccttggttcttatcttggtctgtgttcgagtttgggttcgggtcctagtgtatctttgggtctgattctaggtgtgggtgtttgagttcgggttcaagtatgtgtccgtgtttgtgtcaaggtctggacatcgatctgggtctaggttcg

SEQ ID NO: 145415 - DNA, 608 bp, Cannabis sativa
ccctaatcctgggaaacccgaacctacaactctaggttttgttatacactctagggattacactaactcaggaaatagggaaacacccaacaatggcactggaatggacgagcgttgagaaagtagagcattcggggaccctgccaaaaccggctagccggtttacaccagttcacccaaaaaccccatttcttactcgaaactcctccaaatgccaccaaaccttccagattacctaattaaggtatacacaatattttccaaccagtaattcacaaaaaaaactcactgtatcacaatatgcattaaagatcaaagctttgagttcaaagctcaaacttgcataaattcaatacaacacaaccaaaccagctactagaggctaaaattaactcaaatcaaacttagaattcgaacccataagcatttttaaccctaacatctcccacttatcaaaatcacatacttaaactaacccaaagcttcaaaaacacataaataaaggttatagggttttacttttgctttggattcacaaagactttgcttaatattcagaaaacaccagattgaagatgaaatccccctggtttgctttagccgaaaga

SEQ ID NO: 145416 - DNA, 1009 bp, Cannabis sativa
  modified_base (926)..(943): a, c, t, g, unknown or other
ttaataaattaaatataacaaaaataaataatttaaaaataagatatttgatggttaagatattatcaattttatttaataaataaataaaaaaaaatattcaaagtttaaaaattttatggttaccaaacactaataatttctattcaaactaaaattaacaaatttttcaaaatttcatgttatttgacataaataaattataattaaataaatatctaataagataaaatgtcaaaattaaaatttttctaatgttataatttaatttaataaaatatatttcaaaataacaaattttgtcaaactgatatggttagcaaacttaaaaaattctaatagatatttctaagttttattagtattttaatatcaaaaaatatcatttcaaatttcaataataaaataagtaatatgtaatcttataattaaaataaataaaacaaacaaaaataatcaaaaatttcaaaattagccataaggctagtttgtgcaaaaattaattttttaaattttaaaggctactaatatctaaaactaattttaattaattaaaaaaataataaatattaattttattcaaataattagatttttatttgaaaatttagattctacacaaaattctaccaaaatttgaatttgtttcactaaaaaataatttttgaaagtcaaaatatcacaaaacaaattttgggcacaggggtatgcattgcatacctctacgcgcgcgtaagaggggaaacaagcgagggagaaggctgcatgtagcctctatttgcagagggatctcggcgtgaaaaggccttcagacaaggccttgtctgagtaacctcggtcaggcacttgtctgaagacgcgtgcttgccgagctgttccgcgcgcgcacgtgatatttttactcaaattcaaaaaatcataactannnnnnnnnnnnnnnnnnttgagttttgtaaaggttaaatttgttaaatttttatttactttctaggaaaaataattccagaac

SEQ ID NO: 145417 - DNA, 647 bp, Cannabis sativa
  modified_base (41)..(49): a, c, t, g, unknown or other
ccgctcttccgatctaattatgttttgcatttatttttaannnnnnnnntgtgaaatttttgcttaacaagtacattacaagtatatatagtggtactggtagaggcagtcacatatttaagtgagggcaaaaaaaaattagaatactaataatgaaaaatataattttaattgagaaaagtataaattttagtgggataaaataaaaatatttaaaaataatatgagaaatataaattttataaagataaaaatgaaaaatataaaattgatggggacaaaaaaaaaaagatttatacaatcgcaaggaaaaaattatatgtgacaagccaacatgcggccaggaagaatttcctacaccacggtatattacaaaacatatgatgttattgaaattaagttaaaattaaaaaagatagcaacaatcttattatgcattttacagtgttatagtatatattgaacttgatgacaatataaagagcctatctgttgacatgttcgcagatattgtggaaaaaatatttttcatgtaatgctgcccaactaatagaatacatgtattgcagaggtgtagttttaaaaaaataataaagttttacatgtctttcataagttgattttttaattaaataagttatgcacac

SEQ ID NO: 145418 - DNA, 845 bp, Cannabis sativa
  modified_base (661)..(661): a, c, t, g, unknown or other
agagtacatcattgatgtatctcttgccttttttagtgtcaatggaaatggttcctttatcgactgcttccatgaagtcaccattaccgatgactttagtcttggatttgtgaagactacaaaagatgctttcattttttgtcatgtggttactgcaatcaagataccaaagttatcttttccttcttctgttgtagcttgacaaacatagaagagagtatttttattatttttctcttcagaaaaattagcttgatgggatttctttaaacgacaagttttttcagtgtggccaaattttttacaattttggcactgtagttttcctttaaaccattaatctttctccaagtgactttttcttttacaaatgccacatggaggatacttgtcgttattttctttttgtttttcttgtgtctttgtcccatcaacttttggtttttgagaccgcggattgattttagactgaaaggcattttcagcttcactttccttatgtctttctcgtttactttcatatgcttcaagagagaacattagttcagttggtgatagagtttctaaatctttagtttcctctatcacagaaactattgaatcatatttttctgtacaagacattagtatcttttatactatattcttgtcagaaattatntctccataggctcccatttgatttactatttctttaattctagaatagtaatcttttgcagtctcattatttttcattttaatattctcaaaatctcttctaagcttttgtagtctaactgtgcgtaccttgacggttccttgaaactcctcctgcagcgtgtcccatgcttcttttgctgttg

SEQ ID NO: 145419 - DNA, 519 bp, Cannabis sativa
taatatttttatataatgaaaagattgattggttaagtatcgataatgtgatgatattatgcatgtgatatatgggctcacctgattaggtgatgcaattttcccagcgacgtattggtcgtaagtacgggcgtcagtgatatatgatgagtaccgagcgtaggtacgatctcacctgattaggtgatacaattttcttagtgacgtattaggcgtaagtatgggcgtcaatgatatatgatgagtaccaagcataggtatgagctcacctgattaggtgatgcaattttcctagcgacatattgggtgtaggtacggccgtcagtgacatatgataagtaccgagcgtaggtacgggctcgtctgattagatgatgggatatattggtgccagattatggcatgggctcacctatttaggtggtgcaattatataatatatgggtgcaagtttttggcacgagctcacctgattaggtgatgcagttatgcgatacatgggtgccaggctatgacacg

SEQ ID NO: 145420 - DNA, 852 bp, Cannabis sativa
aaattaagtaaggaaagggaaagacattccctataaaaatgggggagaacctttccctttgttttctccctaatttgtgtgggtcacactaatttttcttttccaaaatttagtaaacaattgtatgggaatcaataccataccattcactttaagtaaacatgccattatatataatgaaaaaactaatagctgctatttatatttatttatgctatttatatttattatatataaataaatataaataagttttttaatatgtataaatataattaaattagatcggcttttaataagattttgagattgatatttaataactgatccaatttaattataatccaacatttagcatccaatcaaatttaattgtaattagatatctaattttttgtagttggattgagttagatgggttcaattcaatttgattggattagatgttgtgagtctttttttttaataaaaaaaaaaaatcattaactattcttttttcttaacaattatattaaaattaattacataaactttatgattcattattaagaaatattgtatgcaaatttatcagataaattatattatgttttcttggtttttttacataatttttttaatgtgctaataatcacaacatgttcttaaagtgaatgcaataagcataaatataatttttgtaattcacatgtgggtagtcacagattttggaaataataagtttatttttttttgctattaaataattttataaattttagggaattaccacatatactatttttttttaactttttttcaaatttacggtttgagtttctaaagtgattgcagagctagttgcaatagagg

SEQ ID NO: 145421 - DNA, 541 bp, Cannabis sativa
acatctcagctttcctcgaggaaagtgagtacacgtgtcctttaaataggagtctgatctcaagtttctaggtgagaaaaatctcactataacacctacgtacgttaagtcttttttattatttttttgtgatttttttttatttttttaacaatcggttattgtaggtttcttcaccagttgttaattttattctttaattaaaaactaaaaaggtacaattaaaatactattatttctggtagttaatagtacaaaagtactacagacggtaggtccatgttttcggactgaggttatttttgtcttttcatttcttcatatcttctacgtatttctgcgatggtagtggagtacgttatatcacgtaccgagtacactaatagtttctacatgatgtttagtaaaactaaaatatcacgtacctagtacgtgcctttatgtttcatagtacaatggtaagaaaaatttcttataactcatgaaattatgtgttgttatatattgagttttacattggtgtatttgttttattttaatt

SEQ ID NO: 145422 - DNA, 579 bp, Cannabis sativa
gggggggggggggggaagagagagaaagagcggtataaataaagtggcatttagttggatagaatgaaaatatatgaataggaataagaataaaatgaaataaaatttaaaatgtataaaaaaaaattgataaaaaaaattataaaatttttcttatcatgcattggaatggtatttttttttatttacaaataaaatagttattctaccaaaatagtagaaagaacattctattagattaacattctaatcctttaatatgcaacaaaacaaaagaatgaaatgttgtttttttttttttttcattctattctattttattatctttaactaaatacatctaaaattattaaaacatactcaaacaaacgaaaacattattaaaacttgatcaaatcatttttaaataaaaataagtcattttttacaatttctcaataaaataagggtaaatttcatttagactttggaccctgtgttttgcaaaaattacagattggactctctgttttgttaaaagactctatattttttaaaataatataaataagactatgagtttaatttttgataactttt

SEQ ID NO: 145423 - DNA, 558 bp, Cannabis sativa
tttttttttttttgtcttttttatgtctctctccatctattttatatatttgtttctcttttttctttttttttttaaaaaaaaaagtttaaaaagttttttttagttacacaaataattatttgaactcaataattatatcaatgcaatgtactttttaagggaatcgttttaatatatggaaagcatatatttttttacaattgtcaaaaaaaaaaataattacaataaaaaataaccttttagtttctttaatagaaaatcgaatttttaaataccaactaatttctaaaatgacttatttttttttttttggaagaattctaaaatgacttataagatactaaatttttaatcttgaattcttttatgttgtataggatgtgttggtcttacttatttagagtacatttatttagatattagaaaacttttaaatctgaaatattatgatatttattgttataacccataaaattagatggtatacttgttttgttcaaatataatatttagttacttctttgttaataatttataaaagaaagggaagtgtta

SEQ ID NO: 145424 - DNA, 748 bp, Cannabis sativa
aatttaagaagttaaataataattaataaatgtactttttatttaagttatactatttttgttagttattctttaaaaatatttgatatgtgaagatgctaggaatcaaacccagcacccaccaaccaatattaacctctcttaccaattgtgctgtaaattttttataaaaattattaaaccaaaatttatatatatacatatattatatttttatttttatatatataatattaagtttaattttttagggcctccaaaattgtggggcctagggcctcggcctcggctgccccaccctctagccggccatgtcataatgcctctattattactagttggaactttgaatcccacagtaaataaagcttttataaattaatatacctggccttaggtaaaatactaatgactgtgacataattaaattggacacactaccttagggcaggtataggtggattaggtgttagactataaaatataatatgaaaatacagaatatataaacaatatgtaatacataataaattataaacatatcgaaatgtatatgcaatgaaagaatcgaaataactctagccattgatgtttgagcttcaattcctgcgatagcttcagtattggagtttgggcttcctcgctctcttaattctctttaaatgaaattttgttgttatagaatgagtgaagagctcggggaccgagaccctatatttataagtgagatactccatcagtatctgcg

SEQ ID NO: 145425 - DNA, 690 bp, Cannabis sativa
  modified_base (72)..(76): a, c, t, g, unknown or other
  modified_base (575)..(593): a, c, t, g, unknown or other
taattctaaaaaagaaatgtctacctattagtaacctgctattacatgtcaaagaaaaatgtaaccatatgnnnnnaataaaaatgtaactattgaatagtcacgcttactaaaatatataaagtaagaataatttaaaaaatatttaaacctaataaaatataattaaagcacaaatataaatatcaataaaaggaaaagaaaaatataatcatagtaataaatattcaaaattcacccaataaatgctcatcaataacaataaatacaaaaaattcagctattccactaaggctcgaattttgatggtgaagaacactaagaatttcgaaaatagtagagagaaaagaagaagaagaagtctcaaaatactagttgtctgacagaattcacttagggttaggattgaattatttggaataacaaaataataaaataatagcaaaaataggacctaatgggcagccacatgtgggcccatcactagttagattattgttatttttctcaatcatttatttatttttcacaaatgtcacatattgcaatgtcaatcctataaatgccaaaattannnnnnnnnnnnnnnnnnntaattatcaaataaaattatcattcatattatttattaattagtctccacaaagtctcttaattaataaataaaccttaaaattctatttcttcaca

SEQ ID NO: 145426 - DNA, 561 bp, Cannabis sativa
aataaagattaataatttaaaattttaaattgaagataatgaaaaacagaagaatcactataaaaattaaaaattaaaaataaataaatagttgtagaagaatttatgatgtcattaccgtatcatactcatattcatatataagaatacattgtttatatttttatacatatttatatatctaaatcaaaatgtgtaattactcattattaaacataatttctttcttagataagatttgtcataataattgataaaacataaacatttcattcttaatgaatgcaatagtggaaatgagaaagagttagtcatttaacgttgaaaatttatatttaaatgtaggctaataataatgaaataatgttaaatttcctcttcatataaaccctctcattcacaaaaaaaaaacccattcaaaattaagtaaattatgtaggctaataataagaaattaaattgaaacatatacttagtaaaaagggaaaaaacaggaaaattccaaaaagggtaaaatattacaatattactatgggtcggcccattcaacatttatacagc

SEQ ID NO: 145427 - DNA, 601 bp, Cannabis sativa
atccataagaacctgagacactcaatattaaaacataaatacatacatttctaaacttatgcagttgggcctacgaaggctagcctgagtagaaaggagacaccacaataaagatggagcccataagagaacatacatacatacatacatgaactagaacacattcacagaaaaaaaaaaaaaattgatttcatgttcttcaaaatcacactcatccccattcttcattgttttaaaaatcaaactaacctctaattcaaatccagataaagctaatggcattcatcaatttaaatccaaataaatccatacctggacggtggagtgtggtggtggctgatgcagcacggtgggagaacacagctggtgcatggtggcctgggcgcacgactggtggtggcttgggcgcacgactgctaaggcgaggctgactgagagggttttcttttttttttttttttgagaattttttatgactgctgctttgtgtgttagggtttgaatagagagaaaagaaaatgaaataactaattagggttagagtttttttatttgggctgggctgggctggtgtatatatatgtttaattttttttttttt

SEQ ID NO: 145428 - DNA, 587 bp, Cannabis sativa
atacgaggctggaaaagtggcataacagacttatgccaagaagtcaaagcagagacacaggaattctgcctagctaaaaaaatgccaagagcatcctggttatcagaaaggtgggaagaatcctgaactgttgtataaaaactggggttgtcaagccaaatattttcaaattgaaaacaccttttaaatctatgagatcgactaggatttggatcagggtgcaggacaaccttaatagctcgatggtccgaaccataaaagggcaaatgatgcaaaatagcattaggaaataaaaccttccaagactcaatatagatcgcccaatcaagacgctcataaacagtattattactccaagtatatttactaccttcaaaattaagaggagaaagactaaacttatggataaattgagcaaaatgatccatatcagaaatattgtaatacttactaccagttttatcatcaaaatccaaaaaactattaaatcacccataatgagccatggcagattaggggaagaataaaaaagtttgtctaacaaatcccaagtaacaaaacgtgcagaagaagaaggagaaccataa

SEQ ID NO: 145429 - DNA, 682 bp, Cannabis sativa
tttgctgaaatggaattcatttttgagattctaggctgtttggacgttgatttgtttggatgccgaaaaattggcaagggaaagataattttattatttgttgggtggtgattggtttcagttgagctcatgagttatattttcaaaatttaatttaatttactttcagtttatgatttgttgccttgtataacattccactcaaggcaaaactgagttttagtcttactaaaaagaaagaagaaagaagatatggaaaataagagaaacataatttgagtgaacgctatatgatatcgataagtttagtcctcagcgtaaccattataaaggtttctgtttccaaaattcaatatgacatcttgcatctttgttcctgcatattataaaaaccaatatagatcaaagtttaggaattgaactttctcaaaagataaaaaaaagtttaagaattgaacagtggaactgaggctttgcagaactgtttataaaaatttagggtctgcttgtggaatataatgcaaaaaaggggttttgcaattttcatttgttctgttatttcattttgaatgaaaaaaatccaactaagttgaaatttgatgttttttttttaccattggcagtctaagcgtattatatatttgagtgttggcagaagtagtgctatcttaattattgaaat

SEQ ID NO: 145430 - DNA, 1996 bp, Cannabis sativa
  modified_base (1961)..(1965): a, c, t, g, unknown or other
ttggatctacttgaagaaaaacgtactgagtcgcaaccattaatgcagcgtatcaacattgaattacgagatactttaataaaagagtgaagaaaaggctctttaatgttggggatttggtgttaagaagagtatttgcaaacacgagagatgcatctgctgaagtgtttaacccaaactgagagagtccttatgttatcgaagcaatacttggaatcggggtttataagttggctcggcttaatggctccctaataaagaaccatcagaatgttgaacatttgcgaccttattaccagtaaacttattaagtaaatgctgtattttctctttgtgatgtaaatttgtgggataggtcttatttggtggtggtgctgttgattcctctagaaatctagattcttaaccctttttaataattttttattcaggatttggttcttccaaagtggtctcgtttttggggttttgggtggggaaattctttttcttttcttgtagttaagtaatgtactctttctcactccttagctttagctttgcctgcctcttcttttctcactcttgcttcgttagtgtctaacttctttacttcttgctcttcatctgctactggcaccaatctgtaaattgctgctgctactactaactcctacaacagctgctaaatttcagaaaaaacttgccatttcaatcctcagatttataaacccaataacacccaaattcacaaccaaaaacaggaacaagaaatctgattcttacttttcatgtttataaatataaattgattttgagatgtagtgaagataaatagtctaagcaaagataagtctgcgataaaaaatatcaaagccaaactcaaaagagaatttgagatgaaagagcttggaccagtttaaaagatacttggtatcaaagtctcacagaactgaaaggaagagactataagcttaaagcaatctgggtacatcaagaaagttattcaaaagttcaacatggaagatgcaaagagtacatcccttccgttagggggttagtttcttttgtcaaaggaatagtgtcctaacaatacgaaagagaaagaagaaatgaaggatgtaccctatgctgtggttctaggatgtttaatgtacgtgatggtgagcacgagaccggatatagctcacactctaagcatcctaagccaatttatgtccaattcaagcattaaacattggaatgcctttaaatggttattgagatatttgaagggcacttgggattatggtctaacatatgaaaaatctaaaggagaattagaattgaaatggttcgtggacgcgggctatgcctcacatagagataccagaaaatcaatcacttcctacattttcctaaaaatctggaactgtataagctggaaaatccatttacagttcatggttgctctgtccaccatgaaagcataatttatggcaactagggaagcattcaaggaagctttatggctttggggagttctttttgagttgaatcaaatcaaatggggagtgactgtgctttcagatagccagtcgtccatccatctttgtaagaacccgatttatcatgaaaagagcaagcatataaatataagactctactggattagagagaagatagaggaaggatggttgatttagagaaagtcataatataagataatcctactgacgttgggactaaggtcttgacagtaaacaagtttaaacattgcttgaacttgatcaatctcagaagttattatactaagattcatggaacactaaccatgatggttgcattctttcttcatcatcgtcattcttttaatttgaagtaaggtagaatttgtggtatagttcctccaaataaaaatgtctccaatattgttcctggaaggctaggtgtctcctgaatgttgttctcggacagcgaactgttggaatatgttttaccannnnntagatttactaataagtatgtttcattaaca

SEQ ID NO: 145431 - DNA, 791 bp, Cannabis sativa
ttcgttgttgttcgacaggggctcttatactggctctgagttatcccttatcctactttcttctttgctcgtgcactcaactacaaaatctgctaaggcatgtcctttgaccactaatcagggttgaaagattattttgtactgacccaactctactgcccatttaagtaaccgtccagaagcatcgggtttttgcaatacttggcgcaatggttggttggtgtatacttgaacaggttgagcctagaaataaggccttaacttccatgttgctaagattaggcagtaagtaagcttttctatcaaaggataacatccgtcagcttcaacgagtcttttgttgatatagtagactggatgttggacgttgttctcttctcttatcagcacgacacttatagcgtattctgtagcaaccatgtacattcctaattcttctccctttaggggttttaagagtatgggaggctttgcaagttgtctttttaattcttagaaggcgttctcgcattcctccatccattcaaatttctcgttacctcgaaggttgttgaagaaaggaacacacttgtctatttgactttgaaataagtctactgagtgcagctatctgactagttaatctttggacttcctttgtctttattggcaatttcatatacaagaggccttgtattttctcaggattggcttcgataccccgagcattaacaataaaactaagaaacttacccgagctaactcaaaaggagcactttaagggattaagtttcatggtgtattttctaagg

SEQ ID NO: 145432 - DNA, 643 bp, Cannabis sativa
  modified_base (578)..(610): a, c, t, g, unknown or other
aatctctctattatttctaacaacgaattcaatgctagacataaacaacatggaacaattgacaatcctcaagatatgactcaagctttcttatccttttaggctgatcttcttgggattattataaggtttaggaaacatgtaaagacatgtggttgccagggtcggcccaagcatttttgggactttgtgcaaaattttaaaattgggctctttaggaaaaaaaaaacatgtatattaaaattacaattctattactagcattttttttttaagatttgtttataaattttttatttatgtatatataataggaaaaaaaagagaaaaaaataggcattttctttaaaaacaaaattgggccttaagaaaatcggagccttgtgcaatggcccaagctgcccaatgcttgggccgaccttggtggttgctaatggcctgatggttatggagcttctaaacttgcagctgatgatattccatgcatgtgacaaagtacatgcatgggctagaaagttatagctatttcttcacattacaaaaaactattatttttgtgataattttttagtcacaannnnnnnnnnnnnnnnnnnnnnnnnnnnnnnnntcacaacaaaatattacttgtgactaaaatata

SEQ ID NO: 145433 - DNA, 799 bp, Cannabis sativa
  modified_base (368)..(370): a, c, t, g, unknown or other
atgtcgtacccactcctatggcccccaaactctaacacaaggcccaaaagagaggaatttaaccttaatttaaacaactgttattaattgaataggcccaaatactaattgggcataaataaaacctatcaagatgtgacaattttatttagcaaattagtccattttaattaaaaaaaattaaatgggctccctatatgaatctaagcccaaagcaaacatataggcacacacagacacactgatttggatggatcctatcatgttactaggtttatacacagatgaaagaagattgcaaaatttacatgttacaaattatttatttgacctatggacaatataaccattggttaaaatcagatcannngatctgtcaacaagttaatcatgataatttagatcaaataataataggttttataaaacttattttaataattaaacaatataaaacacacacatttaacaaattcaatttttggatataggatttatttaatttaaattaattaaataattgaataaatttgaaaatttaaaaaacacatattattattttcaaaaaaaaaataaataaaaataaattaaataatttctttcaaaattaaacctataaatttaaaaattaggttttcaacaaacctaaatatctatttcaaaaaatgctaccaacttttcaaattataagttacttttacaaaaaaaaatccaataaaataaaatgataaattaatatcatttgtctgattttattatttaattttaataaaataacaaaatttgaaagttaacaaaa

SEQ ID NO: 145434 - DNA, 1674 bp, Cannabis sativa
  modified_base (1600)..(1609): a, c, t, g, unknown or other
ttagggcacaaaatccaacaattacctgctaaacaagggggtgaaacctctattaatatttgtatcacctttactattatcgttcttatttacaggttacgacctttactatttgccaagttaccaccataacttggatgtaggcatgcagcttgaggttggcttagtctcttctttcttttattttgtcaagggattctgccaacaaggtgttgtttacttcttggtcataggttatcctcctatatgatgacatctccaattcaacatgcaacattgcttcctagccataggccaatgaaaatggtgttttcccagtggtcatcttctcggtggtcctatgtgaccagagtacctctgggagtaattgaggccaattgtattttgcctcttctagacactttttcaaagtgtccttgagggtcttgtttacagcttccacctgcccattcgtttgaggatgagcaacgccgtaagagcttttgatgatattgtgtctgttgcagaagtcagtgaacatgtcactctcaaactatttcctgttgtctaacacaatcttctatggcagtccaaactgacatatgatgttcttgacaacaaagtcgaggactttcttaaaagttattgttaccaggggttcaacttctgtccacttagtgaagcagtcgactgcgactatagtatattgtacacctcctttacccttggggagttgattgatgaggtctattcccaacacaacgaagggccaatgagactgcatcaatgtgagctcgtttggtggagctcttgggatgtttgagaatctttggaacttatcatattttttgacatagtccattgattcttttatcatagtaggccaaaaatacccttgtttgagtatttttttggatagactttgcccccgacatgattttcgtagaagccttcatgcacttctatcaataaccgttcgtcttctgtcttagtgacataccttaggagaggcattgaaaagcctcgtctatacattactccatataggattaggtaccaagcagcttttctcctcatttttcttgcctcatttttgttctcagacaagactccagtttggaggtatgctgctatgggcgtcatctaggttggactatcatccaacatgtcaacctcttgtggaatggtaatgcttggttctttatagaactgtatgggcacaaaatttcccttgtcagttatggtgttgcttgctaggcaagcgagtgcattggttattgcattatcttctctagggacttgccttatggtatagcctttgagccaacttaataagtcttagattttgctcaaataggctatcattctttcacctcttgctgtatactcacctaggacttgctttacaactagttgaaaatcattgtacatatctaagtggtcgacccgtacttcatgtgctagcctaaggccaacaatcagagatttgtatcaagtctcattgttggaggcattaaaaccaaacttgattgcctcgtgcagttgttgcccctaagtgtaataagggcaatgcctccactggatatcttttgattcaaaaattgtttttcattgaaacaannnnnnnnnnttggtagaattttgtgtagaatccaaattttcaattaaaagtctaattatcaaaataaaattaat

SEQ ID NO: 145435 - DNA, 1473 bp, Cannabis sativa
  modified_base (136)..(143): a, c, t, g, unknown or other
  modified_base (252)..(259): a, c, t, g, unknown or other
ttttggtctttattaatacatgttatatacatgctattagtttaacttgtatagaagaggtttgaaataaacttatatgcggtatcttttagtaaaattaaagtatatcttatttttttggggcttttttattttnnnnnnnnaaaatagttttttttttgtctttttacgaaattctacatagaaacccctattgcaactagtgttgcaacctaaattgtaacaaaaatcgtatagaaactcctattgcannnnnnnntgcaaccactttagaaactcaaagcgtaaatttgaaaaaaaaaataaaaaaaactatatggggtaattctcctacattttttttaacatatataatttttatttacgtgtacaattgagtttactttttattatagttattttctattaaaaatgaaatgaatttttaaattttttattattatagttaataaatctatcaatccttcattttttttttctcaatttaaaatttctaaattatttatttatcaacaataattttttcggtatttgttctccttttttataattcttaatttatgtatttatttttaacgattaatgtatatatttaaatcaaaataaatttactaataaaaatatagaagaaaaatataaaatttgttaagataggctttttattattatcaatttaactatttatcatataataattattattttgatgactaatttataagttttgaattttgtatcaagaaaacctaaattataaaagagataacaaattaatttttttttctttaattattaatttattgtatttagcagagttctttaagcataaatattttttcaaaatgtattattaatgtaatgaaattatcaacaaaatatattaatgtaatgaattttcgagatgtccaaaatgtaatactaagtaaatattattttgaatcttgtattttaaaaattaccgactgtgttatctattttgtcaaataatttatattttttaaaataaaatataacaatactgtgctcccttctttagtcaaaatagaatataataatactatgacttggaggtgttatgaccaaatttactacacactttgtacctctttgtgctagaaactgactttaaatttgttatatcttaattttactaaaaaaaaaaaaagttggactaaaattaagtggagtagtattatattttatttttaaaaataaaatgtcaaattagtaagtttatttatgttataaattattattattattattgaaaaatagctataaattaataacataagatttgaaaaaaatatgtaatttaaataatgtttgattaattgtgtattttttttgctacaaaaaataactacttttagtgacaatcttttagtcataagttacttgtcactaaagcataatatttagatagaagttgtgactaatttagttttagtcacaacaagtattgtggctaaa

SEQ ID NO: 145436 - DNA, 538 bp, Cannabis sativa
tacgaaagcaagttgaggaggggacagtgttagtagaaggctcaaaagacatactcactctagccttgggaacagaagagcatggaggacgtgttagaggaatgcggggtggtgtcacacataaacagtttttcaaaaccccacatcctaaaagaaagagaatcgattacaatgatcgtatgagtgaggtggagaagcgacttgaagagtcagaggaacggggtcgtagacaagacgaattaataaataaactcctccaaatagtctgaagccaaagtggtgttgcgggcacctcacatgcatctggttcaggtgttgggggagcatccaacgaactagcttttgcagctgttacctcagttgtaggagcaacacctactgccagggcctctgctccaccaactgtcagggcctctactccaccaactaccaggacctctgctccaccacctcccaaggcctctgctcctctagctccgaaggcctttgctccaccagctcccaaggcctctgttccaacacctccacttgttgctcc

SEQ ID NO: 145437 - DNA, 501 bp, Cannabis sativa
catggcaaatggagtttgttcggttgccgttttttcagttgttcaatacgaccatagaacttcagggagctcatccggccagtttcctttagcattctcgagtcttttttttaatgtatccttcagggtcttgttgactgcttcaacgtgaccattagcttggggatgcgccattgcggagaaacttttgatgataccatggttcgcacaaaaatcagtgaaggactggctgtcaaactgtttgccattgttcgaaactattttgtacggcaatccgaaccggcagattatgttcttcaccacaaagtcttgaactttcttggatgaaatggttgcgagtggttcgactcccgtccacttagtgaaataatcaaccgctaccactgcgtattgcactcatcctttgcgggatcaaccacgcccctacgagtctgtaccaccatcgtacttgtgattaaatttagaatgaagagcgattcttgattctgctctcaatgaaag

SEQ ID NO: 145438 - DNA, 697 bp, Cannabis sativa
ttatatgtgtttaacttacattgttttagaaattcatatttaggatgttaaataacatccatggtagtaaatctagatcctggtaaaatataatccaacaatagtatccaacatttagttctcaattcattagaaacactttttatatattttgtcttttcttcaaaaatatattataaaagtcggtattagtcttcaattattaattattttagtatatactaaataaataaatacgtgtagattaaaatgatacctcttcagaatattctattatttttgttgcataacaatctaagatttgttcttcttcgtgaccaaacataattacagctacgcttctagtgtcgtcttttgttctattacggtttgtaacacttaaccacaaaaactaattttttggcaggtaaactacctaaatcctaattttgtttttctctgcacacctccatccaaaaatcacagttaagtgccacggtggactgttcacgtgtacacacttgtatacgtggcaaatttttagtggtccacgtaatattagttttaaaaaataattataaatatttaaaacaaattaactatggaatttaataaatagtaacttgttacattttttaataactagtaagtaatttaataattaaaattctaatttggttgtatattgcataaggttataggttgtgtgctaatattt

SEQ ID NO: 145439 - DNA, 678 bp, Cannabis sativa
  modified_base (585)..(594): a, c, t, g, unknown or other
aggacggtgatatgtcggaatctactggaactgagtctgggtaatgcccccgtccttcaccatgaagtactcatcaacaaaatgccctatcttgatgatggtgtcattcgtgccggtcaaccacttgaagcctggttgagagaaatagacgtaccccgacctgccttgcttgggggtggacttcaaatcaaagaactaggaaaattcgtgaggagaaggagtatcccactcctgggaagcgtagaggacgaagaggccagacagatacttgatgcccttaggagtgaactgggtcaggcagagaccgaagaagtctgccacatccttgaagtatttatgcaagggcatcaacgctccttgctaaccatgggcaaccgaccaggcgcacattcccttgtcagggttcgtggcaagattgttgtgggcgggaatgtagcagtccagctcacccaggtatccgccctggtcaagagttcgaaggcgtgcctccgtaatcttggacggaggacttacccacctggcgcccaaggcaccctacctcgtatgaggaaccaccgcggcaagctcctcactgacgtagtccannnnnnnnnncaggacgtctccgtcagcatcgactggctcccccgcctcgttgtactccccgtagtttgggggttcaacctctgcctctttcta

SEQ ID NO: 145440 - DNA, 707 bp, Cannabis sativa
gtttaacatgtcaacaaatcaaaacaaaacattagaggtcgacagggttattacaaccattaacacttcttgaatggaaatgggaggatataacaatggatttcgtggttggtttgcctagaaccacgggaatgaatctatgactcagtatgggtcatagtggaccgtttcacgaagtcactacattttttgcccgtgaaattaacttatacagtagatcagtatgcagagttgtatgtgaaagagatagttcgtctccaaggagcttcaaaatccattgtttcagatagggatccaaagtttacattgaaattctaggtaagtcttcagagagctatgggtacgaagctaatgttctatacagcttttcattctcagactgatgggcaatcagtgagaacaatataaatactagaagacttattgtgagcttgtgtcatggactttgagggttcatagactaaatacttacctttgatagaattttcctacaataacagctatcaaagtataacagggatggctccctatgaaatgttgtatggtaggaaatgttaattccaaattcattgggacaaaatagaggaaaggaagtatttgggtcctgagtggtttagaagaccaatgaagtgatagaaaagatcaaagctcagatgcttgctttgcaaagtagacaaaagagttatgctgatctgaagcgtagagat

SEQ ID NO: 145441 - DNA, 676 bp, Cannabis sativa
tctggatggtctggttagatttggggttgaattgagtgaggaatggaattttgaaattttcctccactgaatcggtcgaccggttcagtgggacctgtatgaaccgaaattcttgttggtccccaagaaaccccacaaaacgggattctagttgggaaaccgatctaccggttggggcagttttgggaaccctggtttttcccgtttttgtgatatttagggcattgccatgtaattaatcaatagggaaacttttagtgtcaagtttaagttcttggaaagtgatttagcatgtcactcatcagttttacgaataatgtaatttaggggcctgtaattcgtcgagcagctgttccactcaagttggttggcacacctaaattcggtaacgaggtaagattagtataatgatatgcttatgtatttacatatttagtgtgcatgttagttaagcctgttagattacattaaaaatgtatgttggcttatgtactattcgacagtatcacatcggtacgcctagagtatgactagcgtatcgagcataggctgatattatagttgatagtaccgtactactttactatatcacatcgatatgactagggtatgactagcgtaccgagtataggctgatattgttgtcaatagtactgtcatacgaacgttctagact

SEQ ID NO: 145442 - DNA, 698 bp, Cannabis sativa
tgccaaaatcctgagtttggttgattctgctgaccatgtttactaatctgcagcatatcataggcactacgaacagagaaggaaccagacctttacccttccaggaccagcagtcttcgtttggtgtagaactcaacgggattccaagaatcagatgagaatctcgagggttaaacatatcatgaacaagaggaatatcccaagatatctcatgaatatccacaagagagttgaccattttattgtcaaggccgagagcattggaagtcacaaaaggattgacgggatcgggcagccaaggatgcttcaagatacttgttgacattccattaccaatggttcgttgacaacccaatttaaccacgctttgtgcactccagatactacgccaaacgaaacttgggttgttgccaagctctgcagtaaggaaatcagagttgggataatacttggcttggaacacacggctggcaagggatgttggagagacaagaaaccgccacccttgcttggccaacattgcaagattaaagtcatgtaagtgacgaaaacccataccgcctgaatgttttggagttgtcatgcgatcccaagacatccatatgattccttgacctttagcacttgaagttttccaccaaaagttagccataatcttctcaatttcttgacaggtttccaagggaagaaggaagacg

SEQ ID NO: 145443 - DNA, 723 bp, Cannabis sativa
atatacatatatgtgttgtttatattgacaaatcttttatgtaataaaaactgtttgttacagctgtcattaaccaagaacattatacaattaattgtaataatataacgtaaccaacactattgtttgtttaacaagggataatttgtaagatataaataaaaaaagtaaagttacgagataccaacatattatattatatatttgatctattgtttttactcaactatttttattttttcttcttataatattctactatgcacaaaaaattagaccacttttatttgttataacctgtcaagattttggcgacaacccatcaataatcaattgatattcaagcgattatcaataaaaaacaaaattacaattcgtttgtaatgctttaactatcgagaacttgtcaagaacttatcaataacacagactttaacatgttaagaaccaaacgctgaatcttaattgataacctatcaacaacctgtcaataattaatcgatattcaaatgataatcaataaaaaacaaaattacaattttttggcaatgcttcaactatcgataacatgtcgataacatatcgataacccattgataatagctaaacttaatgactatcaccaaaagctaaatcttataaacaactcgtcgataatcaatcaatattcaaacgagaatcaataaaaaacaaaattataattttttttcaatgtttcaacta

SEQ ID NO: 145444 - DNA, 511 bp, Cannabis sativa
aaactcattacccgaatcctacaaagaagtgaagaatgccattaaatatggtaggacagaaattactttagaagaagtgatttcagccttgaagtcaaatgacatggagatcaagaatgagaagtatggaggttctaatggagaagtaaacttcagtagaggaagaccaaatcaaagaaaacttggacactacaaaagtaaaagtcacagcagagatcacgacaaaggaaacagtcacaacaagggaagatcaaactcaaaagaaccacctgatcctacgggaagctacaactgtgcaagccagggcatttcaagagcgattgctattttctaaaaaaaaaggcaaaccaaataaatataaaggacagggataaaattctaactctatacctaatttttctaaaaataaccaagtcaattatagtgatggttatgaaagtactgatagtggtgaagtatatgttgctacatcatcttttaaagatgattggattttagattcaggttgtac

SEQ ID NO: 145445 - DNA, 523 bp, Cannabis sativa
tatatggtaatgtgttttaatcttaaaagattgtcttaaataggatatttttggaaataatgttggtatttctagtttccctttcttaaaaggaaaggagaattttttttttcttttgcaagatagtgaggcggtttccgtttgtgttcttgggctggtagtttctctttttaagttggtttcctcttttaatcctctctcacatgattatataaaccaacttcctttgtctttttttttcataacctagctacctgattcctatttcttggtgttcttgcttctttgtttctcattcttactttcagaaattcatggctaaaactaagaacctagggcatctaagcaagatggtggaatctaaacaagtcccccctcacattctcctcttgctactccaatcgccttgctgtcatggaagaggttcagcaagggatgtccaagcaactgtcctcattgatcaagctttatggggcgtaagttttctttctttttgttttttgttggacatatttctatattt

SEQ ID NO: 145446 - DNA, 508 bp, Cannabis sativa
gcatcaaactatttaagtttgatatattttaaatttttgataataactatgtgtaacaactttcaaatcggtatattttatattatatgagttggggatgttttattggctgaaaaaaaaaaaaattaagaaaaaaagtgttttgaccaaaaaaaaagttgaatttagcttcagtattttgtatataaatatatatataaatatatttttgatatagcgtaaaaagagatatttttttatattttttttaattaagtagctaaattaagtatagaaatttaaatttctcttttattattcgtcattcgatcaaaatataataatttaatatttttaaaattaatatttatagttaaattgtttagtaaccagtaatacctattgagaagtgttccatatatataaattatataaatacaagttaggtagcctgtgcattattcgataacctgtattttaaaatcatacatctttagtgtcctaaattcaaatttttttgataaaattt

SEQ ID NO: 145447 - DNA, 770 bp, Cannabis sativa
taagagcattgtattaggcacagtacggccggtgctaagtattatttatttattttttatatttttttgaaagcttcttcaagagtattattgttgttagttttctatataggcagttgattttatgcttaatttgtaaaattatagaatgtattttgttgtacagaattacagatcctactgttgttgaaggaatttttacaacaccaaaaataaatactaataatgttatatgaataataattgcgagtactcgacccagaatgacgaatattcaaattaataacaaaaatacttagcaaaagactggaaaaataatgaacaccaagagaatatagtggttcagtcagatttcagtctgcttagtccactgttgcaaggattctatcttgtttatttcacggtggatcacccctttatatacaaagcaagtgtcctatcatttacacaaggatattgcattcattatcaatccgtttatacattgaattacaataattaaactaaaaaacgtaaacataataaatgaagaacagtttccagcttaattcactaaatacagcaacgtatgcgacttctccggtgcaagttggctgttcatattcttggatcagctcgcaggcttaggatgcattcgagactagtcgagtctaagatgtatgggtcctttcaaagtcgcttgtaccgacatcatataacaagctgatagagccaagacatgcgagtctatattggtttatcaaggttgttgggtcaacgggaccagctcg

SEQ ID NO: 145448 - DNA, 566 bp, Cannabis sativa
gttattagaaaatatatagaataaacagcccaaaccgatcgatgtacagccctagtcgctttacgaaaaatttgtaaagtttattttgatcatgtaaataagtttaaaagcaagattgtgacctttttgtataattatatatttatagttataaaaatttaatgttaattaaaagtttaatttatcacaactttcgagaaaatcctttgattagcaaaggagtgtacagtaattaaaaaatcactgtagcgtgcctaatcattaggacattacagtatttgtagtattgacacgaggtatacatggaaactctgttgttaatataattttggccatctaaaataataatgtgtgaaatgaacaaaattatataaacgacaagaatataaatataaaaactataaaaagaattacaaatttaactaaattaaaaggtcgcaagtggtataaaaatatattgtgcgaccatgtgcgatcctatgcgaactttatggtcgtcgtacataattttaaaaagatttgaaaatagattgtgtgaccgtgtgcgaccttagtggttgttcaga

SEQ ID NO: 145449 - DNA, 570 bp, Cannabis sativa
actaattagcgtcagttcataatcaaagcaaaaaatattactatttgtgtctacggttatagtatcagctacaccaactgaagcaaaatctttatatgtcacttaaaaactaaagcaaaaagtttttttgtagtcgtgaaaccattccctctcagtttgattcgattagatcaagctataatgctcaaaaggagcaatggaccgttgaggagatgactgtcattcttgctaaggaagaggaggacttgaaaaagggaaaagcaagaaacatctccatggtaacggacccaagcaattctcagaagagagagtccacttccaacaactctagtgacctggcctatagtccacttagagaagaaaggcagtgacaaatcgaagaaggccgaatagttcagaagagtacatggaagacgatactaaagtcagaatagagttttttgggactgttagactatagttaaatacatgacatcttttagaattgcaagatgttgcttacttgccctctattcggaggaacttgatttctgtatctattttggataaactaggttatagtcttctttt

SEQ ID NO: 145450 - DNA, 571 bp, Cannabis sativa
  modified_base (336)..(339): a, c, t, g, unknown or other
gagtgttcactcggtcacacgcgcctcggaaaaggtcctgtccgagttttctcagtctgaagggcctgatttgtctgaagatggggccatgcacgcgcaggacaggctgcatgcagcttccttggccgaggtttctcggccagtcaccttagtgtgtgcgcgcggatggtatgctgtgcataccatccgcatctaacccaatttcttcgtttttcttcattttttcatgctatttcatagaattaatttcgaattttttgtgtaattttgtattaagatttcgatttttcatatttcaaatctaattatcagaattaaattaattatttttttaannnnaatttaagatattagtgaaattttaagcttgaaaataggtaaaaatctatttttctttgcttaattagttatcttattttttaaaaatttgattatttttagttttaaatttaaggtcagatatttcatattttaaattattcaatattttttaataaaatgaccttatttgaaatttaaaataagatcattttaatcatgaaattttaaattgaaataagatattttgcta

SEQ ID NO: 145451 - DNA, 790 bp, Cannabis sativa
cctgcttcctgggattgaaaccttcgtctaatgcaaccttcgagcaaccacccaacaacccatgatccatgtttcttgggattgaaaccttcgtctgatgcaaccttcgcacaactacccagcaacccaacacaatcgaaacgaaatctaaccagaaagagaaccaccattaattttggcaactttacctgagaagacgaccagaatcaatcaaaacgggggctgtttcaaattcatgaaaaaaaaatgcagaaaaattactacggaactaaaattcaaccagaaatctagtttaatttgtataaaactaatgtcctgacttcaattttcagatcaatgaaagacagatctcaaaaagttgaattggagttcctaaacaattcaaatcaagtataatctaaaaaaattatatcaatactatagtaaaatatttatcctggtgtattttcattattttccgaatttctaatggtgaatttgttcatattaaatcacgaagagacatgtaaatagagttacgtatgtggaaacactactttaattttgaatatttcataacagttgctaatagttatttctctacatataactattaaggtacaagtaattatcgatcggtgacaaaaaaatactgacaaatagtttcctacatatacaaattcacattttacattttttacttgctattaagttgcacgttagttggctcgcaacagatataactgttgcattacagcttcaacaacaatccacgatccatgcttcttgggattgaaacttttgtttgatg

SEQ ID NO: 145452 - DNA, 1094 bp, Cannabis sativa
cacaggagccatgagaggcttagcatggaactgtagagggttagggcagacctctacagttcgggaactgaagtccctgctctggttgcgctcacttgattttgtctttctgaccgagcttaaagtgaacgccaatcctctggtacgtactcttaagtcccttcacttttattttaatatttgtgttccatctattggaaatgcgggaggtattattttggcttggaaagaggggtttagttttgagtatatctctagctcgtgcaatcatatatcggggatagtgtattctgacccctcctcccatccgtggctattatcgtgtgtttatggtcccccctacctgcatgcgaagaaaaagttctggtctgaatttctgaacctgggagatagatttggggggccctggctgatcttgggtgatactaactttgttcttagtgcctctaaaagggaaggttcctcgggtcgggatccattcatcccgatcatatctaacctgttgaatgccagaggtctatttaatttgcctatccaaggggacaacctaacttgggataaccataggtctgggaggcatcatgtgaaatctacgttggataaaggtttagtgaatggcgcttggctcaatttatttccgagggccgtcctcggttcttcccagacctgcaactcagatcataggcctttatgcttaatgacggatggccaggtcgccaagtttaaaagaagcttcaaatttgaggaagggtggacccgtgatgatagaagcaatctggtagtgaacaatgcctggaattctgttagtcacaattgggcatctgctagaattttcaaaagggttggggctactagggtggcccttttaaactggagcagaacccaattcggaaagctggatgttgctataaaggagcttgagaataagcttaactctctgcagagcctgccggcggggtcccgtgactgggatcaagaacgtgttattcgccgcgagttgaatgagtcgctagaaagaaaggcgatctactggaaacaaagggccagaatttcttggctcaaagatggggataaatgctcaaagtttttcttcc

SEQ ID NO: 145453 - DNA, 577 bp, Cannabis sativa
  modified_base (498)..(509): a, c, t, g, unknown or other
gtcctccttttcaattatcattttgttcatggtaataaaatgataattcctaatagtaataatacccattttaagctttttttttaatttatgataaaaaaaagtgtttgatttggattaaaaatatattttttttaaaaaaaaaaaaaaaattaatgtagaaatcatttgtttagagaagttactagttagaatttgtaacttctcccaattttttttttttaaatttaactttgaaatgtaaataaatacctaagtttaatcttttacggtaataatacctaagttatatttctgaaacttctgtaggtactgcactggccattaagtgttaagtaaattgccacatgacaatccttaattggttcacgtcattaaaatctattattctttttttaaaaaattagtctaaatatattaataagaaaatgagacgtggatatataataatttgacatttaacggtcaggtttttatggagttctagaaatataactnnnnnnnnnnnnccgccaaaaattaaacttaagtatttatttacaactgaaagttaaacttaagtatttattccgcaaat

SEQ ID NO: 145454 - DNA, 710 bp, Cannabis sativa
gttggtagtgtaacaaacatataagcatgcatatacacttaacatatacatacactcgcatattgatatcacacattatatacagttcttacctccttcccatattcaagtgtgttggccgacctgaacgggaagtctcgtactggatggatgccctaatcacataatgaaaacgggtaaatcacatgttcaaaaccttaatctgagaaacttgaacctataactctaggctctactataatcactagggattacactaactcaggaaatagggaaacacccaactaaggcactgaaatagacgagaattaagaaaacgggacatttggggaaccctgccaaaaccggctaaccggtttatacctgtcctccccaaaaactcaccaatttgctcaaaacttgtccaattgcctccaaactttacagagtacctaaacaatgtatacacaacatattccaaccagaaattccctaaaaaacacactaaataaaattatgccatcaaagatcaaagcttaggtttcaaagcataaacttgtgaaaatccaacataaagcagtaaaaccagctaccagaaccttcaatcaacttaaattgaacataaaaactgaactccaagcatttctaaccctaactgccaccaacactaaaaatcactacttgaaaccaaattcaaagcttaaaaacacatagaacaaagaactaaggat

SEQ ID NO: 145455 - DNA, 1958 bp, Cannabis sativa
  modified_base (170)..(171): a, c, t, g, unknown or other
taataaacatattaaagcattagcgtgtaaaattcatgcaaacataaatcacttcaaatttcttatattgataactaatcagattgtaaagggttttatttaggtcacaaaacccaacaagaaattacagggaggtcaacatatgtttggtattgccagatccagttttnncagttgaatggagactggatgaggaggcagtaaggcatgtcccccaacccgaacctgctaaattggacaaatgcattctgaaggagttgccatctgacagtgaattagtaccagatgttgtcgtaaatccaagaggccatcataatcctaatgatgaattctacaacaagtttgtgcaagagtgcagtcctcaatcaggtaatattgtgcctaagataattgatatttcatcctcctcttcattagaatctgaggaagatgatgatgctgctaatgatgatggagatgatgatgatgttgatgatgatgatggagatgatgatgatgctggtgatgatgaagatgatgaccatgatgatggagatggagaagttgatgattgtggagatccacctgatgatcagaatatttctaaaatcatggactgggctgaggagactttagggcatttggatgatgatggaggcctaacaacatatccaataccattgcagcaaatccccccacaaagcccccctctgccagatgcagcaacatcagcccaggttagtgtatatatttggcatgttttggctctatattgttgatgttttggctttgttttgttggcatgtttctaatttttaatttgttttttgtttataggataatcatggttcaacaagttctccagaggtggagatcactggttataaagaggttgaagaatttctaggagctaaaagactttggcagaggatgaggttgagattcagtgcccaatcacaaccagattcccacactcaactagaaccccatactcaaccaaattcccacattgaaccagaaccccgcactcaaccagaacccaacatagaaccagaaaccattctcccaacaccccaaaccctatctgaaccccagccaaaactgaaacccaaccagaaccacaaccccaccttgaaccagaaactcatagccaatctcaaacccaccctgaaattgaagaatctccaaaagccaaaagagttaggcagaggaggaagcttaaggaaccccaatctcaattagaaaccccaccaagagccaaaagacttaggcaaaggaggaactacaaatccccccactttgaaacccaaccagaaccacaaccccaacctgaaccagatattataacccaacctgagtttgagtttccctcacaatcatcccagcctgaccctcaaacccaaccagaacctcaccctgaaccagaaacccaaccagaagctgattttgttttgcatgaggaggaatactgtggtgagccataagtagagaggcatggctacacacaacctgacaattgtgattggtggggaaggcacactgaattggttcctgatgtcctctgtgaagatgatggtgacattggtcaagaagatgaaatgggcagtgttcatagtgatgaagaaaatgaaggtggaggaccatataagttgccatacaatccagagataaatctggagaacttggagtggaaaccatacatggagtttgcaagcatagaagttctgaggaagacaatcaaggcatatttcatccatgaaaacaagaagtacattctacaggctaatgactccaagaagtttagggtgaaatgtagggctgaaggatatacttggatgctctatgcatatgtgaagcaagatgaaaaaacattcagggtaaacaaatgtcaacctaagcatgagaactgtggcattgttttggataatagacatattactacacaatggctagcagaacaattcagagacacattcaga

SEQ ID NO: 145456 - DNA, 517 bp, Cannabis sativa
cttatatataagactaagttatctcagacatttagacaaaataacttgagaccaccttcaagagacatccgatctaaataaccaatttgaccaaaattacatacaaaataaataaatagagaaaagtgaattatcactatacaaggataatgtattgaatttttaaattaagataaaacacaattattattttaacaagaaaaacttatctttgaaggtttttttattaaggttgtcaccattgtatcgaaactaattttttattaccaactattagagctaagtctttaaaggaatatactagtcaatataacttgcactatatataaaatttgagagattacaaattcaataaattataaaataccaattaagattaactattttgccaaaaaagataacaaaactaaattagcttacaagtaaaagataagaaaacaatgaaataaaataatagaaagaaaattcttctaaatttattaatataaaattaaaaaaacaaaatccaaatttattt

SEQ ID NO: 145457 - DNA, 561 bp, Cannabis sativa
aatgtcgcaatctcgtaccctaaaagtcttatttataatccttagaaatatttcacttaaaaaaaagataaaatctctctctctaagtttctctctcaaaaacatagttcaaaagtgataaaactcgtaccctaaaagtcttatttataatccttaaaaatattttacttaaaaaaaagaagataaaattcaaatttcgcccagaaatcacctccatgccgcggccatgaggtagcttgccgcgaccatgactcgctgctaaaaaatttatgtcacgtgattagtattttggccataattttttcaatacaacttaaaattgatgattcaagatgtttcgaaaagctaagaacaagatctacaacttttatgttgagctccaagtgtagtactacttacaatatcgtcaaaatttgaaattaagtacgtactaccttgtaaaatcgagctcgccaacgtctacttttttctaccaaaatgtgctaacatccctccaaatgattctaaatgtatgattagtctttaaaatatcctaacaaattataattccactaattaata

SEQ ID NO: 145458 - DNA, 865 bp, Cannabis sativa
tactctcaaagtctcctagctcttattaaaattaagtttaattacactattaattattttttttttcattttatacattaattattttgcaataagtattattttaaatagatatttttaatttttttctttttcaaatttaggtttgagttacttaagtatttttatgtgggttgctatgtaaattttgattgcaatttagattgttctattagtttctacgtgattttttaaaaaaaactgttttcacatgtaaaaataaaaaaaattccttttaaatattacattatctaattattttaaatattcttttttaatataattattaattaaaatttatatataattagtgtctaaaaaatccatattttcaaacacttttcatatttttaaataaaacgatttgcggcgaaacccccttatgttttattttttatacacttaatttcttcatttttttttgtggcaaaacccttttatgtttattttttttatttgcaaatttgacacaccacttaccgttaaatatcaactggatgaccactgtatacacttatgtatatgtaacaataaaatttcgaagtcgatacagtaataattcaattagtatttaacggtaatatccaactggaaccttaaatttgcaaagaaaagtaaacttaagaggattttgccacgaaaaaaaaaggttaagtgtataaaaattaagacataagagcatcttcaatggtagtattctttaaggatgttaaaaatctcaaaaatataatattttattttatttctcctccacatcatttttggtacttacttctaaaaacattccaatgtataacactcttcaaaaatactataattataatct

SEQ ID NO: 145459 - DNA, 554 bp, Cannabis sativa
actaatcagattgtaaagagttttatttaggtcataaaacccaacactttcttcttgacaaattatacttcgcattcaaaagctcctggaacttttcccaggtcattatagtaacgtcgtgtctcatgacaccatgtcccaccaaactaaagcatcttcttgaaattgaaaagtggcacagaccaccctatcatttccggtgacgaccatgaaattcaatatcctagtgatcacagttaaccactgctcggctttcatagcatctggacctcccaaaaaaatcagaggtgcttgcttacggaacctttcatacagaggttccatccaattcatcattacaaccaccagttcggccacgacagcaggggcaggtgccactggaattccgggaccaggcattgcaggagcaccctactgtctcaatccctggatttcattatcttgttcctcgattgtggcgtgaatttctgcaaacctcttttcccaattctgagcttcctgatttgcttgggcagcctgtggtgggttaacatcaccccgaccacgtgccctgc

SEQ ID NO: 145460 - DNA, 1492 bp, Cannabis sativa
  modified_base (653)..(655): a, c, t, g, unknown or other
aataaataaattaaatgataattttatttgataattaatattaattatcaaataaatagttttaacatttaaaggattgaaattttaaaatatggtatttgtgacagaaagtataaattactgaataaaatggtaaaattttaatttagtggggcccatcttatggccggccacttaaggataattttagccattttttatcaattttttaacgccatataatttagatctaaccctaggagaaatcctatgaaaggaataagatggttctcattctatccaacttaagtttacctagttttcatttcctatcagacaactagaaaacttgagaacctccttctatagaattcgaatctcctcctcttctcttcatatttttgagccctatagtgaaagagtacatgcccacccatagcaagccaagtactcaatgatagtgtgtaagactgtgaagaatccaacacataaagtagaattgggctcaaatcttgattataatctgcaataaaatggaacaagggttagagatctgagtgaacggagacattattccattgcaatcaatgtaaggtttcttaaatttatatgtgtttaaattccattattttagaaaatttatatctagtgtgttaatcaacatacatgttagnnnatctagatcctgataaaataatcctcaacaatttgcccctaagtccctatgcaaatgtctgtacggatagggacataccagccatgttggtactgtcaagactgccgtatcctttatagagtaaatgttgttgtgtttttagccttttgaaacatgtgtcgttcactttctgatctcgtttgttgtagaaaaaataaatgcttcaattgtctttttaatgtgtaggtgaagtaagtgaaaaaagggtcctgcatgaatgcatgacactatttcttgctttgtacattctttgattcctacgttagattgttgtcctttcactattttaatttgcatgataaccttaggattcataatgtgtgatttctagacgaaaaagatctgaatttgaccttccttgtgattcttggcactttgagtcacgaaaaacacgaagaacataaagaacatgaagaacatgaagaatatgtttgagttcttaaaaaaacacaagttttgatccgtgcaggtcctgctcagccaagaagggcttatgtaagacctgaccagccaaggagggctattagagggtctggctggcaaagggggtgtaccccataggctggctggctggcctattctttgaacaagggttcctggccggccactaggctgggtcatggggtctggctggccactaaggcctggaaccctggccaaccattcactttcttttttgtcaactccacgggttgttagaaagtgtagagggtactctaccaaaaatctttaaagccaatctttcttagacagaataatctcagtttgtaccacttttaccattacacaattgggttt

SEQ ID NO: 145461 - DNA, 1058 bp, Cannabis sativa
  modified_base (610)..(623): a, c, t, g, unknown or other
ttataatttttaattttttgtcttaatattaaaaatatattttattcttatttgatatgtgtatattttttaagaatatgagaagaaataaaataataataattataataataataaaaattagtataaattaaatatatgttttatataaaataaaaattatttaaataggctacctttatatataagttttggggatgtaaataaaatttaaatttttgaatttttgaaagagaattttttatttatacttttatatataattgattttttattcatttataaaaataaatacaacataatctcaaaattaaaacagcataaccttaaaatagaaataatttctataaaataaaaataacataattttaaaatagaaataacttttataaaaataaaaaatatatagaaaacataaaaatagaaaaatagaaaatacagtatacatatttatgtacatgtcacccatgctaatttttttcttaataaacttagcaactttattaatagaacgcacttcgttggaacaattctccaattgaagcacacaacttggagagaaacaagaatcctgactaaaacatgagccagcttgtttgcagatcgtttnnnnnnnnnnnnnncaacattatttaaagataagagaagagtacgcacatcatgaattaaaagaccaaaagaggatgacaaagtaatttggtcttgcacgacttgaacacaaattaaactatcagttttcaaagtcaattgtccccacaaatgacggtcaatcctgcttaaagcttcttttatgccaacaaattcatctatttcaggttgcactttccatttcggcataaaaatccctgccattttctccgctgcctccattcgctgataactactcgacgccatggacacccgaacgaatccagaacccagaacctagaaccagtaagaaccagtaactaacgccagaataccaataaaccaaaccaatgagagaaactatagaaccatgtcaaaatacaagactaatgggaaaacctaattagtttcaacacatgaaactaaaaatt

SEQ ID NO: 145462 - DNA, 524 bp, Cannabis sativa
aaaagttatcaattagatcatctattttgttaaatgacaaaataaatactattttttaaaatggtaaaaataggactatgagtttaattttcaacaattttaccttttaatataattaacttcaagacaatttctaacacgaacagatacagaaaatgtaatcaattttgtcataacatctctagattggattattattaaaagttttatttaaatttaaaaaatcagtttagtcatatttgtacaattttgaaaaattcatagtctattttatcatttaacaaaacagagggtattagtaataacttttttcaaaatattatagagtccaaaatggtatttactcttttctttttgtttctttatttgcttttcatatctaaatttttttgttttaatttttttttttttttgggtacgatgatgtgaggagtttttttttcctcttatttatttttaggttacgtgaccgcgccttgtgcagtcgttataataattgatttaaaataaaatagtttaattat

SEQ ID NO: 145463 - DNA, 892 bp, Cannabis sativa
  modified_base (860)..(867): a, c, t, g, unknown or other
atttgttttagtgttattttacagttgttttgtcatgatttatttatttgacgtcgatttcactgttcttgctccatctccccagaattaatggttattttctaaatgtactcgtgttgctatggtagttctgtccgtgggtgtgaaagatagaggttataaatacatttcttcttccttctttatggttgtttttgtagtttttttattctgattctcttataaatacatttaacgagcccaccaataaaagaattttaaggtatgtggttcttttatatttttctaaatggttatatctgcttcattattttacatttatttttgtgctattttagtattgttattctgatttttcaagattggacttgcaaatatagccactattgcatctggtgttgagactgtgcagaagattgttagtttttttttaatccttttttctttttattttttttgatttattttagtattattttacagttatttttctatgattatttatttaacgccgattttactgtttttgtttaattttgctggaattaatggttgtttttcaagtgttttcgtattgctgtggtagttctatgtatggttgtggaagatagagacattgttcttgatattcggtatctactgtataaaagaaaaaaaaaatttaaggcagtataaaagtaatttttgtcgttggtgcctaaaatctaatatttttgttaatttcccattaatattgagctcttttaatagaggtttcgggatttgaacctagacttccaagttattattccaatggaattactaacttaagtaacaaatgtaatacagtagaacttctatttaagaatactctattcaannnnnnnntctaatttgttataaaaaaatcaag

SEQ ID NO: 145464 - DNA, 523 bp, Cannabis sativa
gttgttacttttacttctcacatatttcgtccattcaccgtaaagaagagttgggattctttaaacatattccttgttctttttgccattctttgcggaattttcgctaggaaaaacgacgatgattcaagtggtgttactgctactactaccgaaaacgatgtcgttttgactcctccgactccgaatgtttcggaccacgttaggaatgcgaggattggtcctccaattagtgtatcggaatccgtttcccaagaatggtttggattttctgatcggaatgataacaaaaatagtattaataatatctatgacgatcaaattaatcggacgccgccgcctggttctgccacacttcggttgaggaggagtagtagctcgtatccagatctgaggcaagaatcggtttgggatgataacagagacgatcagaagtttcagttccgattctttgatgatttcgatatcaagaagtaccgccaaacggtgtcgtttgatcatcgacatcgatcaaggcaacgaa

SEQ ID NO: 145465 - DNA, 1001 bp, Cannabis sativa
gtgaattgaggccctaaatcacatcgttcataacactagtacgtgacacgctaaaccacatccagggacctaggttttaaaacaaaagtttcctactgaaagttaacatggaaatactcgaaactaaccaagaattattacccaaccaaaactcctctgaaaaaattaacacgaatcgacaacacaaattttttggaaacctagctgctgatccggttaaccagttttacagggcctgtaaaaccagttaaccagtttacaccaggtaaccccaaaaatttgaaatctttcccaattcatttccaaatcaaaccaaaccttctacacttgcttaagttaccccaataaacatattctaagcaatagaacaacataacatgctcaaaatcaaaatccaccattaaagagcaaatcttgagttctaaaactcaaagctttctcaaacattaaaatagcccttaaatctatctcaaaacaacctgaataatcttaatttaactacagaaaacaaaattaaacaccaacaacactaacgacaactaatcaaagagaagtcgtgaatatcaaacttaaattctaagaactcaaaatgaacaagcttagaatcattaccttgacttgaaaccactacaaccctattattattccttagattgagcagcaaaaacaatcaaaccctagttggttctatggggttcgaaagagagagagagcttggagagaaagagagagaaaatccttttgtcttaattttttattttttaaataaaatgaaataaaaaataatttattcacttgactacaacaacaaaaatcagattattaatcaactaaaaaatcccactaaaggacaaaatcccattaggcaaaaagaccataatgccctcgcatcactaaaagtcatacaaatcacttaaggatattttggtcaattctaaaatcccgactattcctgatattcccaatgtgtaactatgttgccccgctatactaaaaatact

SEQ ID NO: 145466 - DNA, 841 bp, Cannabis sativa
  modified_base (215)..(215): a, c, t, g, unknown or other
atgccccccagtatcgcggataactttccatcctcggttacccgcgagactttggtcgctttcgtcatgaatttactaatgtacgctcggagtggctcacttggtcgttgctttacttcgaccaaatctcccaaatgcaatgggagctgacgtgaggaagagaattgcgcatggaattctgaagaaaagattttccatgaactaaactttccagnagccaacttgaaataccattgctatgtggcttttgacagagtggcggggaagattctgcagcatacgtccccccgtactccttgtaaatccatttgcatctcaaagtacttgagatgggaaagaggatattctcttccagtatacatcttccatgttggcattttgaacttgtgaggcagtggcaggagattgatctctggtgagaagggagttccgcgagcgcggtctactcaagatcatttttacgctgtccggccatgccatgaaacatatttttcaactcgtcaagctggacctgtacggctgggctgacctgctcggcattttggtcaacttggattacgtcagcatctttctgagcggggatttgagtatgggttctgggttgcacgatcattgtagtattctgctcgtctgttcccctacttctatttagatcgttccttaggtcatgggttgtttccaacctatcgaacatagaagagcctggttgccttagcgattgattcgcttggttgacaggcggaataacactattattctggttggatccatcaggtatggctcctcctgatgaattcccgaacaaggtctgcccgcctacctcttggcccacgagcggaac

SEQ ID NO: 145467 - DNA, 943 bp, Cannabis sativa
aaataccttgaaaactcatcttaacacatagcaacataatccatacaacaactagcaatctcacacttaaaatcatcaaaatcaaccccaattcacaaaacatgcaagctcaagaataacatcacttaatccatatttttccaacataattcagcttgaataaaatagatcaaagttgaagaaactacctcaaaatcacaccaaaggcaaaaataatgatttccccaaaaccaagcttcactttaatccaatctcaagcaatttcaccaacaaatttcaagagaaatcaaagagggctagagagaggaaaggggttgggtgagagagggataaacactagaaatttttaattcatttcccttaaaattcattttattaaacataaatcaaaggtccaaaaagaccattttgcccctagggttaataaagcttgcatacacacacaagggcatttaagtcatttcatgctcatttaaactctaataaatttcagattattctcactaataattaaaatgccaattacatttcaggccctgttgcccctgattttgtccaaaatacgtggaccaaccggattgagacacgtagactaaagaggtttaactttgggataattcagctaagtctctttaatcagagggatcagcatttagcatgcctcccgaagatggcatgtgggtttcacatactcccggagagcaaagctacgacaaagcatctccaggaggggtcaaatcctatctgaacagtcacctcgcaattaatgcctcatgggagaaggcgtcttgaaactgccatatgtcttaaagtctgacggcgtaacacgtcttctgcagctactacgctatgattaataagcctagtgacggctactttatgagaaatcacatcaatcaaggaaggataaaggactacgtccattaaaaccctaaaaagccta

SEQ ID NO: 145468 - DNA, 532 bp, Cannabis sativa
ttgtaactgctaggccaagggacaactcaaagccaacaaattagttagttaaaaacctgagaagacagattgcaataaaaaaataaatggcagtggctttcatgctcaagctcacacactggccaattaaagttttcaacaaagatattaaatttgggaagatggtctcgggttagcaagtgagtattcaacgcttgtcaaagaattaatctatgctttgggacacttaaacggcaccacacattcttttggtactcaactttttattgctgcactaagttattatagagttttgcagctctaaatttcccaaacacaccagcaacagcaatatcccccctacaaaaggttgtcgaagtctacaaagcttcctccaataccagcttgtgtcttgtcttagagtataactaaaaaatcagtgtcctttaagtaaatagaattgacccattttacccataacaagtcatgcttctccattaacgcccatatatatatttagccaaaactgattccttccattgagctccatctc

SEQ ID NO: 145469 - DNA, 532 bp, Cannabis sativa
tttttatgcaaaagataaaagtgatataaaggagaaagcttccaaacctgtcttgccctgaaacaatctagtagtgaatgagttacagtttcaacaggacaactacaaaaggagcaagaaggagagggaactatttttttaagaaaaagattataagctgtaggaagaatatgataaaaggtcctccacccaaagtttttcattttgggaggaatacagagattccaaaatttcttccaccagttattgtaaaaagttatattagaagatgagggtggcaaagacactgtattaaccagatgataagcagacttaacagtacgaagaccataagggtctcctttccaaatcaggctgtcatttttattatgtccccctatagggacttgaaggatgttggcaacagtggcactatcaaagtaggtgaaaagtttatgtttgttccagtgcccattagaattgatgaagaattgaactctatcagagggaggaagttgattattattgtacctaaggaccctttgattaggaa

SEQ ID NO: 145470 - DNA, 598 bp, Cannabis sativa
cttccataagttgaactagtgcaatcctctccactaatgtagcttagctttacaacttagatcaaaaggacttgattaggcttgaaatgtgaggtttaggttccggttttgtaaaggatgacatttcttaggctcatgacctaattacctcaatttatcaaggactttttttttctcaagcgctcacctaaaatttcattctcaacccacaatgttcattcaatctagttcccactctcttgctatatgtatgtactatatatacatatgtattttttttttttcaaatcaactagaaaaagagaggaaaaaaaacaacctttttctttggttaggggagggtacaccccaaacttagccttaaacttgcccctttcttttttcctctcttattctatttaatactatgattgtacatatatgtatatatatttattttttttcttttctgtttttttttttcgtttttttacatatctatgtatagcaagagaaggaatatagtgttatgtgaatcaaaactctcaccaccccaactcacatcccatcatcatctctaatgtgaacctgtttcaccacattttgtaaagttgtatcc

SEQ ID NO: 145471 - DNA, 718 bp, Cannabis sativa
ggtaatctaatccacaacggcactgatttaaccagttttaaaccatataaatcatctgaccacggtctgattataaccggctttctatcaaattgaacaactccctcttctaggacatgatcccttgtagcttcatcatcaaatttaacaatagtgaatccagcgttcattctgactatctgtgctatccccaatttaccctaaattctacgaataaatccttcaaacaccataaacggagggttagctccgagaaccatacatatcactgatgaactccagaattcagattgtatttttacctcattgacatctatcatagctatctttttaccatcttgaacagtcggtttcaggtaagtaagtttagcatcttggtaggagatcttacctgaagtaaaatgcttccattgctgctgtgaattcgtctgaaaatcctcctgctcaacatcctcagcccaagtcttctggccactgcctatcactccagttccctccttcgaaatcccctgcttcactgaactacattcaaaatcaactattcccccaatcgacttcccctcaatctgcggactacagatctcatcaacctgtaggtcaggttcgttctccaagcaatctgtaaaatgatcgctttgattctcgccaatctctccttcttggattgaagggggatctactgactgagccctagaagctggctttcgtccaacccgct

SEQ ID NO: 145472 - DNA, 768 bp, Cannabis sativa
tcctagaaaagagccaatgggctcacggaggcctcccaactcgcgatctacgcagaccactcgtttcagaaggacctaacctgaaggtggcaaaaatacacagtccacacgttcaaggaggactcaccatgaaaatggccagaacccagaagtagaggatgaagaacccaatctttggggtgcgcaacctatggaatatgataatgatggtgcttatgatcccacaagatacgtgccaattgttgagttggaaaattttcgtctcagacgtcgcttggaggaggcaaaccaataaaatgctgagttggaacgtgagacagtcgcgaccagggcagcacaggagaacaacacacaaaaccaacctgatcctagagtgagaagaccacgaggcagacttgtggctcatgaaccaagaggcaggagacagctcaagagaatcctcagaatgcctaggaagaacaacttggggaaactgagggtccccctgagaatgaacaaccaaatgaccaactaaagccttcccacagaaatgagaacagaaggcaaccagggaccagggaataagaaatcccccgtgagaacaagggaaatcctgggactcaacctgggataggtgggtcaccacagaggcatcgccaacgtccttctcgaaccaactgacaaagggcatgtacaaaccccaatagggggcatgcgacgacccatacccaagggagaaggacgggacatgacgaagcgagtgttagctcgggatgcacgagaacccat

SEQ ID NO: 145473 - DNA, 612 bp, Cannabis sativa
  modified_base (275)..(281): a, c, t, g, unknown or other
agaatatacctttaggaatgaacttcaaagtgtgaagatgactcctagtcagagtatcacttcacacttgctcataatgaacatgaaattccaaaaagcagctatgttgggagttgttttatctggagagcaaagagttcattttgttctcaacagcttctcatctgagtttaaccaattcgttgttaacaataggaactcgtccaacatatataagttagacgctgaattgcgtgcttatgaacggacattgtcacttgcatggggatccttcnnnnnnnatgcagacaagggcaaaaggaaagctgaagatattgagaataattcctcagacaatcctactacttcaggcttagttgagaagaataaagaaagtgattccacttcctcagattatccttcacaacatattgaaccaacaataagaacaatccaagaacatttaagtagtgattccaatgctttagtttttgaatcatgtgttttagagaatgaaaagtccatctggattgttatattctggatctactaaccatgtctgttgttcattgcaattgcttgaaaactggaattatttaaaatctggagagttgaaacttaaagttggtaatg

SEQ ID NO: 145474 - DNA, 783 bp, Cannabis sativa
  modified_base (426)..(447): a, c, t, g, unknown or other
  modified_base (497)..(505): a, c, t, g, unknown or other
  modified_base (750)..(758): a, c, t, g, unknown or other
taacttttaaattttgttattgtatttaaattaaattgtaaaattagaaaaatgatatttatttatcattttatttttattgaatatttaatattattttaataacatgaattttgaaaagttgttagcattttttttaaaatgggtatttaggttagttgaaacctaatttttcaaatttataggtttaattttaaaattatttttttaatttaaatttaattttttttattccgaaaaaatttatttatttatttatttatttttttcaaaattgataaattaattaattaatgtaaaattaaataaatcctattatcaacgattcaactagttacatctttgtgtgttttatatattgtttaattattaaacatttttttttataaaaccaattattgtttgatctaaattgccatggttaannnnnnnnnnnnnnnnnnnnnntaattttaaccaatggttcaattggcaataggtcaaataaataatttgtnnnnnnnnnattttgcaatcttctttcatctgtttataaacctagtaacatgataggatccatccaagcctttgtgagcttatatgtttgctttgggcttagatgcatataggtagtccatttaatttttgtaattaaaatggactaggttgctaaataaaatgattacttttgatagattttattaaagcccaattagtatttgagcctattcaattaataacagttgatttaaggttaaattcctctccttnnnnnnnnntgtgagagttagggggccatagaag

SEQ ID NO: 145475 - DNA, 507 bp, Cannabis sativa
ctccaactccctgcaagtatctaaaggtaacagaaaaacactcattgcataactaggaattgattgtgcaacagatttcaacaacacctccttccccgcacaagacaatatccttcctcccatccttgaattttcttttttattttttctttaagaaaaacaaggatagcatttttattctttctcaccgaatatggaagtcccaaatatgacccattctcatcagcctaataaatatctaacagctcgcaaatgatatccctttgagaggtactagtattgtgactgtagaacactgacgactttgaaaaattgatctttaccagaagcaatctcatacgtatgcaataattctttaacattatgagcttcctcctctgttgctttatagtagatgtaactatcgtcatcaaacaacatatgtgaaataacaggagctcttctagcaactttacaacctgtaattaatccactctgctcataactacgcaacaaattagagaaacc

SEQ ID NO: 145476 - DNA, 520 bp, Cannabis sativa
gccctttttttattatttttttttttcacaaaatcacatctttttaaatattttgaaatagaaaattatgcttctaatttcaaagttgttactttgtttataatatacacctcaaaatatatattacaaattatatcactcaatcagtataaagcaaattagaatatcaaaagattaaaaaaattagatcgaacccacgtgaagcgaagcttagttctctagtattagtatatagtattgctatttggcaccaatagtgcctaaattcacatagaagtagtggcttgtgattagttaacgatattttataaaaataggttatattaagttatatagaatctgatattaaattgtaccaataacgatatgacacattagagcatctctaatggggggttgcccattggagaggtcttcccacatatgtaattgttggaatatgttttaccaggatctaaatttactaccatgtatgttatttaacaccctaaatattaatttctaaaacaatgtaaataaa

SEQ ID NO: 145477 - DNA, 672 bp, Cannabis sativa
aggaggacacgtgtcaaactgggagaatatgaatcaacaaatataatgataattatattagaagatattaaaatgaaatgactcattaatgctggactggtagagtatatctatgactcgtcgagtgtaaagtcttaattgagacacagatgtgcaaactatgaattcgtgtattgacgagaaaaccattttgtaaggacgacatcagtagtaccaagcgaggcacaaacctcgctacgtatgaagagatgtaaataagacatgttgactgttaaaacacttagcgtataatatagattatacaaactaagcatcacagttgaataaacttgaacaatgaatagcgaggcatccatctcgctataggaaggcctactcgtggtactttcactaatcagcttcaaacatctttcaatgagattcactgctctgttgagtcagctctctcagatggaagctgacattcaaatgatgttgagtgctgaagttcatcttgtcaccaagaactgcgattgtcagatggagtgttatgtcttcaatcacagaaacgacgtgatttacattatcaacctcagaaagacatgggaaaagctctagctcgctaccagggttattgttgctatgttctcagcaagatgtcccagtgcgatacgctttgcagcgtatttaatc

SEQ ID NO: 145478 - DNA, 529 bp, Cannabis sativa
  modified_base (76)..(77): a, c, t, g, unknown or other
aatttatattttattatgaattattgtacttattagatttttttttatgaaccagaaagttgtattgctcaaaaanngattttattataaagaaaacaaatttaagaaatacataaagtatcatttttagaaaataaattttgaaaagagtcatcaacaagcttattaaaataaataatttttgaaaataacatattaaaaaaatatctttaaaagaatataaaaaaatataaaaataaaatactaattatgtaatttaagtgtactaaaaaactaaaataaaataactattaaatttaatttaaaaaaaaaataaaaaaagaagaagaagaagaagaagaataagacaatagtgtaaagacaaaaaatatgtaaaaatactataagctaggttccactattactatcatgtttccttaactttattaccattagatgaataatcaagggctagaaaagtatccctaccatagggacaaaaccaaggtatttaccatagacatttccaatatatatatttatatatata

SEQ ID NO: 145479 - DNA, 641 bp, Cannabis sativa
  modified_base (58)..(58): a, c, t, g, unknown or other
ttatcatctatcaatctacattggccaaaaggggttcccttcatccttgcaataatcnattgaagagaaagcaaaagtttcagccttccaaaattggccaaaaggccagggttcccttatcctttcaattaatccttcatgttttttaaatttttgaacgattgaagtgaatattccactccctctatacgtcacacgacctgaaaagtgagctgaagtgggaataataagttttggagccatctgtaaaagataaacaatacaacaaaaaaaaaaacgtaagagaaaacatgataaaaaacactaaatcctatcgagaacccatcaataatcagtaaacactcaccaaacatgaattaatactttcgataacctatcgagaatcatatcaaaccgattataaattaagaaaattcatcaaaataaagtgcatttcaacactaataatatataatctctctaaattaaccacaaaaaaaattaaaaacaaactctttttaacaatatcttgtcgataaataatcgagaacatacatgaccaccaccaccacactagatcaaaaaacactataaccactaaatcctatcgagaacctgtcgagaacccatcgataattagtatacactcatcaattatgaca

SEQ ID NO: 145480 - DNA, 1039 bp, Cannabis sativa
attagatttggccattttcttaatctttttaaaaagtggacatttactaacttagttactaaatttagggccattttgcatctcaaccctttttttttaagggggatctaagctattttcaaaacaatagtttgttagttttatgtgtataatgatatataatcaaataattattaataaactatgtgacttattttattttattatgataaagtaaaataaatgtatatatttatattttttttatgaaagtaacgtaaaattatcttaaaatcataatataatataaagctgaacatatagttttaaaaataactactcaaaatattgaaggttacatatatgagagatttttattttaaaatagatcattttatacaaagtaattaattgatatcttatcgacatcataactaattacatcactactcattaattttgaaaataaacttaaaagttatttaaatgtatatgaaagaataaaatattctaatatcacctaaaaacaactacctcattattaaaatgtatacagataagtaacaatttttattaattaacaaataaatatttttaaaattcaaaatacctatataatatacgagtgacaaaatatatattacattgttttatttgaatattactataaagtatactaaataaaattatttcatatatataattacttgttatattatctgaagtatactaataggtttattgacgtatatcattatgtttagttatagtttattttgtagtgaaaaaaaactgttgttccaacaaatataaactagtagatttaatttattgacatatataatggtaggctatatgaaatgaaatgaatccaatatacaaaaagaaaataaaaatttgtttcaatatgcgaatatatactaataaatttattagcatgtacaatagtataggttatacgaaaaggttactatgtaaacaaagaataaaaatttgtttcaatatgccaatcagtttattttgcatgtatgagtataggcatagtatagtcatatatgtc

SEQ ID NO: 145481 - DNA, 1176 bp, Cannabis sativa
  modified_base (313)..(317): a, c, t, g, unknown or other
tagtgacattgcaaaaaagtgtgacattgcaaaaaagtatgacattgcaaaaaagtaaagagcaaaaaagtaaagagagaaagggaaaaaagggtaaaaccgaaaaggtgaggtgtactctaagccctaaagtggtcattacatgaaatgaggatgatgccgaaaacctctctcttaattccttatagctctcttaattattattattatattggttgccgaaaatctcggtcaacagtgttaaacagcaattgaaatattattttaagtatcacgtacacctaattctttattattattaatattattattnnnnntattattattattatatcttaatgttttttttaaaaaaaattaaaaccgtacacattagagttattatttttgtattattatattattattaatataatattttttaaaaaaataaaagcaaaaaacattaaggttttatattttattattattactataatttgagttttatggagttatttttgtattttttatagagttaaaattaaaaaagtgagaattaaggagaaaagagaaaaataattttagagtaattttatatgaattaaaaattaaaaaaaataagaaaattaaaaagagaaaagaaaaatagctttaaagaaattttagaatattatgttaccgctttatgtctctgctttatatatataaatataaatttatatatattaattaataatttatgtatttataaacgaaatttacgattaattatatttgatttaagttttaagttttaattataatttataattaattcccaacatattacaattggtaggtaagggttttacctgccaattaaaaaatcacaaattttttaccagttcagaattacgccaacaaaagtcattttactcgccaatggacgaatttagccatctattaacactagtgtttaaatttattccggcgcataaactcgcctatataacccaattttccagtgcatttggttattgtgctggtaaaaaccattttagtgaccgagtattgcgggcaaggttttaccggcacattatgcctagttttgtcgacgcaaattgattaagacttaaatttgtacattttaagtctttaattgtagatataaaattaatttaattaattattttcatgttttgaattattaaatta

SEQ ID NO: 145482 - DNA, 543 bp, Cannabis sativa
aattatgtaatattctatatatggtcagatttctatatttattacctgatttgaatttcagaattaattgtcaaaataatctcacaattaatgtggtgtagatactcatggagtatctcacctataaatataaggtctcggtcgccgagctcctcacctatttttgtgcgaatgggtgaggacacacatacttcgcccaccacacgcacgtgtgcatcgaccaattcgagccggttggtgtgacactatattattcaatccattcgtctatatattgcgatggaccggcaaatttcgactgcttgtacactcttggggagtgccgcgaacgtcttaaagagagcgacttagtccgtgactcaaccaagaatttttcattcggtaatatcgttcctcttttattttgctagcagtttattcaataattttaagaccctcttataagaatattttaattatggaaattaattttctatttaagaaaatagttttctatttaaggaaataaaataaataattgattttctgataaatgaatatttt

SEQ ID NO: 145483 - DNA, 670 bp, Cannabis sativa
ttaaaaattctccttgaactattgggattgttaaatatttattcatttgtaacttaataagataacgttaaactagattacataataaatgaagtttccaaaaaatagataaaaaaaaaaaaaagattacataataaatggagattctttaattaagataattaaaaaatattaattaatacaattttttttaatttaatatatatataaaaatagctaattaggaatttttacctccgaactttgacatataccaaatcataccccttcaactttttttgccattaaaaattccccttgaactattgggattgttaaatttaaggacttttgtctaatttcattcaattcttcttgaactattgagattgttaaatatttcaaaagatggtagtggaacaatgtgagcataaaaaaataagttaaaaatgtaagaaaccaattgttaggtgattaatgtaattaaaatatataatatgtattacaatgaagtttttcctcaaaaaaagccctcatgtatgttttttctttttggactatttacaaaattatggaaaaaaataaaaattttaatatatatatagcttgtaaatttaaggctaattagtaattttaccctctgaactttgacatgtagtaaatcgtgctccttgaacttttttggccgtta

SEQ ID NO: 145484 - DNA, 505 bp, Cannabis sativa
  modified_base (440)..(466): a, c, t, g, unknown or other
tctcaatcttttatctttatttgttcatatatggagtttcttatcatattttggtcaatagcaagttatcaataataatagcataagcaacaaataagggataaatctaattattccttaaataaaattttaactcttgtctaatgttagcttaaaaatccaacatgcataactgtttatacttatcaacaataatagctagaatagacaaacatattaaacttgatattcccaacaaaattgagatgttcatcttctctatatgattaaaatctaagattttcaaatgcaatgtcttatattgcctcataatgttagaactcctgaaataaccttaaatgtaaatccttatacaaccacaacattaatgaggctattcagaataaaacaatatgatccattgaaactcatgttaggaatattttaccaagatctagatnnnnnnnnnnnnnnnnnnnnnnnnnnncctaaatatgaattctctaaataatgaaattaaacacat

SEQ ID NO: 145485 - DNA, 1304 bp, Cannabis sativa
tttagtttttggattctaattaatcattttttattttaatttaatcaaatatgaatattaaatattcattatattattttgattttaaactatttttgttttatttttaatatttaaattgatttacaaataaaaaataaaaattaaatgatttggactaatcacatagtgacacgtggacactaacctgtcacataacaattgggtacttacggaagttccagaagtgtaacggaaggtataccgccaaaaatacgacttaaaatacgacttaggtatttatgacttaggtatttatctcttaggtatttatctattactcggtataaaactactcggtataaaactactcggtataaaacttaggtataaaacttaggtatttatgccgcaaattactctacataatatgtattgtttgcctattgaggataaatatacaatttttttaagatattttggaaacaatttaaattttgatattttaaataaattaataacaatatgtcgccaaagtgacctcttttgtgtacattaatttattttaaatatcaagatacttctgtgattgtaattgatgcatatattggctgacacaaaggtaagtgaatattttgctagatttcaaacacatttattgcaataaatatgtgacatttataaggtattttgtgtgagcaatatgttagtcctttaatctattgtttggcacaaattttattatcaatgttttatttctatacttagagtaccgtttacaattaatattacggtcaaaaggcttgacattaatgtgtgtttggtatcttgagatgagattaactaatttttgaatttattgtttaattatgcatattaatgtgagcttgttttatttgttctatattcagctagttcatcttctcttgcctcaatatttgctaatattaattctattcctatgcttaatgggaccaattttaaggattagaaaagatacttacttatagttctgggatgtatgaatttagaccatgcactaaggaatgaacaacctgcacctctcactaaggaaagttcctatgatgattaaagggaatttgagaggtgggatcgttcaaatcgcacgagtctaatgattatgaaacacagcattttaaaagccttttggggcacaaaatctaaaggggttactatggccaagaacttccttgaacaagttgagaaacgttttgctaaaaacgataaggttgaaatgacaatacttcttggttctttaatgaacatgaagtataagggtcaaggaaatgtaagggagtacatta

SEQ ID NO: 145486 - DNA, 541 bp, Cannabis sativa
  modified_base (67)..(72): a, c, t, g, unknown or other
gtctacctattagtaacctgctattacaggttaaagaaaaatataaccatatggttacaataaaaannnnnncattgaatagtcacccatatatatctatacttttgaaagatttaatatatattaatagattgtgttaactatgtctggtgtgaaatagtattgtatacatttattaaaaaaataataaaaaaaatatgtataatttcagttatatcgtagggctatttacaaaataatagaaaaaaaaatataaagtttacataaatatgacattaaatttgtcactaaatataatatttttttaaccaaactaaatatatgggtatataaatagaaaatgccataaaaatcattagaaacaaatcaatttcctttcatagtctacacttggtaataactaggagtgttcgtagtgcagatggtgcggttttttattatttttttaaaacaaccaacacatgcagttttttcaatttttcatactgcacctgcactgcgaaactaaaaaattgcggaaacagtcaaataataccccaag

SEQ ID NO: 145487 - DNA, 590 bp, Cannabis sativa
ttttcttgtttttgcgatatttagcatattgccatgttatccatcgatagaaaaacttttagtttcaattttaagtccccaaaaagcgatttagcgtgtcacttatcagctttacgaataacgttatttaggggcctataaattgtcgagcaacagttccactcaggttgaccggtacacctaaattcgaaaacaaggtaagaattgtataatgatatgcatatgtgtttacatgtttagcgtgcatatttatggagcctgctatattgatagtggtatcgacgctatcacattggtacgactagacaatgcctagagtaccgagtaaggttgatattatggtcaatagtattgtcgcatgaatgttttggactctataccgtgttggacacatggatagagttatagttgggtgtatgggcgcctaattataatctggattatatttatgttcatgattatgtttttcttactggggcagtcgacttattatttgcatgtgtaggtatgggcaaggctaaggttgagcaaccgtgagagcgagcggatgaagattgtatatgtcagggcaattaggcttggagcgtacg

SEQ ID NO: 145488 - DNA, 650 bp, Cannabis sativa
  modified_base (219)..(226): a, c, t, g, unknown or other
aaatatgtaattattttggtaacgaagtaagattatgatcttacttagggtaattagtaaagatttattgaatgattgtaccaagcgtaatttattaattacggaggttatattgagatatgtgggtattgaggatactattattgaaataaaaatattttatcgggcccgacgattgtggaatttagcaatgaggtcagaaatgtcacgacattaatnnnnnnnntattttgaggatattccggactaggttagaatttttagaatgtcggtttaatggattagtaaaattaccaaaatgcccctaagttattttaaaagtttagaggggtagattagtcttttggtaattacgaatttcgccttttgacttttttttagggctgattattatttttttttttaaaaaaaagtaaagaagggaaaaggaaactatttaatgggataacttacaaagcaagtaataaaaccaagcttctccttctttccttccttcgagcaagctagaaccagccagctttggggaaattttcttcaactattcttccttatttcaagctgaatctaaccccaagtcaacctagaatcttgaggtaagtttcctccttatgttcttggtgatttcctaggtttttaagctaggttttgtt

SEQ ID NO: 145489 - DNA, 1377 bp, Cannabis sativa
  modified_base (805)..(805): a, c, t, g, unknown or other
catcaatataacaagtatatatatatttgtgactctcacgtatccattaagcataaccatatagtattaacatttatacatttccacctactatgcgttatgagaaaaatcacaacaccttacagtcaacaactttatcgttgcactaaatgaatatctaatcaatacataaccacacattttcagggcttcataaagcattctaatcttacatccctataaacacatattcttacatcccatgagtcactgaagctcggcaaggaaagtgactaatttcataagtaatataacattcattgatccaatcacactataataaaaatatattcaattacaacttatcatataatatcacgcttaatccatttcacaacatcgtaaccacacaatcctggttattcataaagtacccttaccactcgttaaccacgagctacacacgtcactatcgttgcccgatacagcaaacgataagtaagaaatctatctttggtttcaggaataattactcataacggtaatgaccgcttccaatcctcaccactcgttatccatgagttgcgtatgtcactattgttgcccgataaagcgaacgataagtaagaaacctaatcgcggttccaacgagtaattactcataacggtaatgagcgtttctaaccttaacactcgttatccaatacatatcattaacctcaatttagattaagtcacaataaacacatacagagatctttatcataatcgagacgataacaatcataacattaccatatacggtgcttaatacttttcttacctnaagtccaaagtcaagtatgtgggccgacctaagtggaatgatgctcgacaatctcgggtcctatatcatgacaaaggtaaatcaataagggtctattccaaaacactgtctaaaaccagcataaataacttagggttttctaccaaatcttatggtgaaaacaccctagaataaaatacatcttttggctctaatctatgtctcatacttcagagctcttcataagcttcgaaacggtatatagaatgtctaaaacggacacccaagtgaaaagttatggctaaaatacgaaaatcatcgattcttgaaaattgaccatccagaatttcggttggtgcagccttttaccatccggaattccagtttactacagtagaaactcgaaaatttcagatctttaaagtcccaaaacttgctccaaacctaatcaattgttcccaaacttcacagaacagtagaataaccctaatacaacatatcccaagcttcaaaacacaacaattcaatcattgaatcaaaatcatatgttcaaatgaatgaaactcaacttttagcttcaactagcacaaatc

SEQ ID NO: 145490 - DNA, 790 bp, Cannabis sativa
  modified_base (328)..(328): a, c, t, g, unknown or other
  modified_base (659)..(659): a, c, t, g, unknown or other
tcgtgtacttcagttgaaggactgttcctctgaagtgcgttctattattttgaacgaatttattaattaatagatcttataatttttatgcaaaaaaaacaaacaatgaaacaaatttaacaagctgaatagaaaaggtgagcacttttctcttatctttcttcatatatatatatggaacatttctcaatgggtattatccattaatggttactaaacaatttaactataaatattaatttttaaaatattaaattattatattttgattcaatgacgaataataaaagagaaatttatatttttatacttaatttagctatttaantaaaaaaaataaaaaaaatatcactttttacattatatcaaaaatatgtttgtatacaaaatacttaagccaaattcaactttctttagtcgaaaaacttttttttttattttttttttcagctgatggaacaatctcaactcatataatataaaaatgagaaatttttttaattagattaaaaaactaagcataaaaactcaatttttcataatattaccatgaatgggcaatacccattaagagtgtacccatatatatataatttttggaggaatatatgtttattacatcttacatattgtgaatgttattttttttatatatatanatataaatatatataattattaattatagcattgagattcacaatactgtctgttgaccaagattttcggtaaccaataaaatattataagattagagaactgtaagaaattaagagaaggatttttacgt

SEQ ID NO: 145491 - DNA, 628 bp, Cannabis sativa
taacttaccgaggtaattccccaaaaagaaattaatgaagattgaatgaaaattatctctcacttaataaaaaaaatcatatgttatctaatttccatacaaaaattaaaattttaataattttctctcaaaaaaattaaatttaaataatttaaatttattatggaacacgacaattattgcattactttattttatttttatattgataagtgataatttcaacctcttgttataattttttagtcaatttctatgcccgaaatcacatatcgaaatattttttttcaaatttttttatagtgatattcgttatagttacaatatcatccttataaatttttgaaaaattctaaatagtttatagtactgaaaaaaaaaaagaatctgatatttcagtttaccacgcgtgtttaaacaacttaattttggcactgtaaactattcgaaaattttcaaaaatttacaaaattaatattattactataacagatactaccacaaaaaaataaaaataaaaataaatatttcagctcgtattttaaaacacaaaaattgactaaaaaattataataatgttataaatattaataattatgtggatgtccaaatcttttatttattacca

SEQ ID NO: 145492 - DNA, 948 bp, Cannabis sativa
aattggtctctacgagcatccaaaaatggcccaacaaacacattcataatcaggaggttctcaaaaatccacacctaccccataaatattagacatgaagaccaaaggcaagcaacatcgaaactgattggagaatgcataaaaccgaagtttttgaacataaagacaaaagcaacaccaatggacataaaaggagagttgaaatacatgtatgggatcaagatgaactacatgaaagcttggagaagtaaggaacatgcagtaaatgacttaagaggaaatgctagtgactcgtacagtctaatactgagtttcttacacatggtggaaaagacgaacccaggatcagttgtcgatctgaaaacagcgaaagataacagcttgctatttgttttcatggcgttggatgcatcgataaaagggtgggaagcatgcagaccgattgtggtggttgatggaacattcctcaaagcagcttatggaggaactttgttgtgcggatgcacacaagatgcagcaggtcatatttttctactagcgttttgtgtcacaaattttgagaatgaccaatctttgaaatggtttttcaaaaaattaaaagaagcgtatggggtccagaaacaccaatgcctaatttcagacaggaatgagagcctcatcaaagcagcaagagaaatatatctagaaattacacacggttactgcgggtatcacattttgagcaacctcaaaacaaccttcaaacaacatgctgccaaatacaatctgccattctttggagcagtgaacacagaaaagcaattcgaattccacatggctgaactggatggattggacaaacacgtaagaccgtacttgaaaaaagtcagttatgaaaagtggtcaagaattcatagcaaaaacaagaggtattcaaccatgacctcaaacatatcaaaatcactgaac

SEQ ID NO: 145493 - DNA, 1240 bp, Cannabis sativa
  modified_base (574)..(576): a, c, t, g, unknown or other
  modified_base (713)..(715): a, c, t, g, unknown or other
ctctctctctctctctctcgatgtaggtacctaggaccaaaactctgtcatcgaggatcaccgagccaggcgccattatcgaggacgcccaagctcctccctcccaatctcgatttcctttttctatatctttctctgtcccgatctagggtttttcataatttttttgcaatcttgttgatatttctgtgtataaatgtccctattttagtattattgtgttctttgtttttcagatctgagaaaagataatagttgggggaaaataaatttagggtttttagatttgaattaggatcaagattttgggtatatgtgtgtttgtttgtgggatttgaatttggtttaagtttggtttgagttttgtttaatttttttttgtgcgaaatgaatttgaaaaataggtttgtggtggtagtttctaatagggctgttcaaaaaaattaacaaactgcccaacccgaataaattgcccaaatcaaaccaaataaaccgataaaaaatacaactcgaataactttacgaaaaatttaaaccgcccaatgaatatattgggcgggttgaatattattcnnncccgcccaaataatccgaataaactgaataaactgatttatatattttttactaaaattatttctaacataatatataaattacatttaatagttaaactattttacatttaaaatttgtattttatagtgtttaannngaaatttagaatttatagttgatagttttgattgttgaatattatagttgaaatttaaaatttatatataagtatatttttttattctacattttgaaaaatgttgtttcatactttaatatttattcaattcatcatatttattttttaacattaatttaaactataaattttaatcttgaaaggcatatactatacatttattttttccaatcaattatttgaacaacaaatactaacaacaatgaaaaaaataaaaataaataaataaaaatcggtttaaacgggttaacccgaccaaatcgacataaatcattgggcgggttacgctttttttattttttcattggacgggttacaattagatatttgcaacccgacatttatattgggttggtaaaaatacactatataacccgaccaaaccgaccgagatatacacccctagtttctatactggtgggtggtggtgtttacgatggttatggatggtggttttggttgtggatggtggtggtggtggtg

SEQ ID NO: 145494 - DNA, 873 bp, Cannabis sativa
  modified_base (399)..(400): a, c, t, g, unknown or other
aaaatagagaagaaaagaatgttaaaaacttcgataaaaaagccttctcgattgattttgctctatgatttttgtacccctacattgcttgttgaaaaatattaaagtcccactctttttatagctaaaaaagataaaaaaaaaaaaatatcaactttttgaaaattaaaggggcgggccgcggtattgaaatcctatgccgcagcataacacccctaaatttgggcagtgagctttctactgcgtcgatggataatgtttcagccataactcttttaatattactcggaattggacgattcaagatgttccgaaaagctgaaagagagatctagaacttttatctttttttaaatttctccaaaatctgatcaaaacatagtctaatttaggcttganntttcagctttattttcttacacaattttctctattttatagatcatcttctgaaatttgaccaatttatacattccaagtattgaaccctaaaattaaagaaaacaagcataattctattctaaaaagtgataatgaagaagaaaattaactctaaaatgacataaataataggctaaaaatatcgtaacaaagtcctccaaactaaatccttactcgccatcgagtaagactaacaactaaaaactacacaacttaaatgaaacaagtcaataaaccaaaacatgagcaattttgaagtaagataaataacatggttatgaataaaaatttcacctataataatccaaaatttcagttcaatcacactcttgattcaccttaattttttattcagttcattaaaccataattagcacttaactaatagttcaaactgaaaaatcgtgtttttgcaaatgtcagttgtatata

SEQ ID NO: 145495 - DNA, 818 bp, Cannabis sativa
atttaggcaattttctttggaccgattgagcctttcaagcttacttgtaaaatttagtccttagtatacccaaagttgagctttagcctgttttaaaattttaaccacttaattgagcctaatgtgttgtctttaattactttcattctcaatgtaacttactatgccatatgcttttaattaagtttggggggggaatgaaggattttgaatgggtattattttagaagtaagagattgagaaaaaatatgtgaagtgtcttcaccatctatacaaaaaaaaaaaaaaaaacaacaaagtaataaatttgataattcttcttgaaaaaaagaaaaaaaaatagaaaaaaaaacaaaagaaaaggaaaaatgatggtagacacataaagaggaagttttcaatcttttaccagtttctttgggatgcacaatatggatgattgagggtggttgattggtatgttctgcttatggtataatgtagcctaaatgacttttcatctatcctttttacctaaggcgtgacatgtcaaccgaaaaagaccttttgattccgagcaagggttgttgacattagtggagagaggtatgtcatgcaatcatattgaacactggttggcggaatgttggaaagagtagattggttgtgatatgagtttccaaagaggtgttttgtatctatatgtattaattgcttctaacatgtgcatacaagttaattcctagagtgattgaattgaaattctggttattcaattgattgaagttgcacaggtggtagtggtagttcaattatttggaggctcagttatctgttg

SEQ ID NO: 145496 - DNA, 758 bp, Cannabis sativa
  modified_base (700)..(706): a, c, t, g, unknown or other
ttagggcataaaacccaataatatctttaattacgcggtcatcttggcccaataaaaatgggatactcacagctgtgcaaattataaaagcctcatttacttagcttgatttgtaatcaaatcccatgatttgagggaataattgctgtaacgattattgttaacttttgtaaattactgcccactatgtaattataaatagtggcagacaagatcaaggatgggggacggaaaaaaaaactcatatgatagaggccccaaaaaatactcagaaatctgaataagattaactcgtagactatgcagaattttaactgcaaaaccacgtaaaaaacctgtgttcatactctttattttgatagctttaactttttctgtgtgaaatcaatattgtgaggctcagatttgattaacgaaaatctgcattaacagtttggtgctctcattgagagcctctgtgaaaaagctcagaaaaagcctcctgacataaaagtgatggatgacaccaaagataataatcctcaagaaagaatcaataccctgctagcaaggtcatctgcgtgcgcgtagtggctgcatgcagcctttcgtgtagccttcttgggtagcaacaccaccttgtgggattttttgtggaattttttcacaaattccgattttcccaatttcaaaccctaaaaaataaaataaaatattattnnnnnnntatttaaacttaaatatcaatattaaattaataatatttaatttttaataga

SEQ ID NO: 145497 - DNA, 849 bp, Cannabis sativa
actatagattcgaaattgtactctcaattatatagaacactctatatgtaccaagatatcgatacgctatgaattatccatcgttctaatttaaatagtcagagatcctttatagatgatatacatcgaatagggacaaatatattgttatatcctttaatgtattttatccttaaaacacttagctaactataaatgatatttcagtaaactaatataattattaaaatgaggtctcaattatttatctctattaagacaagctcaaaagaaactatcgtttcacttttatgtctagatagaagtaaaagttatagattccatatctatggttagcgctcccattcaattgcattatcaagttcacaagatgtaagtatttggatgattgagctttaaagaataactctaagaacatagataatacatttaagcagaacctaaccatatcaggattaagatctattgacgtaagattaactaactgatattgacttagatagatataacagtaagtttatgatatcttatccaagttcatattggtccagtccgatgtatactccatacatctgatcttaacatactttgccaataccctgaaaatgacataacacttatccaaggtgtaagtaagctctattgttgattatcatgtcggtgtaaatccagtatactgacaaatcaagggacttaaactttaaaacatataattatgattatattccactgtgttgacaatactataatcatgaagaactatttattctggatttaatagaatttatacattaaatatatagtcatgaaataaatcatttgaaccatgcaacataaattgatttttga

SEQ ID NO: 145498 - DNA, 651 bp, Cannabis sativa
  modified_base (415)..(417): a, c, t, g, unknown or other
  modified_base (490)..(495): a, c, t, g, unknown or other
ggttggccggtacacctgaattcagaatcaaggaaagattagtgtaatattatgcatatcgttatacatgtttagcatacatgttagttgccgttagaaatggaaaatctatagccgtcaagttagcatatcagggcaacagtgaggtgtacatagagttgcaccgagatgacatcagatatatgctaggctatcaactagtatggattaactgctaccacatcagtgcaattagagtactgagtacaggctggattcgtggttagtcatactttgtcaagaacgttcctcattcagttagcgttatggttaggtgtatgggcgcctgattataacccgagatttagtatgtatattatgtatgcttttcttactgagtccgttgactcacagtgctattgctatgtgtaggtannngcaaggctaaagctgaggagccgtgagagcgagcaggtgaaggttgtacatgtcggggcgattaggcctggannnnnngatcctcgggacatcagggcttctgttgtttagtcattggtcgaaaaaccttttgttatttaatagcaaacttttgtaattgtattttgtaaacgagatcccgtaattttataagtatgatatgttatgtttatttaaaagcaaaattttaattat

SEQ ID NO: 145499 - DNA, 980 bp, Cannabis sativa
aggaacaagatataagttttgaatttaaaacaaacattatgtaactaaaattaaagaaaacgttcgttcttaaaatagaagaaaaaattattaaaaaagtcttaatatatggaatattatttgaaaaactaaaaagagtatatagtaaaatttctcctactcttccattggtttagctgcttgaatggtgtattgattgtactttgaactcatcgtttgttttggatctacatacaactgaactctctattttttggccgataatttctccgtagttttttggacaaacaacctatgtttctgtaaaaataattagtaataagatttaatatacttctattaattatgaaaaggtataaattttatatatttatttttttatatttacctcgttcgaatatgactttaattgaactacagtacatgagaatatgttttctgcaacatctccgaacatcacaacatctagcaactcgataccatcgtcaagtacaatgtaagaatactgtctgcaccaatatatacattacatataagtaaatacaatgtgttgtgtacaattgagaactaaaaaaaaatccagtcacgatttaaaaattacaaaatttgaatccatataattgagaactaaaagtaaaatctctacaattgagctccctaacatggtatcacgcattttctacatatgcactctgctaacatggtatcacgatgtaatatttattctgcaaggcaatcaatctctttcgaataagccccacataaatactttccaagttgagcttcgattaaaaatattggaaaaagtttcttacattgggagctatgattacaattttgctctaaagcaagatcaaagagatcttgcaagagctattgtgatttctgttgctgcctgggttgcccctgtacctctacctcggctaacgcttgcaagtaatatatttgcaacctatttcaatgaatttagcaacttaata

SEQ ID NO: 145500 - DNA, 1197 bp, Cannabis sativa
  modified_base (950)..(952): a, c, t, g, unknown or other
tgatctttgaactgcatatccacaaaatatttctccacccctatcagttcgcaagatcgttaaccaaccttaatgtttttcaacttttctagaaattcatgaaatttctttaacatttcaaatttctttgcataaggtaaaatatagagtaatcgtcttaagaatttgacaataactcatatccacccctaaatgtacatccatattcgaatatagatgatcctactttcagtggatataggcatatttactctttgcagacaatgatcttctcaaaacaactatgaacaagatgcaaatgccaagatttataataagaatgtggttgtggtctttttatgacttaggtcagttataacaagagttcttagaatagtctaagtttatcatggtcacagaataaaaaattcataattcatacataaacatacagttagaatccattgacaaaaaatggatattaaaacttgtgaaagttgaactgtattgtatcctggaaacagaaatataaaaaaactatttggaatctataatttaaagtcaaagacttaaatttaaccaaatataaaatgaatttttttctagcttggaccaccactactaatctaactctaagtataattttcctatagtaagcatatacaagtagaagatttctaagatcgaggatttatatcatttcgggatagaatgttgggaatataatcatctgtaccattcaatttcataaaagaaaatagaatgacatcagaagcagatgatttataaaccattcatccaatgatatattatcatagcaaattcaaaatgagaaagctaagaggaaaaataaaggattatttcgattaaaataggaatccaataatgtctcggtaggcgagagtcaaagttattcttattttacacaaatttacaactaaaatttataacagaaaacaacatggttcaannnaaattcatacacaattcagaaattattatacaagtaacaaagacatgtgaaaatacaaaacaagcacatcttaaataatttccaaggtttccaacacactgatacagtgtcccggtaggagagagtcaaagtaatcatcattgaatagagttgtcaattcatctaaaatggacaccattctagcaacattttattcgatcaaaataagaatccaacgttgttccggtaggcgagagtcaaggtta

SEQ ID NO: 145501 - DNA, 845 bp, Cannabis sativa
ttactagccatattctgctcctctgatagtaccggattcaaaacttttgatatataaggtaaaggtactacaggagatctttgttgtttcaacctctgaatttcttcttcatgttgttgaattataacttctatctctgcgaggttttgctccctccaacgagcttgtggcagataatcatcactcccgccaatagccctccaatgtctttcacctcagttatgggaacaacttagattccattctctccaaccgttactcgccctgaccacattgttatgactctccatattgcaccaggtgtccattctattggaaaaacctgtcaatttgtatgtcaatctggtcaggcaacgacccaatatacaatcttactatcacacttatggattttaagggaatgcattaatataaacaattataaactactatgcttcctaacatgctttgcttatcacatatattactaaacaactaaaggcttactgaaccatgagctgagctttttctgatgatgattgtacatgtcttggcgatcttcggtaggcaaaacctggcgactctaatacctgtaatgccctaatactaaggaacgctacagtgatttttcaattgcaatgctatctttgctaatcaaagaattttttctcaaaaattgtgtcaaatttaaactttagactatgaaactttataaacttttatttaatgatttacaaaagccgggatcccgttattaaacatttataaaatattttaaaatacactagtcaggttgcacaacgactacaaaaagaaaacccagatgtctcgagaccgaacactccaggtcgcgccgccatgacatg

SEQ ID NO: 145502 - DNA, 2501 bp, Cannabis sativa
  modified_base (42)..(45): a, c, t, g, unknown or other
  modified_base (1772)..(1795): a, c, t, g, unknown or other
  modified_base (1993)..(1999): a, c, t, g, unknown or other
accgcggttaggtttcttacttattgtttgctttatcgggcnnnnatagtgacatattcagctcgtgattagtgagtggtaaaatggtactttataaagtatcagaattgtgtataatattgagtaaatgtgtatgcaagttaatttgagattgaattgctgaatataactggttattattttattcacttttcttgctgagtctctggactcagaggtgctttatggtgccggtaaggggaaaataaaggttgagcagccaagagttcgaggtcgtagcagcaatgtatatatcagccgcagtggcttggctcactgaacaggatgctccggtttgatattattttggaattgtaaagtttatgttgaaaaagcactaataaactagtttgtaatattttaaaaacaggaggtccccatagttctcattacttatcttttactataaagaagttttttttttatatgcttgattttaattatcaaaaatttaattacccacacttttggtataattatatagtattcaaataagaattttataaaaacacacacgtggcgtccctgttggttagggtgttacaaattatatatattgagttcatgtatctaaaatgaaaaagaaaaagttataacaatttacaacttacatgtaattaaaagcaagttacatatcttattaaaactaaaagagaagagattggtatggtgtatagaatgcacaagagtggagatgcataaacaccaaagaaacatttattgtcatcgtgtttaaactccatatataattggtggcacatactaccttttactcattcattttatatctatatataatatggtgcatcaagtatcacataaataagagttatacaaagaatataaatatttttttttttaaaaaaatacaagaatacaaaaggtttttcttttttttttttaataaaaaaatacaaatagtttttgtataataaaattaatgtgaaaacatcaacctatagaggaagaataaagatattaattgtacattaattatatttgggttgatttttgattttcttgatgtttcttttaagattgttaagcggtctactaataagggtgcgcatgctttagcgcgatcttctctttctgaggctgaccgtcattttagtagggatactctacctcttgtaattgcatccttgatttttgatgatttgatttattaaagattaatcattattcaaaaaaaaaaaatatttgggtcatgtataataattaaattggttaatatatattttttttaactaagttaatatatatttcttaaaaataaaaagaaaaaaaaacttaattagtatattttagactaataattataccatatatacagatctagatgataatagatatcatcaaattgatacaaaatagtataaactctcttcgatctttgttaaaatagatatgagattggttatatatattataattgtatctaactaatatatatatatatatatatttgtgtgtgcatattacataatatatataatagtatatgatatacaattttttattaagtgaaaaatataatttacaacaaaaaattatagaaaaataatataaaaatatgatgcttgcctcctatacccaaatagatgaatgaatatattatcaaatattacataacaatagaatctctaattttatagaagcatatatatataggtatatatgatagatattagattagtaattaagtaaatatgttataataataataatannnnnnnnnnnnnnnnnnnnnnnnataataataataataatgggagttatataaaaaaataaaaagtcaccattgataataataatagactaaatatttaattaaatctttaaaaagagtagtaaatctaaaaaattgagagaagagagattggaaaaaagaatgacatataagctcccacatcaattccactaaaactctcatttatatatatatatatannnnnnnatatttatatttatatatatttattttacatcatttacaccattgaattgtatgtactatattactaataagtcatttaaaacatttaatgaaaaaaaaattatagtactaccaattttattaagtactatttttgcaacgaattatttgacatcatgcactattttttttaaagaaaattgtgtgaaaatatattgaataataaaatggtacaaatatactaagagattgcatcacaattttattgatttcgcatagtagtgtactcaataataataattatcaaaataaatttcaaatacaatattatgcagaattgaagaataaataaattaatatttaataaaaaaatatatcatatttataattatgtaaatgagatttttttacatcacacttgataaggtcaaatttgtaaataaggtcaaatttctaaaaatagaatattttataaaaaaaatttaatatctgaccttagatttaaaaaaaaaataatcaaatt

SEQ ID NO: 145503 - DNA, 1273 bp, Cannabis sativa
ctcaaagcttgttgctttttgcttctttaaggcacttcttcagggtgtccttaagggttttgttgacagcttttactttctcatttgcttgaggatgggccacgacagagaagcttttgatgttgccatgcctgttgtagaaatcggtgaacatgtcactgtgaaattatttcttattgtctaacacaatcttctacggaagtccgaatcgacatatgatgttcttgacaacaaagtcaaggactttcttggaggttattgttgctaggggttcagcttctatccacttggtgaagtagtctattgcaattacatcaaacaatacccatccttttccctttgggagttgaccaatcaggtccatcccccatactgcgaagggccaaggagattgcatcatcatcaactcattgggtggagctcttagaattttttagaatctctagaacttatcacattttttggcatagtccattgagtcctcaatcattattggccagaagtaccctaattggagtatcttcttagattggctttgccccttgacatggttgccgcagaagccttcatgtacttctatcattagtcgttcagcttcagctatggtgacacaactcaagagaggtatggagaagctccgtctgtacattactccatctaggattaaatacctagcaacttttctttttagcttgtttgcttcatccttgccttccggtaagactctagtttggaggtaggttgtaatagtagtcatccatgctgggttcctctaggaattgtattgcaccagatttgtcttatctgccaaggtgctacttgctagatgggtaagggcatctattgtggcattctgctctctagggatcttcctaattgtgtagcctttgagctgacttagtaagtcattgattttgctcaagtaagccacaattttttcacatcgagttatgtattcacctaagaatgattcacaactagttgagaatcattaaatatgtctaagtggtcagccgtacttcatgtgccaactttaggccgacatcatattcggcctcattgtttgaggttttgaagttgaatttattgctctatgtagtttctatccccaagtgttataagggcaattcctacactagacaactggtcagtgtagcctccatcaatatggactttccatgttagttccttaggtttttactgctgctcttgctctcgcttctgttgggttttatgccctaaataaaactcatttcagtataatcagatttac

SEQ ID NO: 145504 - DNA, 523 bp, Cannabis sativa
aatcaatttgagtttgagatgtattatagatgacattgtatgtaggtttaatgcatttcaaatcaaatttcttaaagatttgtttggttcaattatgtaataatttttgcactttatcatgtaattacttctttatcatttttgccttttgagttggaattagaggttttagactttaacacacaattaccacttgtaccaacatataattatgttagtgttaatcattgtaggtgatattggttaaaagttattatcttgattcaatacttaattacactaataattttagcaatttggtagattatatactaaattttgtgtaaccacataacaacataatatataattctcataccaaaatttttttttacacttttattgcttgtgagtttcaccacacaattaacaagtccaaatcaattgtgaaaaaagacaattgagaaaaaaaagattgtggttaagaaaagattggaagaaaagttttttttttttttttcttaatttaggtggcgtttggtaa

SEQ ID NO: 145505 - DNA, 712 bp, Cannabis sativa
  modified_base (248)..(248): a, c, t, g, unknown or other
  modified_base (275)..(285): a, c, t, g, unknown or other
  modified_base (666)..(669): a, c, t, g, unknown or other
aaaaataaacctagatattttaaaactagtttgactttatctttttgaaaagatatttaaggttattttcaacaaacctaaatttaatagttggttaattaaaataataatttaattatataaatatcttacttcacaatttgttacatggatattgtgtttgttttatttaattgtttattcaaaaaaaaaaaaattcaaaaaaaaaaatttaacaaacttattttttatttgatctaaattgctangattaacttgttgacagatctaatgannnnnnnnnnntcatagtccaattgtcaatatatcttataaataatttgtagcaaggaaattttgtatttatttcatctgtgtaaacctagaaacatgatagggcacatccaaatcaatttgacctatgtgagcctatatgtttgcttttagacttacatgcatataggaagcccgtttatttctagatagataaatggactaggttctaaaatgaaatatcacttttgatagttttatttaagcccaattagtattgagcttattcaatgaataacaattatttaattaaggttaaattcctctcctttggtccttgtgtgagagttaggaggccattagtagtaggtaccacatactgaactcagccctccctcacatgaacaatcccannnntgaaggcccatttgctttatttaaataattgtattaggctaat

SEQ ID NO: 145506 - DNA, 609 bp, Cannabis sativa
  modified_base (497)..(513): a, c, t, g, unknown or other
  modified_base (557)..(563): a, c, t, g, unknown or other
tggatagttgggaacatgatctacaattatggaatcatgacttttttaatggatcaaatgttggttctttttaagtgttaattctataacagaaaagttatacacaaatttagatgggatctaaattatccttccactagtgaattaatggtactaaaagataaaaataataattagaaaggtaaaacgataatttgaccaaaactaattatgaaccaacacatggaaggctaatcactgaaattaattatatgaatggacactacaataaaactcaataaatataattttataattactaagagtttaactccatatttatagtggagtaatcatggaattaatatacaaagattatttggttggtgatacttaataaataatctagtatgttagagcttataattatagggtcgtggtccccgaattgccaccttaaaacacttttaaaggaagggataaggagttgtataatgtgttagaatttattttaccannnnnnnnnnnnnnnnnacaagtatgttgtttaacatcttaaatatgaactttctaaaacnnnnnnnaacacatataaagttaaggaaaccttacactggttgcagcggaata

SEQ ID NO: 145507 - DNA, 545 bp, Cannabis sativa
  modified_base (139)..(139): a, c, t, g, unknown or other
agttggcaaaagaaccaactgccgtcaaattaacacttgcagccaactgttgccaacacgctttggcaaaagagcaatccaccaagcaatagtaggtggttttatcagttactttgcacacagggcagatgatatcaanaggcacatgtctagaacaaagtctgaatttcgtaggcagacagttagtgccagcacgccataacaagtctttcactttcagaggaacacttagcttccaaagagtattccaaaagacggaattatcatcctgtgcacccaactctttgctcaattgtaagaacttataaactgattttactgagaaatggcccgagctctcccaacccaaataccaaacatcacataaacgacttgaagacaaggaaatactaagaatcaagttagcatccctttcattaaacatatcatgcaccaagccaacatcctaagccaacgtatcagtttccataagtgctttaacattttgatcaataagagcaggattattcgaagttactcttggattatcttcattcgacagccac

SEQ ID NO: 145508 - DNA, 574 bp, Cannabis sativa
  modified_base (98)..(99): a, c, t, g, unknown or other
acaatacttgttgtgactaaaactaaattagtgacaaattgtaactaaatactatgttttatatagttacaagcaaaattttgttgtgactaaaagtnncatttagtcacaaaaaaattatatgtgactaaaaaattgtcactaaaaataacactagttttttgtagtgtaattaattataaattatcatttctatattgtgactaaaatgttcgtagttaaatgtattagtcataaaaattataatttgttgtgacgaaatatgttttaatcataatatttgttgtaattaaaactaaattaatgacaatttatatccaaattgtataaataaaaataattacctattatttttagtcacactaaaacaattacttaattactttataattttagtacgtaactagtttattatttagagtaatatatataaaaaaattgtacatctaataaaatatatttttaatgactaattaacacttttaactagtaatattttaataagggtaagtagcggcataagtactcaaagttttaagtttgtaagcggcataaacgcaatgtttatttttag

SEQ ID NO: 145509 - DNA, 1273 bp, Cannabis sativa
  modified_base (152)..(159): a, c, t, g, unknown or other
  modified_base (1145)..(1145): a, c, t, g, unknown or other
aaaggtttctattacaaggacaagaagagaaatttttataataagtctattcaatggatttaacaaaacttccagatcctcgtattataggtttgagattatctaaacctgtggcttgtggtatacttggtaatttacttactctagtgcannnnnnnnactttagtaagatgctagagcatttttcgaatggctaattataaaggaagtcttttgactcctagacatagagtttatttatttaaggaacagtttcaactattccagaaaagataaaagtcattaaaaataattccttaagaatcaaccgcgagaggtctcatgtatgcatcagaccagacacctgttgctgagtgaggtttatgagtaggtaccagtttaattcaggaaaggaacattagaagataattaatcaaattttaagatcgaaaggggaactgtatgttagtcgataaaagtggtattttaatactcttagactgcaccaaatcagttttctagtcttgcgttattgctagaaagtctacttatgaaatggtgattactccgaggtggagcagtgatttttggagaagtgtaaaaacctatatgtagtctccaactctactagtgagactgaatgttaaagttgcaggaaggatacttatttagcctatggaaagttctatacaatttttggtgttgtaccaataatgacttaactactagtgttacttcctgactagcacagatatagtttccaaaaagtaaagaaagcagtatcccaagaggagtagatatataggaagaaatttcacaatatcaaagattttgggattaaggggatgtaatggtggaggaaaagtttgtattgaatacaacttgtcagatcctattaataagacaatactacgtactatacttgatctggatatcaaggtgttcagattaattgaaatacacttttagttttatattagtgcaagtgggagtttgataggttttatgccctaaataaaacccatttcattataattagatttattaattaataaaagatcagaaattgttttatgttgcatggttcacatgatttacttcatgattatatgttggatgtataaattctattaagtccaaattatatagttattcatgattatagngttgtcaacacagtggaatataactaagattatatatttcaaagtttaagtcccatgatttgtcagtacactggatttaaactgacatgataatcagcgataaagtatacttatacattggataagtg

SEQ ID NO: 145510 - DNA, 570 bp, Cannabis sativa
atatgggacccgatacttagttgtaccaatagcgatattgacacataggaaggtgctaggcaccactggtgccctttaacatttctctatttttttggcacactattaaagtatattttttttactaattgagttatattttaattttgcatcgcttatactaaaagtacaaatcaaatatatgtaaggtagagggaggagggccaaaaaatattaaaatttaagaagaaattacattgtatactcactttactttatttgttttaatttttacctttattttcatattctttaaaatataccaacttttattaattatattctcattacaccccttagactaatgtaaattatgtgctacacttaagtgaatagtaagggtttattaagcaacatactcacaaaagtaggtactttttaataaatgaatacaaaaaagaagtattcctcaacttatcctaaaatttaactaataaatattttaaatatattattaaattaataattaataattaaaataaagaataatgtaatgaccgctctagtaatgtggattagtaaaggcaatta

SEQ ID NO: 145511 - DNA, 606 bp, Cannabis sativa
gaattcacttcaagttaatttgtcgaaaaaattaatgggaaagaagttcttgattgttctagacgatgtttgggaagatgattatgttcagtggacagaagtgatgaagcctttcaacggtgggacaagaggcagcaaaataatagtaacaacaagaaatggaaaagttgcagacatcattcgaactgttgatacacaccatcttagaaaattatcagaggatgagtgttgggcactgtttgagaagcactctaccggtggcaactctagaaagtttattgagaaccctaagttaaaaagtatcggcagagaaattgctagaaaatgtaatggtttacctttagctgctaaagttctaggaggcctcttgagatcaactatggatgctaagagatgggaacaaatagcaaagaataatatttgggagctgacacatgaaaggagcaagaatattccaactgctttagaagtaagctactactatcttcctccccacttgaaagggtgttttgctttttgttcaatattcccaaaaggctatgtatttcaaagggaggagttggtattattatggatggctgaaaatcttgtgatgcatcccacgga

SEQ ID NO: 145512 - DNA, 676 bp, Cannabis sativa
atattaaagcacttctaggaatatgtttagatctgagatatatatatttcttgagtgttttataaatcttaacatttacctcagccagaaatatgagtcttgaaattaggaaggttgctcaatctaaaattttaagtataaatccttataattagtgtaaaaaagacttgtatttagttaatatagttcaagggtggtagttgggtagggggttgctagttcggtagcaatttgtagttgttttgtttttttgtgatgttgcttgttgctccagcttagttgtaagtgctcatttttgaataaatttttcttttgttaaaaaaaaaacagttaagtgtgatcaaagtaaaaagtcattcaaataattaagttattcctacctaatgaactatcaaaggaataatctgatggcagatcaagtcgattatctatatgtaggaattaaatataataagcagatcgatttaattgtcatgtaaataaatatttaacgtaaattagtaggatgaatgttacttcggtagagaatccctaactggtttttaatggcacgagttagtttctttgatgtaactttagggttgcagttacatcgtaatgacagagatcccttccagcaaactttgctaaaaagggttttccctatggatgcccttcaatcaacagtactacacca

SEQ ID NO: 145513 - DNA, 835 bp, Cannabis sativa
ttctaagtctgctccttaaattcacgaagcctcttcacttcaatagttaggttggatttcgtttgcaaatcaacttggtgcagctcttctagagactttagcttggtagttaattcctgcacggactccttagcgtcccggagctcccacctcgcattgaccccagccgtatccctggacttcaacgcatcatccttagccttcagctcctcggcctttgcctttggcgcctcttgtggcttcgctccaaaagggcctccctctcttgggattcctcccggatagctttcctctgtacctccaagtctcgaagactcttcatggcctcatccatgcccccaaactcggacatggtggacccatgttcaatcagagtcttccaaagacggtcggtctctgcagaaatttggcaaaacaaagaaaaatgtgtatgtgcgtgatgccaagtgccaaaagacaaaaagtctgaaaatactaaaagatagaagcttacatcggtcatggccacacttatgtcctggatctggtagaccgagtttgtggaagcacaagctatgtatctcttcgctggaagttgggtcaggttggagacgaagtggcttgttagttttgaggcaaaaggagcaagagtaggcccaatgaagcggttgaaccagtctgtgaaaggatccatatttaaatcccaggcgttcccggagtactcgctgtgagagaaattgtcttgagcctcccttaggaccttcttcaaagcctccacctccgcattccccttcgtatattttgccatagcatagttatgcttggcaatccagagctgttgtctctcttcatcagc

SEQ ID NO: 145514 - DNA, 805 bp, Cannabis sativa
gcaaatttgaaactttaattagattatttttaaattttattaatattttaatataaaaataagatcatttcaaattttaataataaaatgaataatatctgattttattattaaaataatcaaaaatttcaaaactaatcataaggctagtttgtggaaaaattaaattttaaaattcaaaggctactaatatttaaaactaattttaattaattaaaaaattgataaaaattaattttatcctgataattagatttgtaattgaaaattcatattctgcacaaaattctaccaaaatttgaattttgtttcaatgaaaatgatttttgaatcaaaagatatcacaaaaacaagattgcacaaggggagtatgcaatgcatactccctgtgcgcacacaaggctgaacttgggcgaaagaagggctgcaagcagtctgtttggggggcaaacctcagtcaggaggggaaaaattcggacagggccttgtctgaaggcctcttgtctgagtgagtctcccattcgcgcgcgcaagtgtgttgctcggtttcagatattttcatccaaattcagaaaattataactaattcataaaaaatccaaattgagttctgtaaaagcctaaatttattaatttttttgtctactttccagtaaaaatattttcagaatgaaacaaaaaaaatttatcgacgtaaattgcgatttccatacaatcatcaaacatgcacataaaccaacatgaaaccatccaaatcaacacaaacatcattttaaatccttattttatgaaagtaaatcattac

SEQ ID NO: 145515 - DNA, 662 bp, Cannabis sativa
atcttgttactctcgttagaaaaactaggtaacaactccgcgctttgcgcgttattaatttttttttttttaaagataaacatatacatattacattattgttgttatttattattcaagaaaatttgataaatataagctgagatttttaatatattatttttactaaaaaacatcaaaaaaaagtaaaataaaaaaacttcccttaaaaggtacaattatatataaagcatataaattaattaaagaatttcttatgaagtataacatgtataaattcagaagttgcttatacaaacaaattaaaaaaaaattatggaggaaatttattacttttgaaaaattacaaataatgaaatgtagatgaaaaatgttataacaaattaaacattatacataaagctttgaagagtatatggaaatatttttctttattcttcacaacaacatattaatcctactatttaagttatgattggtggtaaaagtaatttagtgagcaagaggcaacatacaaacaaataaataagaaaattgtttaaactaatatttagtgactatacaaatacataatcttttgaggtactctcgtcttttaaattaatgttattgctatattatatatcttaggatgatatatatcttagtagataatataaatc

SEQ ID NO: 145516 - DNA, 626 bp, Cannabis sativa
  modified_base (27)..(30): a, c, t, g, unknown or other
aaccaagaattgccgttagataggcannnntaatatataaagataaagatatagattttctttttaattaattatttatttaattaactctttttttattacatatctatatatagataaataataattatatgacctttggaaatcaaataaactgttacaaatttacttatacttcttttaataacgtttgtgctattggtttctttgtaatcatctcatgctatttaattaataataatattattcattaatataataataagtaaagattattcccataattaaagaccttacaacttctcacttttaagttaattaacatctctcaagacatgtaaatatctctataaatattatttatttttcatttgagtttctcattcacccctttctatctatctctcaatcctttattactttctcatctgtttttgtttcaaaagactttttgaaaccaagacataggacatgcatgaagaagacaaaaagaactgagattataggtaatgggaattttgtttgaccgaatcatcataaaaaaattagggattttttcaataatatacttgaaatataaattatttacaaaaataccttaataaatctcaattacaataatatct

SEQ ID NO: 145517 - DNA, 782 bp, Cannabis sativa
ttttaatttatagttgccttataacaaaattttctataatatgagattgaatattataattataatacttagtttattttttatatttttttgagtacctctattttattgtattgagattgcttcattttttgttttgttgtgttttgcctttttttttttattttttttttattttaagtttgtcatattatctttttatagagtcaaaattaaatttatagatttttatgagttttatttgcacatcataaaatgataagtacaccctattagaaaaatacttatataatttaaaaaaatattcttaatatattttaaaaaaaattttctcgtattattttatattaatttcaatacttattttgattttattttcatattttttttttttctaaatcatgtatatatatttatttttttctaagaaaattttatataattttttgtcataatatttaaaaattaatttatttttattttaataggcatattttttaagaatataaattaaaaaaaaaagttaaccaaaatttagtacaataaaatatataaattttatttaaaataaaagtttttaaaatgagatgtctttagaagtttttggggtgtagataattttttttataggtttgagactggtttcatagattttatatgattttttatacggtcgaaacgggtttcataggctttgagggttttgtaatgagattgcttcattttatgatttttttttttttattttaagtttctttatattattttttttttctaaattt

SEQ ID NO: 145518 - DNA, 902 bp, Cannabis sativa
  modified_base (636)..(643): a, c, t, g, unknown or other
tcctttttctcccaattaaacactaccaataatagaagaaccctaaacctgatcattgagagatgtacgtgctgctgattttcttgttgataatgactagttaattaagatgttgatagagatgtgtcactgcaagtattgaatttcttttttaattatcccttcttttcgtctcgtccccaaaaatcgtcaacattaattttgcaataacagaagaaccctaaacctgatcattgagagatgtaccgctgcttttctttattgaatggagaagagaggaacgttggagaagaatgttggatgattgatatattgtgtgactttttatactaattatgattattaattgtgtgttattatgtataggtgtcaagcataaaaattaaggatataacttatcgaaacatcaaaggaacatctgcgacaacaatagcaacgaagtttgattgtaactctggaaattatatgcagtggaattagattggaagatgtgaatttgagttttcaaaacaaaccagctcaatccctttgtgccaatgccaagggaatatcttttggtactgttttaccgaattagattattattattattattgaataatagggaaaagcttttgggataagttgaggaatacnnnnnnnntgtatccattaatcaaaaatactttatattatatatttcataaaaatgtttccactttcgtgtgcaggttgcccaatatactcttactttctaattaagtctagcacataatttacattaacttaaagagtatataattgagacatcatttataaaagtgggtatatcctaaaaaaatgtaaaaataaatgtaaaaattaaaaaaacatataaaataaaataggtacacaatgtaatttccttaaaactttttagtcac

SEQ ID NO: 145519 - DNA, 638 bp, Cannabis sativa
agaagttgtatgtttttctaattgttcaagcttttatatacagtcgcacaactatatagaaactattttccaactatatacaaacaatgtactttggtcagcgtacttgtattttttaattgactatcaatgtatttattctctgtttttccctttctccttttcctttaattacttatgttttatcaattcttatctgaccttttttaaaactttaataaaaaagttatttttgtactaaatatttaagaagtgtcaaaactgtaacaaaacgattttgcaactattaccaaactgtttaaaatttttaaaaaataaaatcccatgtgtgcagaatataacatatcaacctgtttgaattctcacacagaattaaacaattcaaataattcatctgtatctattttattgcttgattgttgcatgtctttcggttgtgcccgtgttgaccacatttgctgcatctattatgttttttttgtatcccattcagataaaaaccttcatttccttggtcttccaaatcttattttctggttcggtgggagaacaatgatatcttttatgttttatggtacatcccatgctgtgtgattgtgtaccgaatatgttgagccgctgtatgtttcaagccatgt

SEQ ID NO: 145520 - DNA, 740 bp, Cannabis sativa
  modified_base (361)..(368): a, c, t, g, unknown or other
  modified_base (477)..(497): a, c, t, g, unknown or other
  modified_base (667)..(687): a, c, t, g, unknown or other
aagccaagaaaactatggttaaaaccattcatatggagtaaccaaaagttttctattacacagacaagaaagaaaattttgaaaataagtttattcaatggacttaacaaaaattctgatcctagtattattgtaggtttgagattatctaaacctatggcttgtggtatgcctagtgatttaattactctagtgcgagcaaaacttactttagtaagttgctggagcatttttcctattggcaatctatagaagcttctcgacttctaaacatagattttatttatgtaaagaaaatttttaactattccaaaaaagataaaggccaaagaaaggattccttaggatcaacagtgagagnnnnnnnntatgctttgctatgcattagaccagacacttgctgttgagtgggagaaatgagttggtattagattaatccaagaaaggagcactagaagacaatcaagtaaatcttannnnnnnnnnnnnnnnnnnnntgttagtcaataagggtggtatttaatactcttagacgacaccaaatcaggtttctagacttgccttagtgctagaaagcctactgatgagatggtgattactctgggggtggagcagtgatttaggagaagtgtaaaacctatatggagtctctaactctaccagtgannnnnnnnnnnnnnnnnnnnngaaagatacttattcagtctattgaaagttctatacagtttttggcatagtac

SEQ ID NO: 145521 - DNA, 823 bp, Cannabis sativa
  modified_base (30)..(30): a, c, t, g, unknown or other
ggctatccacgagggataaaatacatcgcntataaaatcgttgactaacagcttgttaacttcctgttttagtgccccttgcctctcggaatccaagggattcctttttgtctcttcgccgcgtagtttggatcaacatttaagtgatggcagataatcttagggtcgatctctatcatatcctcatgactccaggcgaattgatcctagttcgccctcaaaaagcttaataattgctatttgagctgctcgtccaggttcttcccaacgtacacacatttggtgggatttcctgggtcgataatagcctccaccaattattcaattggttttagcaggtttctttcatcttgaactcggggattaagatcttcatatttcttcccgttttctcctgccaagatcatcatcagctgatgaccggcttttttattctgcaactttatgcgatagcaattgcgagccaacatctggtcgccaggcaccactcccacaccatctggtgtttggaactttaaagataggtgcttgatcgaacttgactgtcctagttccgatcaattgctggacgacccaataatatgttgtaagtcgagggcaggttgacaaccaagaagtcttgcataacagtagcagttaaaggtgcctcacctaaagttaatgtgagttcgattatgtcgaggctagcgatgctatccccggtgaattcgcaaagattcaccatacaaagccttaacttggccttttgagccccattttctttagagtctccttataaatgacatttactgagctcccattatctattaacactctcttgatc

SEQ ID NO: 145522 - DNA, 731 bp, Cannabis sativa
atttgatcttcggtatgagagtgagcactgttgagttcacttctttcaatatctgccccgattttaaggctgataggattgcttcagatacatcatggcaaacaaaatcccaattatcttgaaaaaaggagttattaaatccatccggacccgggtctttaatccctgggatactaaaaactgcttgcttaatgtcctcttttgaataatttccttcaagataagtggcttgttgactagtaacaagcggtcccatctccaccaacttctttttgacctccttcctatcttgcattcgggttcccaagagattcttataaaattcagtaaaggcttcagtaatctcagcaagttcttcaactctttctcctctcatgttttgaatcgagaggatattatttctggtccttctttctctgatgtatgcatgaaacattgcagaattattgtctccatcttttaaccatgacagtttagccttttcttgcaagaaagagcagtaattgctatatatttcagcatattgagttctcgccattgcttcatgtcattgtagctcatcattgaagggattattgtgcaacaacaattgacactcagctagtcttgcagaagcttggatatcagcttgttgtaaatcagaaaaaccacctttgttcagctctctaaacaccagtttcaatgccttgagctttgacacaacttgcaacattgaagtcccaacaatcttt

SEQ ID NO: 145523 - DNA, 522 bp, Cannabis sativa
atattataaatatttttaactttattattatttatttatatttcaaattaaaatggttgtaataagaaattgattgcttttcactattttagttatggtaaatcaattcacaaaccatatttttcgtaaagtttgaaaataaaaaacctttatatcaaatttacgaatccagtctatatatagacacactcaaatttgattatgtgagttttggttaaaaaatatagtaagttatagtaaaatacaatatatacattaagaaaattttaaaaattttaaaaatacgtatatataatgatattcaaataatacactaatgtagcaatagctaaaaacaaactccatttaaaaattaaaagaaaaatacactacctaattaaaaaaaattaaacataatatattgcacttaacatcacctaattaattatatgttcattgcacgtaacatcaacctagtatatatatgatggtttgataataaatttgtatattggtttagatttggaataggtggatatgtgg

SEQ ID NO: 145524 - DNA, 949 bp, Cannabis sativa
aattttacaagagtgtgagctactatattagcagttctagggccgaaaaaagcttacattattaaaatatttacttaaatctctaattcatcttgatgtaaaccttaagacgaatctaatatcattgaactattaagttaacgaatcttaaacatacttattattaggtagaataaaatgaatgatttattatataaataaattaatgtttacactaagtcatagctttgagaaagtaataaaagtgatgagattaaatttaatatatatttcaaaaatttgcagctaataggatggaaggaaggagaacagaagttgttggttgactcagaagaaattgaatgtttgaatactataagaagcttgaactcaaatgctgattcaattcacgagctctatgctgactccaccaccatatttcgcccaggttttatttggaatgacatcgttttatccccctccaggtcatccattcagaaacgccttagggaatccattcaaaaaatagaaaatagtaatattaatacctcttgaatataacttaaaataacaatccatttgtagctctttggattttttttgttaacatttctgttggtttgaaatatatgtaatattgtgctatatactttttgtgaagtggagttcctgtgtatttccactcaaaaagaattcatagtataggttgatctcaaatttggagttgtatttatgattgatatcaccacgtgtacataataagaacaagaaaattaaagagtacacagtatttttatagaggtttgatctccttagttaacgggtaatgacctactccctttttggttgtattgataccagagataataccactcggatcacaagtgttttggattcttaagtggctctcttaagattatagtagtaagaatcaagaagcaaacctcaagtaagagagatgagagagact

SEQ ID NO: 145525 - DNA, 1061 bp, Cannabis sativa
gagttataatttctcaattccagagattttattaaactctaggggtattatttgacttgtatgtgaaatatgttatttttgtaatttttgcttggcaacaacggaaaatgtgttggatggctagtttgatgacacgggtaagtttagaaccttatttcttagtgataaatattttagagaacataaaatatcaggattaagcggggttatggaatttgaccattttaaccctggctttaaaaataccctaattttaagtcaaagggcaatttggtcatttggttaagtggtgtgttaggtggctgcctagccttgtgacaactagaaactttatttttcagccaaggtttaattgattaaacccttatttcatttaggaaggaaattagagaaaataagaaaaaatcaaaagattgaaaaacactctctcttttccctctctctcttcgaaccagccaaggatagtgggattcattgctggattttggtgtttgcagcaagggattcaaggaggatcaagcaaaggtaaccctagaactatagtcttatgttttgaagctttaaagtttagtttgaacttgtgattttgtgaaatgagggctgttagggttaggtttgtttagggttagaattttaaggttcatttgagttggttttaggtcgtagcagttgataatgatggttggattaggttttgtgcaagtttgagctttgagttcaaagctttgatctctaatggcataatttgtttcattgagtttttctgtgaattactggctggaatatgttgtatatgcattgtttaggtactctggaaagtttggtggcatttggtggaaaattgagcaagaggtgaaagatttggggagaactcgtgcaaactggctagccggttttgccagacttctctagccggttttggcaggatcccccaaacacttcatttcctcgattttcgtccattttagtaccgtggttgggtgtttccctaattccagagtttgagtaacctttagggagtataacagaacctagggacctagggttatgggttcgggttt

SEQ ID NO: 145526 - DNA, 1014 bp, Cannabis sativa
atcaatcacttcaaatttcttacattgataactaatcagattgaaaagagttttatttagggcataaaacccaacaatattttgattttgttcattaatagtgatataattattatttgtttttatttgtagtgacaactaaaaatgatgataagttcttggtggaagggttcttcaacaccttccctcgaggtgagctgtggtagtattgcttcactgaacctttgtattgtgagtgtcttaatgattatatcaaaaacttgaaaaattttgggggcatattgtatttcagcttcaatttttttgggcatattataatatatcatagaatgtttgattttcttagcacaagtgagaggcattatactttgttatacattaactaacagagatatatatcttttcaaacttctgctattgactttgacaatggagatataatatggttgttgtggttagagatcatctttcaatctgactcccaaagggcagttcaagctctactagcattacacagctgagattaattatgccttttagataatcttcaaagagttcgaggggcgtgtgcttctagcttctgagttggagccaaattaggggcttctcatttttttttttagttgctagttttcttaatttgttcttttttttttggtgtagtttggtttacaactttgattcatggagtttgcttttgtagtttcttgtttagactttgtatattttaagaggcaagaattacattgtaatcatgtaatttttatgattgacattgtaatttttatataataaataaatgcctttaatattatttgtcactaaataattaattatttatattaatcctttaatgactaaatttagttgctgaagcatagttttttggactaatatatcaaatttattgtaactaaatttaatatattttgtgactaaattttagtcataaaaatagggtaaattacggcataaatacctaatgttttgtattttatacacttaaatacctaa

SEQ ID NO: 145527 - DNA, 595 bp, Cannabis sativa
tggctaaaagcgaggtcaacattagtaaatctagatcctggtaagatatttccaacattgtccggtgcaggcattgccctcataaaacctggaaaaacagctgcataaagtaattaaatttggcttcaaagcctctaacaacaaggctaaatatgaagccctgattgctaacctcaactagcgcacgaagtacgggctgaccacctagacatatatagcaactcttaactagtcataaatcatgtcctatgtgaatacacagctcgaggtgaaataatgatggcctatttgagcaagatccaagacttgctaagttagctcaaaggctatacaataaggcagatccccagagaacagaatgccacaacagatgcacttacctgtctggcaagcaacaccattgccgacaaggaaaacttggtgccaatacagttcttgaaagaacgtagcattaccatccctaaagaatttgacatgttggacgacagtccaatctggatgacacctattgcaacttacctccaaattggagccttgcctgaaaacaaaaatgaggcaaaaaagatgagaagaaaagctactaggtatctaatcc

SEQ ID NO: 145528 - DNA, 639 bp, Cannabis sativa
  modified_base (395)..(396): a, c, t, g, unknown or other
gtccgcattcacgagtgtcttcgtagccctagacttctttttcatttcagtgtactcatcgaaccacctaggccgctttctcttcctccagttctccacgagttatggagctgtctctaacacctatacctcagaatcctgagtatccccgatgctggtgatattcgtcttctcaggtgtacagaacatgtcatcatccagtctgtaatcatttgggagaaagatttcacgttccggtgactgagcctcttcttctggttgtggctgtggatgtggctgtgactgtgaatctgctgccagccttccaggatcttgtaggagcctcattatgttcttcaactgatccataatcgttgtttgtcctcttagcagagcggtctgcccttccctcaaannaatctgccccctctccacagtctccaaccttgcaaaaatggcagggtataatgcatcgcgagcctctgaggtgctgggaatagaagctgacgagagaacaggaggatcctgtgatgctgcagatggctcaacaccagactcatctggaactgaagctgcagatgggtcaacaccagactcaattggaactacagacggtgcacgtggtggagacggtggaggtggtgtagagtctctaaatat

SEQ ID NO: 145529 - DNA, 838 bp, Cannabis sativa
tttttgggtcaacctctaattcctatcccaaggtcttcattccggttcttgtttcaatttcaagtcacgagtccgagtctgggtttgggtcctagtctagattttgctccaggtttgggtcttagtacgattccaagatctagacgccgactacgggtttggtccaggccccggtcgtgagtcatgatctatatctcaatcttgggtccaggtctcatttcgattcgaatactaggtcatggtctgtttgtgtctgggtctgggtctaggaccgagaccggggtcaagtcttggattccaatcccagttgggtcccgattctggttctaattttgagtttgggcccacaatctttgggctcctgggtccaggtcttagtcagcaatctcggtccgagtcttgggtttgggactaggtccaagtccgtgtctgagttcaggtttgtgtcccgagtcgagatctgagtttttattcgggtccgcgtctcggtccagatctgggtctgggtcctagtcagattccggttattggactcaaacctagaataggactcggacctaggtctagggcacgggtctaggtctgggtcagggtcttggttcgagtccgggtctgggtttgagtttgggtatgggtcttagatccaaacactaactacgggttaggtccaagcctcgggtccagatttgggtcacagtcttgggtccctatctagttcaacttcaggtctcaggtctcagtccgggtcctaggtcagggtccgggtctggggtcgggtcgtgggtctcaatcctagttctcatgcccgtgtccggggtccaagtcccccatccaagtc

SEQ ID NO: 145530 - DNA, 617 bp, Cannabis sativa
attgatgttgaataaaatagattacattgaatttgagttttatttagggcataaaacccaacaccatgtgcataaaaatagaatgtggagaatatccatgtttcatgaacagttgtaaataaatagatcccaataaaaataattgcatcttatacacctataaataagagcagaatctgaggaaactggagggaaaaatgattatttacatttaatgaaaattgtactctgtatctagataaatatcctgaataagaaggactcgtggagtatgtagattttaactacaaaaccatgtaaaatatcttgtgttcatttattattattaaattctgtagaatatttattacgacgaaaatctgcgttaacatgaagcattataaatctagattgtttaacattagttgttccttcaaattaggtttgaagaatttgccaagcatctttagtagatttacaagaagatataagcttaataaaacatttacatactctattaaaatataacatgtaaagcttactattgtaagcagatagcttatcatcttcagtagaccattcaagttctggttttaacttagaattactttcaaaatctaccataacaagatgcgacc

SEQ ID NO: 145531 - DNA, 1171 bp, Cannabis sativa
  modified_base (925)..(928): a, c, t, g, unknown or other
ttaattaataatattttaaattttaaaaactaatgtataataattcaaaattatacattttcactaattttaatgaataagttttttattaaaaaatttattaataaatgtgttgtaattctttcatttaaattcttattaaatttaaaatatattaataaaatctaattaaaaaaacgataaaaaaaaatctcaccggcatgggattatttatgggattttttctataataaactaataaaggccgtattttacatttataccctataaaggaaaagtaaacataaatagaaaacaaaagtttctatttacaaaaataccagcttaacaagaaacacggaggaaactcctccttcttcgtgagccagccgaaacatcccaatccaccatatctccactattttctttcaaaaactaggtaaattagctcaaatcaaggtgtagatctcaaggaaaaaacaataaaatcccaaaaaatccaaatacaaaaaagggaaaaagaaaaaaatagagatatcgacctccattgctgtaaaaaaaatacaaaaatagcatacaaacaaaaactgaaagcgtacagaggagaggatttgaagaaggagatcaaaaaaacattgaatcttacccataatcgaattagagaaaaaatttaaggtacaaaaatatgaaaaaaacaaacatcatctaagcttccagaaaaaaactagaacgcaaccacaaaataatattttaaaatcacccatacataaacaacctaaaagatgaacaactgggaaaaaacatattaacaacaatttgaaaaacaaaaattactaaaaaaattgctaactgggaaataaaattaaacagcactaaaactattaaacataaacattaaaacaactgtttagaaaaagtcaatagaacactaaaagaacaatcaaannnngaattaaaaataagaaaaaaaatgttatgaaaacacaaaaccttcctacaaaaagtgagaataaaaacaacaataaaccctaaaaaaacacatttaaaacttaaaaataactaataagaaagctcaaattgagaaatagaaacaggacatagtttggttaaataatgctaaaaactatttaatagcagcaaccaaaaaaaaaaaaaaaaaaaaaaactaaaaaacaaaaaatgagataaaaaa

SEQ ID NO: 145532 - DNA, 949 bp, Cannabis sativa
gacaactaggaagtcttgcataatagtggcagacaagggtgcctcgcccaaggttaatgcgagctcgattgtgcctagactggcagtgctgtctccagtgaaactgcaaagatttaccatacaaggcctcaatttgatttttcgagccccatcttcctcagtgtttccttataaaggatatttactgagcttccggtatctattaacaccctctttattttcttattagcgggttgaatggtaatcactaatggatcgacgtgaggatatctcacgttcttctcatcttcctccgtgaatatgattagaggttcctcagttttcaccttcttagaaggttcttgggcgaatgccgactgttcattctttatctctttcacatatctcttttgggagttactgctctcccctgtgatatgtggccctcccgaaataaccaagatgtcctctccttcaataggaagaggttgtaacccctggttatttgggttattgggcagactgggctggttgtatccatagccctgtctcttcacgtactgtttgaaatgacctcgagcgatgagactttctatctcatctttcaattgatgacattcgtcgtcgtgtgcccaatatccttatggaatttacaatacttgttaggatctcttttgctcctcgcattcctcatgggctcgggcttgctgaaggcgaccttttgctcatgtgcgaggtaaatattctctcgagtttcattaagctcggtataagtagtatacactgggacgtacttatcgtgcttcttctatttctttttatcctttgacggttccttaaaactgtcttttctcttcgagccagaagcccccgagttatcgattcccgttgaaacagtacttgtcgaaatgttgctgagtttgcctctcgagcctgttttcaacaaattcatttcttttcgagcttcctc

SEQ ID NO: 145533 - DNA, 523 bp, Cannabis sativa
ctaggatgattatcttctttcaaatatttcttcttacctatttttgttggtttgggttttgttttctggggttgttttgggaaatttttagcaacagaggatgatggagatgaacgtgtaactgccatttagattgaggaggagtagtatttatagagaaaaaggaacgaaaatggagggaaaaattaagaggaaagcttgagaagaaaatgtaataactaaatttttttgaaaagaaatataaaactactcacatcttgtaaccgactgagctaagaagaagatgaacatggattatgggagagtggatttatgtaatgattatataacctttaaaatatttgaaaatattttataaaaataataaaacccaaaaaaaaatatagaaagctgtcacaaacagtaacacaacaagtcaaatgatcctttttctaaaacactattttttaaaaaatgaagaggctaaaccccatgaagacaagccacataatatataaaaacatataaccaatggcagtatact

SEQ ID NO: 145534 - DNA, 581 bp, Cannabis sativa
cctctagacagagctataatgacctgctaagtcctacaggacatgacctgccaggtcctacagcccttgacctgccttgtcctgcagcccttgacccgcaggccttgtccttctagatcctataggccttgtcctgctaggtcctgtacaccttaaccagccaggtcctgcataccttgggcggcctgacctcccctgtaggtctatatgcagccataattacctggtaggactctatagtggccagattgatacaagcatcctagtggacccaagtggcaggcccatgcctctaagagtaggcccaccattggtgcctttgactgaaggaagaatggcaacccccaagaacaacaattaggtttcttccccggtactatgcaagagagacgagaccaagaattggccagcctcacatgggcttgggaaaagaccttgagttggccagactcagggaagtttaggccgtgcgggccttattgaagaaccatgcattgttgactacgatatatttgctcagtagagacgtgaatcccttaaagaatcacgcactcctgactgcgatatattcgctcaattga

SEQ ID NO: 145535 - DNA, 1045 bp, Cannabis sativa
  modified_base (749)..(753): a, c, t, g, unknown or other
aatcctcctgctgactggcagcagatgtttcaaaaaatgcaaagtgtcatacttcgtcaagaagaagagttgcgacaattaaggcaaccgacaccgagcccctgttgatcaagtgttacgaccagcacctgtgccagtggtgggtaaccaggggtttgttatgacgcataaagactcggtatttgagcagttcgtgaagctgcaacctccgacttttctgggaggtattgatataattaaggccgagtagtggatgagcactattacccgtatcctggataatatgggagtgacgagatttgagaaagtgaattgtgcaaccttcatgttgtaagaccatgcccgcgtctggtgggacattgtgggtcaaacctgggatgttagtgtaatgacctgggaataatttaagaatctatttgaagaaaagttttacaaaatcgctgtgagaacttcacatatggaagattttgtgaagcttactcaatacaccctggagtttgatcggctgtctaagtttgctggtgatctggtgcccacagatttcaccaggaaacagaaatatgtgagaggattgaataccataattagtcgggacttgaagattaccacttcacatgaaactttgtacaagaaagtggtagagctagccttgattgttgaggaggctaagcaacatgttgcgaaagagtagattgtaaaggataccgtcacggcatcgaatcctcttgctagtggtaatgtcagtaagnnnnncgacagtggcaaccctgatcacaaatggaaggctgagtcttccagagcatcagggagtattagaaaatttaaaggaaattgaggtggccatcaaggtcaaggatcctctttcagatcatatctagaatattcaaattgcaagattgccattagagtgaatgacgagccaagattgcatcttatatttgatatggattatatgaatcgagtgtccaaagattacctggatagatgtgtgatcgtatttattgacgacattttggtgtactttgagtcagaagaagagcatgag

SEQ ID NO: 145536 - DNA, 641 bp, Cannabis sativa
attcattgaatctggaagtgataacagactttcattcttagaaagatccaagtatctcaattgtgtcaactgacctagtccacttggcaaagaattcaattcacacgaagaaagttcaagatgccttaagttgatgagtttctcaaattctctaggtagtgctttgagatctgagcaatgattgagtttcaacgtttgcaaattcaccaaattcgtaattgaattgggaagtgactcgagaaaagaattccgtgaaaggtctaaatatctcaggtgtttcaacttgctgatagaatttgatactatcttaatacttgaattgttcaaatccaaacaacgtataaccttacagtttgatgttatggcatcgcaaaatgactcctcgttatcgtttaaagtactaagaaatgttcgaatattttttgcatgagccaatgaagctgaaacttcacttcccgagtaagcatagttttcaaaaaacacatgaagagtagttttcttgatatttccttgaccatttaaaaagtcaaaagtagtacattcttctcctgctacttgaacggcaagatcatgcatcaaatcatgcattttgcatttctttataattccacattcatctacttcaacatcttgaaagaatg

SEQ ID NO: 145537 - DNA, 1645 bp, Cannabis sativa
ctactcctctcattctattcagattcgtttctgagatcatgagtcgttcccaacctttcgtatacagatacgcctggctatcttagtgattgattggtttggttaacgtgctgacttctcccgttgaattactagacaaggtcttcccacctactgcttggcccacaagtggaacttgtgatcggagatttggctgctgacgatttatagtctgagaagtattcattgctagatcttcgtctgtttcacccaggggaatgacattcgggtgtttctgcccaatagtttgataggcttttcgtatcagcacattagcttgccgactacgattgtcaatctctgcatgatgagcccttaacgcttccatctctttgtccctccattcggccaacatgcgtctctgttcctcaaacgcaagatttaccacagcgcagagttcctcctgatcatgatgtagggtgttggtatgcccttgcatgagtccaagagcagcacagaggttttggatttgagtatatcatctccaatggtcgttccaacgttggtagcaggcggaacggctgtgttatgaatgccttggctgggtgctgaacgagtattcccagtctcttgcacaccaggcacgatttcatccacaagagtcgtcacaccatgacccgcatttgacggctgcttgggattaacagctggcggaacccttgtgtttcgtgggtgctgcaatgcaggatccaccgcctgtggatttgtcgaatcaaccaggcccctacgagtctgtaccaccatcatacttatggttagatttagaatgaacagtgattcttgattttgctctcaatgaaagcaccaaaatgttgacctcgctttaagccaacgacagtgagtctaatttagtaagcgacaagtactttataacgattgaaatagaataaagcaatataaagacacataaattttgtagaggtttagccccgagcagttcgataatagcctaatcctcgttatttttattaactcaagaaccaggagaaagattccttttcttatagctcttacaacaatatctctgaacatgaattcttaaacaatatctctcaagtaaaatccttcgaccctttgcctagtgaatatgcatcactatttatagggctatgagcatggaaaggaagtattttccttctcgttacaatggatataagaagaaagattgcatagtaaatacaaaatacaccgattgcgggatttggacagcttgccatatctctacaatctgatccccaagttatagagatttccttgatgactcatgatgcgaaagccgaattcgctaagcgttggtcactatgtgcggattgctgactgcttggctttgagcatgcatatgaggtatcatgttcggactatatcttccgagtagatactcggaatcaattccacgcgtcactactatgtgatgccacgttagagtgcgaaaattcggataacaaaagtaaatatgtgataaaagatgcataataaaatataaaaataaatacataatcctaataagtaaccttatactacaatatctccaactgaatcacaaactaaaaccagtttgggtaacatttgatcaaacaattggagtttttttataaaaaaaaaaaaa

SEQ ID NO: 145538 - DNA, 672 bp, Cannabis sativa
ctcgggtgcaggagtgataatgattttcaccagaaaatttcaaatttcgatacgccttaagatcccaatttgacacttcaaacaacgaggcttgatacgaggctttgttggctgtgctatagtgacttgcaattgattgtgaaccaagttctacgcgaatactaggcaaagggtttaaaaatggtaaaatatttggagaaggtccataagaacttggagaagtttgattactttaaaattgaacaaattctaagagaacataactcaaatgccgatgccttagcaaaactgggctcgcaaaacgagcttgataaactaaatttggtaccgatcgaagttctaaacgaaccaagtatatgtgaaacggaagaagttgaaatgatagatgcctcgcctacatggatgacactcataattaactatctacttaatagacgacttcctacagataagaacgaagcacacaaactcttgtattcagtgcctcgccatacaatagtagaaggaaaattatatagaaggggttattcaatgcctctcctacagtgtgtactccccacagaagcaagtgagataataaaagaaattcacgaaggcttttgtggggatcatgcgggttggcaaagcttgtcaagaagattattcgccaaggatactgtaaagcccgcttag

SEQ ID NO: 145539 - DNA, 520 bp, Cannabis sativa
agaaagagagaaatggagagagagtgtttttcctattttttgatttttttaataaattgaaaaataaaacttggtttaatctaagtaatatcagcaaaaaattagattaataattcaaataaaatctcagtaaaggacaaaaaatcccaaaaggcaaaaagaccataatgcccttgcctacaccaaaagtcataaaattacttagggataatttagtcaattctaaaatctcgactaatcttgacattcccaatgtctaactatactgccctgctacactaaaaatactaaaatgtgattctaatagccaaacatcgcgttccaatgttgtggggcacaaaacatgcaaaaatatgaaattccatatatgacatataaaatgcattctgaattcaactaaatctccgtaaaaatgacaattcataactcatatgcaagtttcataattaaaccatatatatctgctaatttttaaattaaagtgaaacggtctttacaattatccccccttaaaaggatt

SEQ ID NO: 145540 - DNA, 691 bp, Cannabis sativa
atcaatcaatgacgtggctgcatggatggaattgatgtgtaagtggtataattgtaataaaagaaagaggaaaggtaaaaatgatgatgtaagcgtgtaggggttttttttttgtagtaaattaagtaaattggatttttgatgtaaaaatttcttgaatttttaacatctaaatcctctcaactattaatttatttgcgcttaatctcttaagcttaaatttaataataacatcctctgaactaataaattgtaaataaatttaaagtgacgtcaatttatttcaattaaataacaacataaggtgtttatgtatctatttttgtatacacatttatattgaatccacccaatataattatttaaaatatttacaaaaagaaaaaaatcattttagaataaaaataatataaatttcatattcttctcttttggaaaaaaaaaacattaataacaataaaaataaaaaaacttaaaaatcaacaatttttttttaaaacaatagaataaataggatatttaccccccgaactattaccatatgtaattcttaccccctaaacttttccctttgttaatattccccccaatctgaatattggaagataatcaagtaaatcttaagatcaagaagatgactatatgttagtcgataagggtggtattttagtactcttagactacaccaaat

SEQ ID NO: 145541 - DNA, 574 bp, Cannabis sativa
atcggcaagagaggaagaagaagaagagcttgaagttatgtgttttgcttgctttcttgccttggaagcaacttaaataaggttcctctctctcttttttttttttttttttgtatgcttgtttttgaagttacgtttccatgtttttgtattagtctacaaatttatttgaaaaaaaattaatattcataacatttgtacgaatgccacgatctttatcatgttgacactttgatcagtggcagggatttatatccaaaaaaacgccaatgtcatatcgttttcttaatatagcagctagagaatagctaagctaaccaaaagtacactattttgtccaaaagggttgttgtactatgcagtctatacttgtacacagtgctaaagtaggccttttcaagccaaaattaaattagtggcccaaaccaactgatattggtataataataaaaaaaaaagagtaggagacttttattcagcgggaagtgtcaatgcttatatagttattttttttattaaacaaaattttaaattttttgaaggtaatagaaagttgttttggagagtgattcaa

SEQ ID NO: 145542 - DNA, 659 bp, Cannabis sativa
ataccacatgaaattatattatatctaatatattaataaattatggtgtatatcatattttcataaccacattttatatagaactaggttgatgttacgtgcaatgcacgtataattagtttttattttaattaagtttaattaagtgatcttaagtgcagtacaagtatgtttgatattttttaataaggtaatgtatttttattttttgatttttaaaatagggtttgagattttaatttttgagaattttttttggctgactacattggtgtactgtttagatgtgattatatacatacatattttatatgtacaataaaagaataattttcattgttatacatattttatacgtattttatattgacctctttatatataaagattatattagaaaatattttgataaaatttgagtttaattagaaaattaattacttttaaaatatattttatatattatgtctaagtatatatattttaaaaataatgatagtgaagtgatagatacattcttataagttatagttaggaaagtgtggttattataaagtgtactttgagaaacatagatatactaggtgaatgtacgtgccgagccacgtattgctagttttatttaagattctggtctttttaagattttgaatgtattt

SEQ ID NO: 145543 - DNA, 657 bp, Cannabis sativa
  modified_base (586)..(604): a, c, t, g, unknown or other
gagagagagagagagagttggtttctatttttgctctttgacttaggttagaattaagacagataaaacttaacttaactttatctgctaactaatactcaacctactacactaataaaacaaaggaaatattaatttcctaataattcactaaaaacaaaagagggtaaaataaccaatttctgtttccttcaccaagaagtagccttgaaatctaagggtatttttgtcaacctataaccccaaacattcttgatattctcaatgtctatctagatcgctctgctatttctaaaatactaaaccataaaaagtgactctataggccatacgtcgcattccactgttaccaggcataaaaatatgaaaaatataaaatcatatataacataattagcacatctagaattcaaatttctctccacaattgcataaaaataataattaaaagtctacttttgaaattagaccctaattatctactaattcatcaactgactctcacattgcccgtttagccagtctggctagggtagaatagacatgttctgccactaatgaggaagaaactgttggaaattatttnnnnnnnnnnnnnnnnnnntaacaagtatgtttgattaacatcctaatatgaattctgaaacaataaaataa

SEQ ID NO: 145544 - DNA, 512 bp, Cannabis sativa
tttattttttattttatggaaacatgttttcattgcattttatctattgtgtttccttcttctttttttttttttggagatttggtcttttttggtattttaggaaactaatttttaattaattaattattttgtggtttcctttttggtggcatttttggatttggttgggttttttaattatctgattttgtggatatttgatttttatttgtttttttttttcttgctacccacatctcttccccttgataatatactcacccatgttcttccctatctcactctctcactcttcttgatttctcgagtgtgaatgttcttttaatgtgagaagtttctttacttttgaccttggcttccttgatagacaaaaagggggagaagtgtttatgtgtctcattgtcaactactcagggggagttgtttgttttgtttttggtttgtaagcttttccgtctaaaaaagttctatgttttatgtgttagagtgttttcatgcagggggagtat

SEQ ID NO: 145545 - DNA, 852 bp, Cannabis sativa
ttttttttttttcattttcttcttttttttttctcttcgctataggcactggagtagcagcaacaagacctagccgcccctcctcttccttcaattctttcacgcctactccattttttttcatcacatatatgcatttttatcatatatgacaattgtcttcacaactattttcacctaggcccaattacaaaagtaaaacaaagaatcacgtccaattacaaaagaaaacaaagaatcatgttcacttcaattttctctcatacataatacatgcctttatttcattttttttttgtctttttcaattaaaaaagcatttgtccaataaaaatgataattttgggcctttatgaatctataacctacattgacttttatgaaacatctttcatataacttttttttttttaattttgataactagcccaaaatatacaattaagctcttacaaaaataaacaataattgagaataatatttttaaaatgagaaactaaataaaattgataaaatattacaaaaattaaccaaaactaaattataaatactaaaactaatatttatgtaaaagtagtaaaaccaaataaaagtcactaaaataaactaaaaatacttgagaacaaaactaatttaatgcgcaaaaagatataaataactctattttcatagagttatcatgtatgttgcccaggtgtgtactgtccctgcttcaagcctccattgggccttccccgtggatttatggctcttatacacgagtacgtcactatggctgcttcttggactgacgactggccctacaaaccaacacgagtgtttccagcatgctttttcttcactcacacgctt

SEQ ID NO: 145546 - DNA, 515 bp, Cannabis sativa
tgttagtcgataagggtggtattttaatactcttagactacaccaaatcaggtttttagacttacgtttatgctagaaagtctactaatgaaatggtgattactctggtggtggagtagtgattttggagaagtgtaaaaaccaatctgaagtctctaactctaccagtgagactggatgttaaagttgcaggaaagatacttatttagtctatggaaagttctatacagtttttggcgttgtaccaataatttattaactattagtgttacttcttgactaacacaaatgtagttgccaaaaagtaaagaatgcagtatccctagaggagtagacatattgagaagaatttaacaatatcaagggttttgtgattaaggaaatgtaatggtatgaaaagattgtattgaatacaaacatgtcagatcttattacaaagataatactacatagtacacttgatctggatatcaaggtgttgagattaattgaaatgtactttttgttttatatta

SEQ ID NO: 145547 - DNA, 798 bp, Cannabis sativa
aatatgtaagaggactgaatgccattatcagtcaggacttgaaaattacgaccaatcatgatgctttttatacaaaagtggtcgagttagcattgattgttgaagaagcaaaacaacatgtgatcaaagagcaggctgctaaggatgtcgtcatgacattgaaccctaatgtgggtggtagtatcagtaaggggaccgacaatggaaactcggatcacaaacgcaaggctaaagcttctggaacaccgggaagtaacagaaagtttcgggagaacagagttggccatcaaggttgcgggtctacatttagaacttacctagagtgtcctaaatgtaagaagcaccatcaggatgagtgccgagctaaaaaaaatttccagtgtagtatggtgggccatttatctgagactatccgcaatctaagaaagaagaaccaaagaagaaaaacaatcagaatccaggatgtctatttactatgactcaggctaacgttgatgctagtccgtcatgggtgataggttagttgtccataaatggttgttcttattcagtattatatgattatggagctattcattcttatgtatcgagtagagtaatagagagttctcataaactgtttgatgtgcatgcttcggggtttggtaccctgttaccctccggagacctaattatacctactcgatggataaggtctttgtctttttggattgacgattatgaattaaccgccaacctgactgagttataattgtctaattttgatataatcctgggaatggatttcttgtctaagta

SEQ ID NO: 145548 - DNA, 510 bp, Cannabis sativa
ggggaagcgaacaccaaatcgaccaggatttgcttcaactattgcgcgaggatcatcctcgtcttcgttctagtccaacctcttcaagtgacggacatttgagcttaagtctttcgtccagacataggatgatggctcgtacaaaaaagacaatgcgtaaagtttacgcatctgaccctcaagtggcctggcatgccaccttaccaagtgtcgaacaagatctgtccgtccaggaggagaaggattatgaaggggacgctgaggtccatgagattgacgagtaggacgatgttcgtcctagcagtccttctgtggcggaggaagaggaggaggttgcacccccaaactttgggggatataatgaggctggggagctaatcgatgcagatggtgacgtcctggttcagggtgtagactatgccggtgaggaatttactgtcgcagttcctcatagaaggcaaggcgctttgggtgccaggtgggtgagccctccgtccaaggtcactgagg

SEQ ID NO: 145549 - DNA, 776 bp, Cannabis sativa
  modified_base (419)..(423): a, c, t, g, unknown or other
gtcttgggtcatggtttgggtgtcaggtggatgtttgcgtctaggtttggcttgggtcctgagtcatggatccaagtcccaaatttaggcaggatcttaagtctcggtccgtgttcagtactggtccttgtcttgggtcttggcttggtctaggtttggatcatggttcagttctaaggtcctaggttcgagtatcgggtcccgggtcgccatcccggtcccatgtcccggtctcggtctcggtctcggtcccaggtctcgatcttggtcccaggtcccgagtctcaatcccattcccaatccgggttctagtcctagtcctggttcaggtcttggtcctagttggggtttaggtcccatacttgatatcggtctaggtccccgtcccgggtttgagtccgagttcttgtacgagtccnnnnntgggtctgggtccaagtttcagtccgtgtatgggtccgggtcttagtctgggtctaggtttgggtctgcgtttgggttcaggtacaggtctcgattttggccccaatcctgggtcacgggtcttgggttacggaatttgggtcgcaggtcctggcgcaagtctaggtttgggttcaggtctgggtctgggtattgatcccagcttgggtccggcttattgtgcggttttgcgtctaggtctggttttggtccaggtctaattccggttccacgatccttattccagttcttattcttatttcgattctcgaatccaagtttgggtttgggtcctagtttggaagtggttccaa

SEQ ID NO: 145550 - DNA, 666 bp, Cannabis sativa
gaagtggaataaagccttgttggctaaaaatttgtgggctcttgcaagtaaacaagattgtctttgggttaaatggattaatttgatttatctgaggactcaggacatatggagctacaccacgaagtatgatgattgttggtacttcaagaagattttgaacataagagacaacatggatgaagctagactttgtcaagctgtcaaaggaggtaagttcagtgccaaaaggttctataacttgtctattgaagtggctaaggctgaatatgctaaagctagttgggataaactcatagtgccgaaacatagatttgttttttggcagattttgaactcccaattgctgacccgagattatcttggtcgtttcctttcaattcaaaatgtccactgtcctgtttgtgaagctgaagttgagacgcatgaacacctttttttcaactgtaaattcactaaacaggttatagatgcagtcatggagtggttgggctgcttctcttggcctagaactaacttggagctgttgaactggtgcaaaaatctgaaccagcagcctcagatgcgggtgctgaatattgtcatagcagcgacaatgtactcaatttggaagaatagaaacagctgtgttttttatctttgttgtgccgcccctagaagagttag

SEQ ID NO: 145551 - DNA, 1149 bp, Cannabis sativa
aaaaccctcaaaaatccattcctaatggaattaaagaagtcattaactcgccggtctctatcaacaactctgagcttccgactgaaacttctaaaactcgtgagcctggaacgaagagctttaaggcgtgaaatttctcggcgaatgtcaaactcaggaggaggaggtggcaccgcgaattcaaccagtgcagtggctactctggtgagaggttagggtctggcagtgagaagacgaagaagaaaagaaagaaaaagaaaaaaaaaagaaattatttttaaataatttatttatttttttaaaattaaaataataatttggaccaataatattttgacacgtgacaattttttaaaaataaacgactcagttaaaattaggactaacagacaaataaaaaacatgatcttgaggactattaccactattttttaaagttagggacttatctgtatcaaactgaactttttgaggacttttgccgcaaatttcccactcatttattagagaacaacctaattactcgaattggtcttggtagttattgatatcatttccactgttacggattgcttagtggtggcggttgaagggattcacagtcaattaataatgactttattttggtttatttagtttacagttttgctagagttttatgttttttttagagcatgttttcaatgagagtgatgttcttactgagatcatttgcagtcaattaataataaccttattttggtttagtttcatagttttgctagaatttcatgttcttttttagagtggattttcagtgggagtgatgttcctactgaggtcatctgcagttaattaataatgacatcattttggtttagttaattcatagttttgttagagttttgtgttcttttctagaacgggctttcaatgagagtgatgttcctattagagccatttgcaatcaattaataatgacctcattttaatttagttagttcatagttttactaaaattttatgttctttttttagagtaggtttttaataagagtgatgttcctactaggtcacagggccggccctgggcataggcgggctaggcctgtgcctagggcccacctatcccaggggcccaaaaaaaaatatttaccttttaaaattata

SEQ ID NO: 145552 - DNA, 822 bp, Cannabis sativa
atattttttaagttaaaacaaataatttataaagtttataaaacatataatttatattaatattaataatatatataaaaacaataaaaattttaataacaatagtaatttaatttttaattaaaaattaaacaattattacacataattatttaataattgtctaatatattacattaaactaataattattatccacacataattaagaacttaaacaaataattattctccatatataattaaaaattaaactaataattattgtccgcacataattaaaaacttaaacaaattattattatcttcatcgagtatattatctaaaaattttgagccgtcgttgttcaaattttaataggttgtttgtgttgggttttatgtccggactaaaattctatttcaatgttatcttgaatttcatttatcaataaagcaattgaattatttaattacttgtttaaatataatacttggttcacatgtatgcttcagggtcatttgtttgatttaaattcttttaaatctttatcacattgttattcataattactgtgctctctacacagtggaaagtaattaaggttatgtgattaaatattagtcccacgatttatcagtacacatgatttacactgatatgataatcaacaatgtggtttacttacacttcgatagtggtatgtctttttcaaggcattggtaaagtaagcttgtattgaatgtattgttatgcatcgaactggaccgatatttacatggaaaagatattataaacttatcgtaatattttttcaaataaatatcacttagttgatttta

SEQ ID NO: 145553 - DNA, 1264 bp, Cannabis sativa
  modified_base (177)..(177): a, c, t, g, unknown or other
tgattatactctgcaacagaaaggaatcaagggttagagatctaagtggaataagacacattatttcactgcacccactgtaagattttcttatctttatatgtgttttctttttatcattttagaagttcatatttaatttgttaatcaagatacttgtgagtagatctaagatcntggtaaaattaattccaacaaaaagaagaagtgtttaaaaaactggagttccaagctcttagttcgggtcttctgggctggtaggatctggaggatctgtcatttgaacgggaggtacatcagcattttggccggaggtagaagtagccgcctcggttgcaccataagccacttgggaagcacagaacttgaggtacatgtccttagcaacacccaagtagtcgaagtttgcctgagaattagccttccaaaagtcatagaagagcaagactggctgtctccaaggcatgaactttctctccaagcctcgtcacctcggccttaagctcctcctcctccacccgacgaagaaccgctcgaagagaagtcctttcatcttgaaggttgttcacttcggcagataaagtctcgatggtctcttcaaatcagtttgaagcctcgatatccttagtcagctcagctattttcttctaggcggtgaaaagcttcttgttggcttcacccagctccatccgaacagctcccagttccaccctggcttcatcagcgtccttcctcgccaagtccacctccgccctcatggtgttggaaaaagccacgttcttggaagcaggagacttagcccgggagtatgtgtaggccaacttcagaccggcctccacagagaaaaaactttagtatttgagccaagtaaagaagattaaaggaaagtgtcaagaaagacttaccctagtgaattccttcaagactcctcccatcaacagctccagagaagagtcgttgtcagtgccggccagttgctcactaacctcaggaacaaactggttcatatagtgggcgagcatctccttgtctttcttggcctctggaagcaccgacaaaggtggagtaggggcccgcatctgctcgggtccactcttcatcagctcatacccacctttcggctgttcaggcctttccaaactccctcctcaagactccttggacatagcaactttcggagtagaggggtttgcaatcattagctcctcgaaaagatcaatgacctccccgataggcgtcttttccttagaagaggccccctcac

SEQ ID NO: 145554 - DNA, 2201 bp, Cannabis sativa
  modified_base (270)..(270): a, c, t, g, unknown or other
tggcgagtttgtattgacttcacatacctcaacaaggcatgccccaaagacttttttccacttccaagaatcgatcagcttgtggatgcaacaactgggcacagaatattaagcttcatggatgcttattcggggtacaatcaaattaaaatgcatccaccggaccaagaacatacaagttttcgaacagatatgggtctatattgctattaagtcatgccatttggtctaaaaaacgctagagccacataccaaagattggtaaacaanatgtttaaagaccagatcggacgaaacatggaagtatatgtggatgacatgctcatcgaatccaggaaggctgaggggcacatagatgatctggacgaatgcttcaaagtcctcaggaagtacaacaggaaactaaatccctcaaaatgctcctttggagtcagctcgggaaagttttttggctttattgtcaatgcccgaggaattgaagccaatctagagaagattcaagccctcctggatatgaaatcgccgacaagaaccaaggaagtacaaagtttgactggtggatcgccgcactcagcagatttgttccaaaatcaacagacaagtgtgttccgttcttcaacatcctgcaagaaaataagcaatttgagtggatagaggaatgtgaaaaagcttttcaggagctaaaagcgcaactcgcaaagcatcccgtactctcgaaacctcttgacggagaagaacttgggatatacttagctgtcacggagcatgatgtgagtatcgtgttgatcagagtggagaacaacatacaatacccggtctattacattagtaaaggactcattgaggctgaaggccgatacccattgatagagaaaatcacttactgcctgattctagcaacaagaaagttaaggctctattttcaagctcatgctgtccgggtgtacactgaccaaccgttacgccaaatattgcaaaagccggacgcttctggacagttactcaagtgggcagtggaactgggtcagtatgaaattactttccaaccccgaacaataatcaaaggccaggccttagcagactttgtggtagaatgcacacacaaagaagaaagcatatcgcaaggcaaccccaagcaagtacaaatacctcagccaagtaacagtgaagacaagccgacttggaaactacatgtggacgggtcagctacagatcaactatccggtccaggaatcgcccttgtaacacttgggggcaacacctgcacgctacagccaagtttggatttagagcatacaataacgaagctgaatatgaagctttgatcgctggcctaaaactagcccgagagatgaaagccgaacatatcaaaatctgcaatgattcacagctggtggtaaatcatgtatctggagaatatgaggctcagggagaaaagatgatagcatatctgagcaaaatacatgacctactcgcacaattcaaaagctacggtcttagacaaattccaagggaagaaaacacgactgcagacgcattagctcggctggcgagtagtaatgtaagtgataaagagaacttggctcctatccagttccttgaagagcctagcatcactggcacggaagatatcgaaatgattgttactttcccaaactagatgacgccaatagcagcctacctcaacactggggaactcctagttaatcgaaatgaagctagaaagatgagaaggaaggttgcacggtatattatagtagagggaattatgtacagacgagggttctccatgtcgttgctcatatgtcttacctaagaagaagctgcatgacttttatctgaagtacacgatggattttgtggaaatcacgccgctgggcagattttatctaagaaaaatctaagtcaaggttatttttggccgacaatgatcgaagattcaaaggcctatgttaaaaaaatgtgacaaatgccagagattttcaaagataccttgagctctgcccattgagttaactcagatgcaaagtatgtcgccttttgccatttggggaattgacctgatcggaaaattaccgaaaggcaaaggtgcagtgcagtatgcagtggttgcggttgattacttcactaagtggacgaaagtcgaaccactggcaaccattacatccaaaaaagttcaagacttcgttgtgaagaacata

SEQ ID NO: 145555 - DNA, 613 bp, Cannabis sativa
agacattgctatggacttcgtggttggattacctagaaccacaggacagtacgactctgtgtgggtcatagttgataggtttactaagtcagtgcattttttaccggttcggacgaacttctccattgatcaatatgctgaattatatgttagagaaattgttcatcttcatggtgtcccaaagtccattattttggatagagattcgaaatttacattaagattctaggagagtctacatcgagccatgggtactcaattgaaattcagcacatcatttcatcctcagacagatggacagtccgagaggactattcagatcttagaagacatgatttaggcatgtgtgcttgactttgaaggatcatgggtaaagtaccttcccctgatcgagttctcgtacaacagcagctatcaggcaacaatcgagatagctccttatgaacttttatatgaaagaaaatgtagatcacctattcattggaatgaagtaggtgaaagaaagttctaaagtcttgaagctattcaaagaacaagtgaggcagttgataaaatctgaatgcgaatgctcgcggctcagagcagacaaaggagttatgcagatccaaagtgt

SEQ ID NO: 145556 - DNA, 669 bp, Cannabis sativa
ggtgtaatctgaatcagataaagaacatgagttgcatctcagatcagtttcacaatgattacgggaccataagctgtatgctaaattcaagaagtgtgagttttggttatcccgcgtctcatttctggggcacatcgtggataaagatgggatcatagtggatccgaccataattgaatctgtttgggattggtcgacactagagttagctactaaagttagaaactttctgggcttagctgggtattgttgtcgattcgtggagggttttcttttcaaagattgtggtacccttaacgaagctgacattaaagaacctgaagtttatttggaatgatcggtgtgagaaaagttttctggagttaaagcagcgcttgattaccgctccagtattaactcttccttcagataaggaaaactttgtggtatattgtgatgcctcgagacagggtctctgctgtgtgcttatgcaggctgagagggtaatagcgtatgcttatcagcagttaaaggagtacgagcagaggtaccctacccacaatctagaacttgcagcagtgatttttacgctaaagatttggcggcattacctatatggcgagaaatgtgagagatacactgatcacaagagtctgaaatacttccttacccaaaaagacctgaatatga

SEQ ID NO: 145557 - DNA, 723 bp, Cannabis sativa
  modified_base (513)..(515): a, c, t, g, unknown or other
gaattaagatctactggtcaacttgagtggaacaattttctcggtgaattacaagctcctaaattacatcaatcacaacactgataagcgactcgctaaatcacttctcggggacttaaacttgaaactaaaagcttttctatcgatgaataacatggaataccctaaataacacaaaaatggaaaaaactagggttcccaaaattgccccaaccgaaatttcggttctgggcttgaagccaaccgaaattctggatcctacaggcctccctgaaccggaatttcggttcctacaggccctgaaccggaattccggtttaatgcaggaaagaataaaaatttcataactcatgcaaatcaaccccaattcaatccaaactttccagaccttttctacacaccctagagaacatattcaaggcaacaaaacatccatccatacatagaatcaaattccaccattaaagctccaagtttgagtccaaaactcaaacttcgttaaatctaactaannnatcaacaaaacctgcttgaatccacataactaaacatattatagctactgaaaacataaacaaacaacaacaacaagttcagcaagcaaaactacaattcatgcaaaactttatttttcttacaactcaagaaaccaacaaaaagctacaagaagcttaccaagaacttgagatcaccaaatccttgagaaaacagcttgaaatgcag

SEQ ID NO: 145558 - DNA, 758 bp, Cannabis sativa
gtctatgtccaagtttaagttcgggtttggatctcgagtttgggtccgagtcgaggtcctagtatgggttcaggttttagtctgggtccgggtcccagtctgagtcctagtcccttttcaatatcgagtctggatcctgatctgggtcctaatcaaagtctaggtcctagaccaggttctggtttgggtttaggtccttagtctaggtctaggttcgggtctgtatctaggtctgggtttggggcctgggatccaatctcggtaagggtatgggtctatatccgtgtccaggttagggtgtaggatttagggttttgggtttagtgtttagggatttagggtttagggtttaggggtacatgtaaaaattttaaaatttagggtttacggtttagggtttagggtttaagggaccgcttcaagtctcggcttcaatttcgggtcacatggtatgatttaaggcttgggagtgggtctgggtccgagtccttatctgggtctaggtccgtgtttgggtttaggtccgagtcttggtcacaaatccaaacacccacctcatgtttagtctagtttgagttttgctacggttttgggttctggtccgggtctgggtcttggtcaggttcgattccctgatttagacaccgattatgcgtcaggtccaagcctcgtttcttgggtcctgggtcacgggccaaaatcgagatcctagtccggttctagctcatgtcttgggtcatggttcgagtgtcaggtgg

SEQ ID NO: 145559 - DNA, 555 bp, Cannabis sativa
  modified_base (240)..(243): a, c, t, g, unknown or other
aagtttgctaacttataagaactgtggggaggtgctgccgaaatttttacaaaaataaaataatcttaagagcgtagattgtactatatgtatatttcaaaccagaatgggataggttctttactcttttagtaatggagtgagaaggtggattaggacacttgcacattttcttgtttgtgttttaatttttttttgttaattacttcatagtggaagatgcctaccaaccgaagttgnnnnaaggcgcaccggcgctctgcagagtttcgaagtggcgcaacgaaccaagtgaattctgacggattagctcgatgcccatgcatgcggtgtttgaatgtgaatttccacacacctgcatctataagggttcatttatttctcagcgggatccaaccttcgtacaatccctggtatttccacggggagactttttctcagcccacagttgaactttcggaaaatgacgaagaggaaatggcagatgtgttggcggatatgttaagaggggaccctgggtttgacgaatctgctaacactactgattctttcaat

SEQ ID NO: 145560 - DNA, 821 bp, Cannabis sativa
aaaggtatggagtaaaatgtagatttcaaagaatgttatgcagagaagaacattgaggatgacgactttgatatactcaaagacgcatgtttttggaataaaggcaaatccctcgtgagagtgaagaagacacaatttgaaaatgtggctttaattgaggatgactttaatgagaaggcttatgaggaatttatcaactcaggcagaacaattattggaccgttcaagaccaaggaagcgatgccccgtaagctttttgggttttacaagttcattttcagcagtacattagatccagggtaagtaaatgttattttggtatttgttattatcatatacttataaaaataattaataacagttacattcagtataattgaatcagatatgtgcttgcaaaatatggaaagtatgaagtggacaaaaggtgcatggcatcgttgtgacccttacgagaagttgagggaaccgtgagtgtaatgggttactaaataggttttatttcgtgtacatgtctcattcatattttattttattgcagatcattgactgttattctcaaatcatgaacaagtacgagcgtgaaacccgactacctaaccaaccttgtgcttggtacatgcccacccgtatctcggtaatggctttgttatacaacttaatttattttttgtactacttatgtttggttagactattacaagtgtctgttagttgacaaaataaacaatgtattcgtagcaaaaaactctgggttcgtttaatgtgaagagaattgcaaaagaacaagaatggtcaaaactgttttatgaagacaactt

SEQ ID NO: 145561 - DNA, 545 bp, Cannabis sativa
tcaaaatgatcgtgtatttaaacacgttttaaatcataacattctgggatgtctcgacaggaactcgctaccaatgaccttgatagcgagatggagcttttcccctaatttttcgaggttcatgatttacgcctagttgcttctttgctcgaaggcataacacttcattttgataatcgcaactcttaataataaagagtacttcagcagttaattggtaaaagtgccaggaacatgccttcctatagcgagataagcacctcgctattagttgtttgggtttgcctgactgctatacttagtttgtatattacacgataagtgttttcacagtcattatgcatcgcttacgtctacccagtcgtgacgaggtttacgtgtcgccttgtgcgtgccgtatggtttctcgttagcacattagacagcagtttgtatatcttcatctcgtataagaccttatagtcagcaagttgcaaatatactctatcacttctgtatttaatgagttactccattaaatgtaattactgttacacgcatcgatc

SEQ ID NO: 145562 - DNA, 686 bp, Cannabis sativa
agatacatccattttctttaaaaaaagattgcccctaccaaatttttttctatttttatattgagtaattggtaaattttacccctgaacttttgataatagtgatttcgccccctaaaatatacggcttgttaagaattctccctgaacctttacatttacagaaatttagttcctctgttgggtttcgtcccattatttcgtttaaatgatgacgtgtctttataaattagtaactttgtcccctaaattttgacaactatcaaatcgtaccctctcaaaataaacatgagaaagatttaacactttttttagtaaattttaaaaatttaatttagatcttaagaaaaaattatttgaataatttaaaaaaataaattaaaataaattaaaattttaaaacgaattaagcgatttgaaaaattgtttattttttattaaaaaattcatttatatattatgaataatatattaaacacttaatttcttaaaaaactaaattttacgggaacaaacttgagatattttgtttttctcaaaaaatatagatttatttaagtaaatatatataaaaatatatagtttactctaggggtgttcacaaagtatccgatccaatccaatctgcaaaatgcggatatccgcacttgtgcggattggattggattgaaaaatctaaaatccgc

SEQ ID NO: 145563 - DNA, 1824 bp, Cannabis sativa
ggtgttagcacaataaaaggatgtgagatcatataaaaaaaatacatgagcgtgcacatgagaagataggccattatcaatatattttgaaaaatagtctgtcacttacctgaaggatatcttggactcccctagtgacggtatcaccttcataatgggacatgtcacgcactacctcaacagctacagatgttcgaacaaggaggtcaatgttgtcgtgcacagactctagcatctgaattgtagtgtcatcgagatgaagtctaggaaccacgatggatggtctcctcatgcggccactagtatttgggacagaaggagaggcttgagcattctcctcaccttctaccgctgtgggacaaggcttcctcagttgggatcaggctcgagggacaacatgaaggttttgagcgctttcctcttcttcagactcactcacatcctcagtctcatcataactcgtgagcagttggtggaacatacctgaatctgtaagagaaagagaaaaaacattaatatcgcaacacacacaacatcataatattatcatatgagcatgttcaaaaaagtgaataagtatataaaaaaaataagagaaaggaaccttcagagtcacaatcctggagcactgtagtattctcgggattactatcaacaccaacaatcactccaatatccctcctaaaagtagtgggttgtaaagacatgtgggtagaagagtcggctgtagtcaagttcccatgagaaggatttccccggtcaatggggacaacaggagcatcaggtccatcgatcgtagttgcagcagttgagttatgctcaaaagggtacaatcctaccaacttaagcatctccacatttacaatcgttggggcatgcttttcagctactgcatggctgtgaaagctgccgcgtgttgtatcatctcctcagttggcactggtctgagatatgtacccgtatggttgaaagcacggtgggtagtctccatgggggtcgcaaaaaagtaggatgaatgatgcttgtctccgtgagttgtgctacaaaaaccagaaacatacgggtgaccctgttctcggttcataaagtagaagtattctgaatggttcatagatgggaaagtccggaaggaaaggaggtaatgaattttgtgagtagaaggccttccccatcccttccgatgatatattatgaataaaaccgataaggtcaggtacacatgaggagaaatttggaccggggaaacgtcaaagtagttcgccacatctcgaaagtaatcatggagtggcaaggtcgcaccagcctcaatatggtattttgtccaggcacatgaattatctaggggagtaccggtattttgacctttcttcgtcgggactaccttcaccccttcaccaagagggtacagagagaggtaaccttgcactttagacgactccaaattgctgtctggacgttcgattgagacgctagggtcccaagtactagggtcatagcgtgccttcgcctctaaggtaggcaccatgtgttgagccttttgttggttccgcttcctttgtttcttggtcaccatgtgttgatctgttacctcttgttgagtctgctttttttgagtaggagaattttgaggagcaatatgagcttcattttgctctaggccgtctttggaggaaggattggccatttctgcaatagcgagaggagtggagcactctccttcgtggaggaagtacaaggcccaacgtggaaggattcttttcaatctcctcactctatgaataggacatgtagtttcgtgagacccgccagatgactcactactac

SEQ ID NO: 145564 - DNA, 771 bp, Cannabis sativa
accaacctaacatgaccaatatgaccaacgtaattaacatgatcgaccaatatgaccaacgtgaccaatacgaccaacttgtaagggctatccctgaagacctggtgactcatacgaatttgagcctacgtaaagaagtacttttgtgctagccacgtgccctcaaagccatccaagaatatctacaacaactatcatttttttaagatatattttttaaattattgttttatattttaaaactaactcaattatagttaggaaaggaagtacatcgagttaataaattttaaaccctacaatgtaaatctacttaaaagtggtgaagtcacttgtaaaggggatagattcttctcggactctcactttctcacattctaaaatctcatttgaggattaaactcttagatgatataactttggagaagtctcatcaagcattgagattaataatacttcaagtgaactagtctattataacacaaagagagtgaaccacacactacaaaaattcgttgttcatcttgctcgtttacgatttttttagatttgttgacaaaaaaccatgtcaacaatttaaacaaaactatcattattattttgtattttaaaattatttgtatgtatatatatttttatatacaaaaacaacataaatagactatagctacatttaacaaacacacgtaatattcacttaattaacatatttgagattattatatctttatatattaaaagtgcctatttaacggcatttcttggtttaac

SEQ ID NO: 145565 - DNA, 656 bp, Cannabis sativa
tgcatgatccccccaccaggtagatggcatcctaaacctaaggagacgttcatcgaaccctataggcctaaggctagcgtattcacgctcaagagggacataatgtatcgttaaaggggacttaccagaaccagaagtgctggcatcgggagcccctgtattcggcacctggaccgtaggccttggtctgggggccctcctctctactgggctccaaatacgaaggggcctcccggcggcagcctgggccttagtgtaagcctgctcctgggccttttggaagaggtacttttggtacttctcttccgccatggcgatgatagaacactgataccacgtacaaatctcttgtgtcaagttatttaattttctgcaaatatttttatattctgcctgttctattttgtcgctggaaaactagtttctgcaatgacagaattacattttgcttctgcatgcgtatacagttttatattttcgtatatattgacatttacaaaaattcggtttttcattgtgtatcatactattaatgtagaaacgtagataatagtatattctaattaagttctttagtgctttgtccttacttgccacacaaaaacccaatttacactctctttcccttgctttctttttcgttttttttttttttt

SEQ ID NO: 145566 - DNA, 770 bp, Cannabis sativa
atataaattttcttattggtgtcttttggagcgattttacacttgattttccttatttcaagttcccggggcattagagttcaaattcaatcaattgtcgaaaagacaggacaaactggtaaaaaatcggccaaagcttctcaatgggagtcagtagtcgcaaccatgtggatcctagtcgcgacccttttatctggtcgcaacttgggagatttggcagaaactcaatttttcgagttttgcctgtggtcgcgaccagcctttaagtgggtcgcgaccacgtaaggaaaacgagatttttgacctaatttagattttttcccaattggaggtatatctttgattcctatataaggaacacgattcagaaagccaaggcaacaagaaataggcctgaaaagtgaatgaaagaggagaggaagcaatcttgaagaaccggagcaatatcaccatctagtttctttcttttaccctcaattgattttttatgtctagttttgtttcagaattaatcatggatgtttttattattgttatgagctaaatttcccatttagggaggatgatggaatgttgtttgaagttttgcctagttaatgaataattgccattcctccatcttgatttgtgaaattatctatatttgtgtttaaattccatgtgtaggcttcatcaccttctacatgttctatgatctcaattcaaaatatgaaaagtgagaattgagaatgctaaaattggataatcgaggttctatgtgaaacgagagt

SEQ ID NO: 145567 - DNA, 596 bp, Cannabis sativa
  modified_base (40)..(61): a, c, t, g, unknown or other
tcaagttcgggtcttggtcgagtactaggtcccggtcctnnnnnnnnnnnnnnnnnnnnnntcctgattctgggtccaagtctcggttattgtgctggtttgggacccggtctaggttcgggttcgagtcctagtctcggttcaggtttaggtctctatctggcttttgatctgcgttcgggttttgatttaggtccttgtcctggtcctagtcctaattcggttctagttccatttgtgatttttagttcgagtttgggtttgattcgggtcagagtttgagtcctggtctgagtttgggttcgggtcctgattacagtctatgtctagatcacgctccgggtattgggttcgcgtcctgggtcttggtctaggttgggtccgagtcacaagttccaataccgatctgagtctagattaagttttgggtctaagtccttggttctgatcctggtctgggttcgagtttgggtccgggaccgtctctagtttttgctcttattataggtgtgggtgtttgagttcgggtgcgagtttgtgtctgggtttgtgtacaggtttggagcccaatctgtgtctaggttcgggtccaggtc

SEQ ID NO: 145568 - DNA, 534 bp, Cannabis sativa
  modified_base (507)..(509): a, c, t, g, unknown or other
tttccttaaatcaacatatgaaggaacattgctctctgcttgtacacaagatggaaatgggcacatttttcccctagctttttctgttgtggatttagaaaacaacaactcgtgccaatggtttttcacaaaactaagggaaacatatgggatcagagaggaacagtgcttgatcaatgtgaattaattaattgatatctgctataagaagtttctccatttagcttgatacgatcctctgtcgagatagtagccattgtttccttatttgtgtgcaggaataaaagggaaaccagagtcttctaggaacacactttctgacccttctggcctcacagtactagacttgcttccgggcattagctgtcaatggcggaaggttctatggtcacggagctggagtacgatcctagaaggacctatccaaatgggcttggcccagtttatcttctttgggggacccactaatgggtcttggataatattgggttttataccctaaataannntccatttcaatgtaatccattttat

SEQ ID NO: 145569 - DNA, 588 bp, Cannabis sativa
ttgtttctatttttttgctagtacatttatgtttttgttacttctgtagtatattgtattgtagctttatagttttttatttttatttttgtaatgtttttgttgaatttttgcaggaataggattatatatgaccaaaagaatatgtttcttgcaaaagcgtctccactgcttcatacaaggttataaacaatattaagacttgtctttctagccttctaagcagcttgaaatattttcaaaaacctgttttggccatttcattaaacttcttaatttcaaagtgcaaccccaagtttttcacgggttgttgttgcaggaggttcaacagcctaacgatgctgaattgtgagttatgattcgtggtgttaggattaggtttagcattgaggagtttgtattgataactggtttagattgtgaaagtgattgtagtgtgttagattttaagcaagatgttaatagtctttgtatgaaatattagctgaccttcacctctattactaaagaatctattagggaatattttaccacaaagaggtggggtgattctgataaggatgctgttatgttggcagttctttattt

SEQ ID NO: 145570 - DNA, 545 bp, Cannabis sativa
agaggctatcatcagcgaataataaatgtgacacggatggagcatgcctaatgagttttagaccccgcaaattatccagttgttcttcgtgtttgagaagccttgatagtccttccgaacagattaagaagagatatggtgacaaagggtcgccttgccgaaggcctcttgttgcccaaacattaccaacaacttctccattcagttgaaatgagaaactattggaggagagaatggactagaaagcctttttaccctgaggaaattatactattaaaaattatttatttaactatgacacttttaagtttaatcaatttatataattattttttttttagaatttttatggtatttagggcatcttcaataataaatatcaaatttggtgttaaatcaacacaaaaataatagaattttcacactaattttttttattccaatcacaatactaaaattatactttttattattatattataaataaacacaaataatataaatacaaaaagtttacttaaaaatatattatttaaatattaaaa

SEQ ID NO: 145571 - DNA, 504 bp, Cannabis sativa
ggataaaaaataaacaactagtttggaactgaaagaatataattccatgcctttcattgatagtcaaaggttcataatatacaacaattgccaacggttacaagcttgatattaggctaataatgaggaatcaaatattacctaataaatacaattaactattgtctaaatatatacatatacgctaaataaatatatacatattctatcaggaacatttggtgtgtaataaaagtcaattacctccaatttcgtcaataataaactaaacaattatttgcattttcgttgttactttaattttttaataattagtaattttttttttgaattttcaatactattggttttaacttttaaaatatatgacttattaaatactattttgtaccttgtattttgtaaaagttaccaattgaacgctctgctttattaaatgaaaaaattgatcctatatttttcaaaatagtaaaaataggacactgagcttaattttcaacaatt

SEQ ID NO: 145572 - DNA, 705 bp, Cannabis sativa
ccatggcagaatcgcataagaggattgagaattcttttgcagaattggagaaaggcaaagacaagcgtaagtcaccagtgccacggtcacgatcccgtagtccacgagggaaaagtgccagaggtcgaagacagaaaatggccaagtcccctccaaagaaggaatcctcgccgaaaagaaaaggtggaccgcacttcgtgaaatatactaagctcgcggtaccacgagaccatatctacgctatcgaggagaagaatggggtcttcaagaagccccccccgcgatcaggggaaaccgcaacaaaagggaccccaaaaaattctgtaagtatcataaagatattggtcacactactttggagtgttgggttttgcaggatgagattgaagaactgatcaggaggggaaaattcaacaaatataaaaggaacgaggaaagtcatccccgggcggatgaaaaagaggaaaatcaaaacgcgagtggttcgagaacacctcgcaatatattgaccattctaggcgcccccatatcaggtgactccaaaaagtcgcaggagcgatatgcaaaggaagccaaggagaagccgctcaccaacgtgaacaatctcagtgagcgaccagagaagttattcaaaagggaatgcgatgacatcatgttcatggaaagtgatgcgagattggtccatcacccgcattctaatgcact

SEQ ID NO: 145573 - DNA, 528 bp, Cannabis sativa
aagactcaaaagttatcttactaaataaaaattaaactaaagctacttaaaattaagcaaccaaacacattttcactactctcctcacaatagttgcagttttaaagcataaaaaataactttataccatagagttatcacaccccaaacttagagtattactcgtccttgagtaatgaagaacaaaaaaaatcaaaacaatacgaacagatgaaaaacatgacaataacaataacacatttgcaatagagaagatattgctcataaaaatttggttagcgacaaaaatgctctcagaattagatggaatggaagtgaattggtggtagttaatatgccttgaacttgtgtgtttcatgcgagttttacatgctatttatgtctttaattcttatcaagaataattcaatcaataaagtgtacatatgcttcccaccaataccttgaatttctataacaactaccctaaatcctcaagtttaaaaagtttgcttccataagttgagctagcgcaaccctctccactaa

SEQ ID NO: 145574 - DNA, 795 bp, Cannabis sativa
  modified_base (621)..(622): a, c, t, g, unknown or other
aatataatgctgtaattacccagtgaatcctaactcagtttggtcatttccttgtttaatggattgcaaatgtagattgttaggtctttagtagggaagcaactcctgcaacaaatgagaccttgacacgatgacaataccacaacatccttagggagaaaatcaaagattatcggttagaattgaaagtcttcttcatcaacagaaatgtatgtcacaatttttatatacttcttgagccatgagcacttgtcttggaatatgaattatgagatagagagttttgtcctttgtaatttagattggataaaagaacgatctgatttcaagttgttccaagttttagatacacatttcaattgaaacaatgtcattgtaggtaataggtatatttctttgtagaatacatcattattcaagcaccgtatctttctcatttcctgaaacacaaaatcaaatttcattatttaattatatgtataacatgtgtcactatactaaacaagtaaaagactataattgaaactaacaacaaaaactactttgcgccatacaatcaactattgccttaccataaaaacagcaatgcaccattctcaataatattaattacattgcaanntaacttgctatgcaatacaattaagaccaaaatgaaaattactttatattgaactctcaggattcatcttctaagacaagttcccgtggctcaacaaagatatcaaaactgtcacatgcattcctgttgatgaagaaggctttcaattcaaatagacaatctttgattttctc

SEQ ID NO: 145575 - DNA, 896 bp, Cannabis sativa
attgggcatattaagccattgagatagtggaaaagaagttggagtgtgaccaagtttcccataatggtaaattagaaaactccggagggccagcagaaataggacatgaaggcgagcaacttcgcacaactgttcaacattaaggtatgttcttttatgttttgcatgttttgtttttttaggttttttattagtttttagtcgtttagcaacttttcgtgacataaaccgatataggtttgcgatgtcatgttgtcttttcattttaaatgcttttaactgttaacttgcgacgtgtctgtaacatatcgcgatataagatggacacacatgttattgcaacttggtgtcttatttagcgacacttttctatttgcattgcgacttttcttgcgacatattatgtaacgccctaaataattaggcacactacccaagatacttatgaaaaccctaatcccataaacgggattactagaaattagcgcggaatttaaactttaatcataaacaaaataaaaataaaacttgtaataatttaaactttacaatctaaaagttacagaaattgggatcccaaaaatatttaaaaaatattattacaagtcttttttctttcagccggcctaagcggcaaaacaaagtctcaaaaatgcaacactgctagacccccaacccgcttggtctgatgtggcccggacatgtacattctttgtccagcttttgcactcatggctgatcaacaacagtcttacccttttttgcacagtagagcactcgtgagccaagcccaataggacagtataaaatatatcaaaaatatactcatcatataatataaacagtaatgtcattcaaatctatctgtgtgacacagacctacatgttgggctaac

SEQ ID NO: 145576 - DNA, 566 bp, Cannabis sativa
gggtgaccaaaatacgaggtattttcacgctactactagctcaagaagaaaaaataatttcattcatgaattaaaagatgagactgattcttgggttcagtggggtcgggtctgtcttaggttatgatagactattactctgatctttttcattctatggggtcgaattgtgttgaagttcttgatgttatacaaccatccataacatctaaggataatgttactcttttacaaccagttttggaggaggaggtaaggcatactgtcttccaaatgcacccaaacaagtcacctgggcctgatggattgatccctgctttctatcagaagtgttggcatattgtgggcaaagatgttgttaagatggttaaggatttctttcgatctaagtccattcctcagggtctaaatgctactaatctcgttctcatttcgaagaagaaatctccttctgttatgggtgatctaaggcctattgctctttgcaatatatcttataaaatcatttcgaaagtcatggctaatcggctcaaaagcttactatcgaaggtcatctcggagtttca

SEQ ID NO: 145577 - DNA, 760 bp, Cannabis sativa
cccctagtaaccttttacttatgtagtaattaggttgctggtgcttgccctcttctcgcactatagctgcactaatcgcatcttctgagatgactaaataaagaaataacctctctccagttattggtttcactaaaactggtggcgttgcgagatgcctttttatgttttgaaaggcctcttcgcactcttttctccactcaaactttttgttgcctcgcaatatgtttaaaaatgtcacacatttatcaattgacttcaaaatgaatctattaagtgccgtcattcttcctgtcagggcctgtacttccttaggctttgtcggggattgcatatctattaatgccttgattttttcaagatttgcctcaatacccctcgcgttaactatgaatcccaaaaaatttcccgaggagattccaaaggaacatttttttggttttagcttcatgttttacttttttaatattttaaagcattccgcgaggtttgaggtatgatccttactctttatcaatttcaccaacatatcgtcgatgtaaacctccatgtttctccctattcgactggcgaacatttcatttactcgtcgctgatatgttgccccaaggttcttcagtccaaacggcatgactttataacaatagagtcccatgttggttatgaagcttgaatgttcttgatttgggatgtacattttaatctggttatatccaaaatatgcgtccataaatgacataagctcgtgcccagcagttgc

SEQ ID NO: 145578 - DNA, 620 bp, Cannabis sativa
  modified_base (282)..(292): a, c, t, g, unknown or other
gcctcagacccaaactgagactggaactcgggcccggacacggtcgtgtacccagaccggaactaagacccggactaggatctaaatctgggacccgatcgcgaacacagacttggacctatttagggatccgaatacgaacctggattcagaccaagactaagactgggatcaatttgctggacctagatctggaccgagatcctgaccccgacccaatcttggacccgcactcgttacccgaacttcgacctagagccgaacctagacccagatcggggnnnnnnnnnnnacacaaacccagacacagactcgtacccgaactcaaacacccacacctacaatcagacataaagctagaccttgcccaggacacaaactcgaacccagaccaggatcagaaccaaggactttgatccagaactaaatccaaactcagatcgggattggaatttgggacacggacccaacctagacctagacccaggacgcaacccaaacccgaagcctgatctcgacctagacttaaatctggacccgaacccaaacttaaaccatgactcgaactccgactcaactcaaactcaaactcaaactcagaatcgcaaatggaactagaa

SEQ ID NO: 145579 - DNA, 874 bp, Cannabis sativa
  modified_base (417)..(423): a, c, t, g, unknown or other
atgcatggtcaaatccctaagtgctgtagggattttatgagggctgtccttattcccttttgaatgatgtgattcttcacagagtagccgacattacactttattggtcatagtcttataggtgcagattgggggttgcgtcgtcagactttattgcatgtggcagctccaacacgcctcctcccatgtggtattaaatgcgagatgactactcagaggaagcctgacatcgcctggagatgctttgatgctgtcttgatcttcgtgaccatataaaaccttgcatgccttctccgagaggcatatcctcagataatacatttcttcataaagacttagctattactttaagtgctaaaccctttgtgttcatgtgtccttgtttggttggtccacgtacattgggcaaaatcaggnnnnnnntttaccccccaagccttgtttaattgttaaatgaacaaggcttgcttagatgtctccggttggctgctctgtttcctggcacgtgctttgggcacgtgaaggtgtatttgatgatcaccattacaacagcgattcactttttgcatgcgtcgattcgtttcttgtccattaattgatacagcgcattaatgggtgtcagacggacactcaagcgtttccaccgccttgatgacaaaccaattcagccgttggatcttgggaattcgaatcgtgtgccttcccaaccgtttgatcgttggatgatcgcgcctgttccacatgcgtttttgcctataaaagccaccattctcacttcagttggttactttcaaactttcacaaaaatttttcaagttttccagggagaaagagaccctcgaaccagaaaaccctcaaacaccatagatttctt

SEQ ID NO: 145580 - DNA, 505 bp, Cannabis sativa
  modified_base (27)..(29): a, c, t, g, unknown or other
actaatcagattgtaaagagttttatnnngggcataaaacccaacattcccatacgagataaatgtcggtgtgtgtagttgtgtacgtgtactatgtaactgtgtgtgttttgtaatatatattatacaaatgtaaaaaataaaaaaatagtatttttaaaaattaaattttagttcagcccataaattaaacattcgggctcagcccaatagggcccaaacccgattacacccaacccgaaaataactgacccgaacccgactacacccgtacacccgaacaccaggttcggttgtacatttccaagacccgaaacccgaatatctgaacccaaaatcccgaaaacccgacccgtgtgcacccctaggagatatcattttgtccctatgaagacatttgtttttggcacttagccaaattgtaatgccctaatgctaaggcaccaccatccctaccataaacaggagtaggaacagtgggggttccatcaacactcggagtcac

SEQ ID NO: 145581 - DNA, 745 bp, Cannabis sativa
  modified_base (397)..(398): a, c, t, g, unknown or other
tccacgtgtccctgtctggttggtccacgtacattgggcaaaatcagggggaacaatggttaatttttgaaatttatgattattttatttattttaattataagatcagacattacttatttttattattaaaatttgaatgatcttattttgaattaaaatttttttttttttttgaaaataatctaatttgaattttaaaaatttgctaaccatatctttttttttttttcaaaatttgttatatttgaaatatattttattaaattaaattgtaagatttgaaaaatgttatttttgacattttatcttattatatatttttttaaataaattaatttcaagcaaaatacatgaaattttgaaaaatttgttagtttaggtttgaatagaaatnntagggtttctaaccataaaattttcaaaattaggatattttatttttttcgataagattgataatatcctaaccatataatatcttatttttcaaattatttatttttgtaatatttaatttattaaattataatattaggaatatctaaattttaaaattcaagatattatattatcttattagatatttaattaatttaaatttttaaataaacttgaaatttgaaaaatggttagatattttgaacttatgttagaatttaggatatttaggagatttgttagtttttaaatttttttcaaataatctctaacaacctaaattttaaattctaattaagatata

SEQ ID NO: 145582 - DNA, 602 bp, Cannabis sativa
cattgtactccaatgcacaactataaaattagattcatgtaaatttatgttcatatcaaaaaataaaaacataattctattattatattattatctaaaacaataaaaataatataaatagtttatgttgtaaaattatgaccaataggtatatattaataaaatattaaaaaatataaaaaataaataaaaaatagtgtatttatagtgatataaatattagatcatgctatattatgtgctaaatttagtataattttgcaatgcataattttggcacaacttttaaaatattgtttttgtaagataagctatcatcaacctattttgattgcatcacccattagagatatacttatgcaactctaatagtgatgtatcattatcgtgtgagtgtcacactaatgaccatatgataattatattttattttgactatgttttactattaagtacattacatgataaatttaaaattacatgtgcgtagcacggttgttctaaccagtgtatagaaaattgatattaaaaaaatgagaacacgtaagaatattgttatcccaatttttgcactgtgacatggcatcacatgatggtgacac

SEQ ID NO: 145583 - DNA, 595 bp, Cannabis sativa
aacattatggaggtcaaccccaaagggtaagaagttttcatctttaattgcttgtagaagaagttaacaaataaataatccttctaattatccaccttgggctataaagaatgacttttttatttaaagttaaatatttaattgatttgtttatttctattaccttaatcttatatgtatgtatatatatgtatttatatatatatatatttgtataaatatgaagttggatatatatatatcacattagaagatttgctttttccattacaattattctcctcattagaaacctcttctcgccattctcccgctcgaagattctatataaggaaatgggtattttccaagataaaggtgaacgtaatctcacgaagtggtagagaagtaatcaagggtggccttgagcttaatgactctgtaagttcttttcttttttttgtatattttttggaaaaacaaaaattagatttataaggaaatagaagaaatactataaactttgaatcttttccattatttacttgttgggttttgggtgaaataataaaaagagaatgatttagggtgaaagattcaatctttttgttactta

SEQ ID NO: 145584 - DNA, 743 bp, Cannabis sativa
ttattttttagttgatatttttttattgagataatatttttataattttaaaaattaaaacattattttttggaaaaattaatttgtaatgggatattggcggctaaatcacttgcacattaaattttttaagacttaaccacaaaaatcaattttttgggggcaaaactacctacacactcattccatttttctttgtactccttcgtccaaaaatcaaagttaaatgccacaatggcctgcccacgtgtatacacttgtaaacgtgataaatttttgtggcccacgtaatattaattttgtaaaattaaaaaaattagaaaaaatattattttaaaaatattttctttttgaaatattggcgctaaaccacccgaactataaattttgaaatcttaaccacaaaaattgattttttgggggaaaaactacctaaactcccattttatttttaacacttttcctttttcttttcttcttcttcttaactgaaaaaaccctggcaccaagtcgcctaccccatgacccaaccttctgcgactcccctctcacacactctctctcacggtgcacaatgtcggccttctccgaccaccccatgttagatgggacacagaactaaaacccatgatccaaaaaaacccaaccccaatctgccctcttctctctctccttcgatctttctccgacccccctctattttttttcgtttagttcgaaccccctccggcaaccaccacgaa

SEQ ID NO: 145585 - DNA, 1145 bp, Cannabis sativa
  modified_base (805)..(807): a, c, t, g, unknown or other
atcactgtgcagaccaaggacctccaggctgctgatctctttgaggaaaccatcaagaccttatctgctaaggttgatcgtcttcaggatgataggacttctccgcagtaggtccttcttcggctgaaggaagataaggacgctcaggcggccgaggcggaccgcttgaaggagaaagtcaatgctttggagactgtcggcctcgagctcctctttgatttttggaaggctaatccccaggccaacttcgactacttggacgacgccaaggacatgtacctcgagtactgcgcggccgaagttgcctatggttgaaaagaggtggctgcttcaacttccggcctggctgctgatgcttctcctgctcgaacaacagatcctcctgctccagtcggctcaaaagaaccaaatcctgaacctgggactccagctgtttgaacattgatctatttatctctcctgtttatagatatatatattatatatggccttaaggcctttaagacatcatgaccggccaagcggtctttaaacttggaattaattttcattttttggacaacgggctgaccgggcagcttttaatcccggtactttatgctcttgttatccttaatgaatttcattctctatttataattgcagtgcaattgtgattgttttatgtttaccaaatgctttgtataggtataggttccccccaagtgaccgagtagacgtatgactcttggtcacttatcttttgcaaatatattgcttttttgttcggtgttttgggttcactgaaccttttgtacgcactttnnntaaattataatcatgctgattttttgacccaagagaattggaaatactatctttattcttttattgatcgaaaacgtatttgttaccgtagtaacttacatcagagctagtgatccaatggatctttttagcttaacatgatataaaacaaataagaaactgtactttaaaatggtctaccccacctgagtacttttgtttctgaagcttttgcgtgtcgtacgcccaagaggcatttcacatataagcgaatgttcaatagtactttaatgtggtctaccagacctgagtacttttaaatggtctatttgacctgagtactttggagtggtctaccc

SEQ ID NO: 145586 - DNA, 821 bp, Cannabis sativa
  modified_base (686)..(690): a, c, t, g, unknown or other
aagttaaaacctttaagagtaagagtttttcaagctcattgtccaactcatcaaacactactagtatcgagctggtgactagtataagtctattttttgtgaaccattgtccaactcatcaagttgattttgtgctaaccaaattgcccaaaccaatatcactgcttgaatattttgttcctcacccaatcgtgactcatgagaacaaatgaagaaattaatctccaaacgaccctacatcaactggaatcataaccaaactcgctacccgccaacaattttgtgccgaaacacaggcaactaaacagtacaaaattgaattcaaattaattatagctaaaatttatcattttacttatacaagattaaatcttaaaaaattattaattttaagctaattacatatatttcttatgatattttacttttatcaaaaattgaaataaataaattattattttatcgaaacacaaaaaaagtgaaacaaaaaagatttaatattgggttttggtaaaataattaaaagaaataatttttttatttatttaaaacgctaattaggatttttgctctctcaacttcgacatgtaccaaatcatgtccactgaacttttaaggtcgtttaaaatgccccctgaactattgatattgttggatttaagaacttttttctaattttagtaaannnnnctaacatggatgaaaattcagaggctataacttagtacatgtcatagttcgagtgacatgatttggtagatataaaagtttggggagcatggtttagtacattaacaatcactgaaatagtaaaattgaat

SEQ ID NO: 145587 - DNA, 624 bp, Cannabis sativa
cttaccttacacacattcttcacagaaccccaatttctttcctagtttgcctttgagaatgccttgtttctccaattcataaagacttctctcactaagatgacctaacctcatgtgccatagtcttgtattgttaggggaatttatcctggaagcggaagaactactgaagctgcgtgaaaccatcacaagtctatcaatgctcttaacaactaagtttgtttttccaacaacagtcttcccttgcagatagtaaatcccattcttgatgtctcctcacattgctatcctagtacccttcattattttcattgaaccatctatctttatagtgcaacctctagataaaagttcactaattgaaagtaaatttctctttagtttagggacatacctaacttcttgtatgagtttgacttgaccatcatgcattttgatcaacacacttcccattcctaggattttgcaagctttgttgtctcccaacagaactgatccaccctcaatctttttgaattcactaaacatttcttttcttaatgtcatatggaatgaacacccagagtcaataatccaatcacatccagattcttgacttgtcacaaccaaagcttcagcagactc

SEQ ID NO: 145588 - DNA, 943 bp, Cannabis sativa
ataatattttagtataaattaaagtttaacataatattatataaaaatataatatataatctaattcaatataatacaatacgatgttctaaataaatccaaatattagtatgtatttaagggaattaccccatacactatttttttaacttttttttttaaaatttacggtttaggtttctaaagtggttgcagcgctagttgtaatagggatttctgtgcgattttttgttgcaatttaggttgcagcgctagttgtattaggattttagaaattggtatttctcattaccgaataaaatgagaaaaaaaggtatttatacaaagtggcaaatacctaaaacaaaccccaaaataaaatcaacccaatataaaaaaagcccaatcctaatacacccccctcaagatgaagtgtacaaattataaagcttcatcttggatacaagagattgaaattgattgggaaataaaggtttagttaagatatcgacaatgttgtcctttgtagaaacatgtaggagtttgagacggccttgttggagcttttccctcacaatgtgacaatcaatatcaatgtgtttcgtgcgctcatggaaaaccgcggcggtattgtcacaatataagacaggtgggttggtgtaatggatgccaaagtctgataagagagcaaggagccaagtgatttccctagtagcttgggccatggcacgatactcagcttcagcggaagactttgaaacagttggctgttttttggacttccatgaaaccaaggaattgcctagaaaaacacaataccctgtgatagaccttcgggtgtcaacacagagccccaatctgcatctgaaaaaattttaagttgtggttctgcatctttaaagttagattcagcaaaagcatacaaatggggattagaattagcataaaaaatcagtccttgtcc

SEQ ID NO: 145589 - DNA, 603 bp, Cannabis sativa
cttcgaacgatttcgtataatattattcattgtggagaaagtttgggtcctattatcccatctcaaggaatccgttagggaaattcgctgtcgtcgtatctttttatcatctatgcagaagatttgtctgctcttattcggttgtatgaagaaaggaagcggcttcatggttgtcaggtggctagagggggctccttgtgtttcccatatgttatttgctgatgacagttttctctattataaggcaaatagagaagaggctcaacgggtcctggagttgctcaatacttttgagagggcgtcgggccagaaggtgaaccttagtaagtcttctattttctttagttctaataccgatgtcaggactagagagtctattttgtctactcttcatataagggcggcggatgatcatagtttttatcttgggctgccgagtacggtgggaagaaataagaatgcgactttcagctttctaaatgagaaggtgaggaagagaattaacaagcgggatagtaaactcttgcctagagtgggtaaggaagtgcttttgaaattggttattcaatctttaccaacttatgctatgagtgttttcttgat

SEQ ID NO: 145590 - DNA, 791 bp, Cannabis sativa
tttaaagttttttgaacacacgtggtaaattgaaatatcatgaactctgttttcaaactataagctattcgaatttttttaaaattttacaagaacaatatcataactataatgaatattgctataaaaaataaaaaaaaatattctaacatgtaatttcagacgtgaaaattgattaagtggttataataggatattgtaattagtactcttcaaatttattagaccatcaataatatcaacacaattgtcaaaatactaaaaattacaatgtaaaagtaagaaattaaactttatcaatatttttcctaaaagaaaaaaaaactttatcaatactttagctttaatttattaaacttaaaataatttcaaaagaaaataaggtatagtttgacaatagatgacttggacccaatcaaatattaaattaagaacattcatagtggatgatccattatcaagctaatggaggaaaatgataaaaaccttctattatattcagtacaacacattcatattgttatatgtactaattgttattattatatattattggatagtgggggcacttttggtggctttacaaattagatggttcttaggagctcaacatgatagtttcataatacctaaatagtgtaagagacactttttttatctcctctatagatatgtggtttaatttttagtacttgtttagaaagcactatgtaatatgatttgtgtataattagaaataattacacaatttggtatgtttgggggtattcattagaccacatctaatattt

SEQ ID NO: 145591 - DNA, 587 bp, Cannabis sativa
tggggtccttcaccttcttcattactacctaaaacatcaaatttatctccttctctcaatgcccatataaacttaaccccacttagctctaacccaattgcaatctccttaatttcttcatttaaaaaaacaggtgtggttccaaaagaaatatacaacacactatttggctcttgtttgtccaaccattccaataaccacttgtccttattattagtcattattgtgatttggtgtaaaggcccaacagcccaaaccttgttgtttaccacaccaatgtcatttacaagactttgtagaaaagttccttcaatagctttacaactattgaaaatctctccattttgatatctcaccaccttcatctctttctccaaaaaatccttcatcacagcaggaaaacatgattccaaaggaggtatattctttattgggacgacgtcgtttcgtccaaaggagagagacccatatacgaagttagcaaaaacagagatgcaattgaatgagtaggcttctccgtttgggatacgaacgacatcttgaaccaccgaagccatcataacatcatgaacaacgacaagtcgttt

SEQ ID NO: 145592 - DNA, 824 bp, Cannabis sativa
  modified_base (73)..(76): a, c, t, g, unknown or other
ttcatagaagtaattaaataaattacaattaaatattacacaaatattgtaaaattagtccaagtattaacannnnaataaatctaactacaagttaaccaaaaaaaataagtgggggacaaaaattcttaggcctttcagcatcaatcgtctaagtcttcgtgaatcaccgccatcaaccgttctatccattgtcgttgtactggtaataaatcgatttttagattgaattcctgcttgtctccaaaatgaaaaaaaaaagtaaaaatttatattaatttatatatatatatttgtatttgttattataataaatactataatcaataattaaaacttactcatttttgatcttgtatataacggttgggtttgcacgtgcgacgatgtcagtcatgtatttcaaaacataaaaactacattcttgatttttaggttgtcttggacaagttgctagtgaaattcctggccacggcccaagatacgcatttgacgtccttatatattcgtaggctctgtttcaaaaattatattagcatttcaattcattagttaatgaaataatttgctacataaatagtcattaaattattaccttttcaatattgcagtaatttgttcgagaacttggtggccacgtataggatctaaatggataacttttcttggcgcaacgacctctagcatccagtgcatactagaaaattatattgtgttatgggtaagatagtataaaaataattccaagttataatatataaataaataattagcactaaaaaattaaaatagtgtttactcgatattctaggaaataaagaaca

SEQ ID NO: 145593 - DNA, 687 bp, Cannabis sativa
ctagggtttgtttttgttcttcattaattcaaggaatttcagctggtttttaggtgatcttaactaacgtaatagctttagcactactctctttaatttctttatggtttttagttgagtttttgcatgttttgtgagattaaatgctgtattagctagggttgcttgtatctattttttggagtttatttgtggtgtattatgttgaattgaggtagatttaagggctgttggaaggtttgagcaagcttcgagtttaagaactcaagcttgactctttaatggtaaattttgattttgagcatgttatgttgttctctggcttgggttatgtttattagggtatattaagctgacctagaaggtttcctggtttgccttcagaaagttaattaactgttattttagttttttatccaaatttttcccaataaacacacatttagtgggattgtttggatctaaaataaccttcgccaacccttcaattggttttagctggttattctcgtcttggattctagggtctatatcatcttctttcttcttgccttcatttgttatgaccaccaataattgataattggctcttctattttgaagttcaacgcgataacattcgcgagccaacaactagtcgcctcgtactacaccgactctaattggtgtttggaattttaatgatag

SEQ ID NO: 145594 - DNA, 833 bp, Cannabis sativa
catatcatcacgcccttaggagaccctcaacgtcagtgactatttcaaatattcaaatcccattaaagactcaaagacagttatcaacccacaaaaataacgagatattatcataaaaatcagacttcaactacctccaaaaattaaagagaacggttgagatagctttgcattcgtctcaagcgagaagcacgtaccgaccctttcccttatataaagggtcttccatgacctgggcaggggatccacaattttgagcacttagaaaaaaaaaaaatactttttcattctttacaatcaagagtctgttcttgacttttgcaaccttgatcaataaaatacaaggggagtagggcgaacctctttaaatttcggtgtctttctttacaattgttgtaatttccagtgtcattaattatacatttattgtaacgattttggtctaaatctgatttattacgactctagtcggttagcttaaaattgagtcaatatctttatactgtgttttaattatattgttgtttgtgttgcactttttacaatagtttgttattagactgttagttagtttttaaggtttttttaactactaaattttaattttgaaattgtttgaaaaatctaacattcaaattattttcactactacaaaagtcagaattcgcgaggggaccgtcgctaaaaaattaagtaactgtttaaaactttcaggacaaaatagtattttcgatagtttataacagtaattacaggaatagacgatgattttaattggaattcataaaatttattgggcacttataggcgacagtttaaaaccatcacctata

SEQ ID NO: 145595 - DNA, 538 bp, Cannabis sativa
  modified_base (471)..(473): a, c, t, g, unknown or other
tacacttgcgtgtgcaaaatatcgcaacagggtccataaaccaagtgatttaaaataaatttctcttaatcaaacaaataacttgtaataaaaacatacattactttaaaataaaatattaaagttacatgtctagaatcccgtaaaattatttttaaaatattataagttatttcatacaagccgacttaagtagcaaaatagaatttttatacaatttcttgttggacccaactctcatggtctaccttggccagaacatgtacaattcatttttaaaatacttgaactcaaggctgactcgatacttttttacccttgcttacacaatagagcactcgtgagccaaggtccagtaagacaaaataatataacagtatatgaacaattataataatcaaatttcatacattacacatatacgtatatgttatctcaaaattagtactttgacgtggcatcacaagaatnnngacacgtggcatcaacttagagcacctggtcggatcaacatgtcgagcaggatgcctcgctggca

SEQ ID NO: 145596 - DNA, 658 bp, Cannabis sativa
  modified_base (359)..(360): a, c, t, g, unknown or other
aaattgagaaagttatgaattttggaaaaatcaggattaaatggtgtcgagcatgatgctcgcacgcaccaggtgttcggacaagacaccattacgcgcgcgtgggctcggacatcaccttgtctaaagccgtgtccgcccgaggagcaccctgcagatccgccccagacgaaccctgcaggcgcccaagtttcccgcacgtcccaccctgctgccttccacatccgcgcgcgtctgggggtgtttccagcctcctgggcagcacactcccaaactcgattttcatgggattttttcccaaattttgatttttccaattttcaaaccctaaatgaaaaataaaatattatttttaaatnnatttgaacttaaatatcatattttaaattaataatattttatttttcaataaattattattaattttgatattttgagatttaaatctaaaaatttattattataatttttaaattatggttagatttaaaaatttgttaatttctttaatatttttatattatttaattataagattagatattttgatatttgtttgatattagatatatattagctgtaaaagaattagatatttagtagatatttagtagatatttagtctgctagctttgtatataaatatgtattattctat

SEQ ID NO: 145597 - DNA, 864 bp, Cannabis sativa
gagagagagagagagagatgagatctagattgagagagagagagagagccttagggtggttagagaaatgctggggtggctaccaaagggttttgaaaaccctagattgggactgagagagatagagaaggagatcgagagagagagatagagcgagagagagaggggagatcgagaagatgaacagaaaagaaggaaaaaggaaaagaaagaaaaagaaaaaggaaaaaaattatttttttatttaaaattatttttttaatttaaattaattttattttaattttttaaattttgtacgtggaccaatagaattgtgccatgtgtacactgtatccacgtaaatgcacacgtggacagtccaacatggcacttaacacttaaaatggacggaaatattaaattgctaacagaacgtgagtattgggagttttaccgcccaaatttggattttgggggttaagtgaaaccaaaatgaaagttttttgggttttgccgctatttacccttttttataaggagtcatttactcaaaaaaccaaaccagagtcaaaaaaacaaagtcaagctccttcagaaaacgaaacaacctcaaatttgaatagaaaaactcatacttagtacttctaattatataaaaaaaaataatttaatatcatttaaaaattgattatacaagaagagaattctaatttgtattaaaaaaatctaatttttgtaaaaaaaaaataaagtttaattgtaaatattataattaaactgattaactgttaaaataattatagtaggaatttatataataaattatttataattattaattgctaaaagaggttttgttaaatatttaactaattattttaa

SEQ ID NO: 145598 - DNA, 880 bp, Cannabis sativa
  modified_base (38)..(59): a, c, t, g, unknown or other
tcagctaggcatgtctccttacagactagtctatggcnnnnnnnnnnnnnnnnnnnnnnaactggaacataaagcatactgggctgtaaaaagcctaaattctaatctaaacgcgccttcatcgtaagcttcagttgtcagaaattcaggagttgcgcaatgatggttatgacaactcaaggatctacaaggctaaattaaaagcagatcatgaggaaagaatttgagccaaatcagcgagtgcatctttatgacactcgcttgcatctccaccctgggaagctgaggtcccggtggactgggtcgtatattgtaaaaactgtcttcccccacggtgttgttgaggtcgaagacccaaccgatgggagaaaattcaaagtgaatggccagagactgaaacattacatagagagggtgtcccagcctgtcgaagatatccttgtggctccggtttaccagccctaagtagtgtttccctgatcttgtacaaggtttgttctctttttccttttatctttgtcatcttattttgttatttgttatcatttttttttttgttttttttgtttttatctttttagaggatcaatatcgctgctatccatggttgcttgctctctaggtgttctctttccctattcttttaatttttatatctttagacattgaggacactgtctgattttagttgggggtggtgagcatattcaagcatgtttcttaatttttatcatattaatattttcatgttcaaatttttaaaaaattactcatttattcttctaaaatattatttcaagccaatttttactatctttgttacttagaatttttctagagtataaaacgcacattccaaactttgtggtaagatggttgt

SEQ ID NO: 145599 - DNA, 912 bp, Cannabis sativa
aacttggtgcccatacagttcctagaggaacctagcattgttgtcccaaaagaagttaacaggttggatgacactccaacatggatgacacctatcacaacttacctccaaactggaggcttgctagaagacaataatgaagcaagaaaactgagaagaaaaactgctaggtacatgatcctagacgggataatgtatagacatagtttctctatgcctctcctgaggtgcgtcaccaaagccgaagctgaacgactgatgatagaagtgcatgaaggcttttgcagtaaccatgccaggggcaaagcctatccataaagatactccgacaggggtacttttggccaacgatgattgagaacttgatgggctatgtcagaaaatatgacaaatgccagagatttttgaagataccaagagctccacccaatgagctcacgatgatacagtctttttggcccttaacaatgtgggggatagacctaattggtcaactctcaaagggaaaaggaggggtacagtttgctatcatcgcagtagactacttcaccaaatggacagaagctgaacccctggcgacaatcacctccaagaaggtcattgactttgtagtaaagaacatcatatgctagttcggccttccccagaagattgtgtcaaacaacggcaagcaatttgatagtgacatgtttactgatttctacaaaaaacatggtgtcatcaagagcttctctgccatggcccatcctcaagaaaatgggcaggtagacactgtcaacaaaaccctcaaggataccctaaagaagcgccttgaggaagcaaaaggcagatgagctgaactgctcctagaagtcctatggtcgcacaagactactgagaagacaactgttggaagttattttaccaggaact

SEQ ID NO: 145600 - DNA, 789 bp, Cannabis sativa
taaacaaactataaaacaactttctgctatgatttgtttttcaaatgaatgaacaacaatcagagaacatttcaaacaagacaaattaaaaaagaaaattataaactttgacaatatttttctttgaaagcttcaacttgtcaacaacgtcagaagtcttatcatgcacctaaaaatattaggatgacaaaattaataaaacaatgaactaataaaaatacgattaatagctatacaatactgcaatatatcatgtaccgaacaacattaaaacaacaacaatataacaactaaaaaataatgtaatttataaaatttaataaacatgcaactaaaataattccaattgaaattcaaatacaattgataaatgtaagacgtagcctaatgatctagttttttttttaaaaaaacttaagaaccttagaataataattgtataataactaaactaaaactaaaaaataactaattagaaacagaaaaaaaaatgagagacataaaccatttaaggttgaacaattcttttaactaactacctcagaaaaaaatatataaacataacaaaacaagtctttgaaactagataaagaccacaaaaaataatacattaatctttaaagttgcaacctcatcatcattacctcacatttttccctgaaaagctttttcaatggatgacttggtaaaacaacaacaataaaaaaattaaaagatgaaacaactataaaacaacttataaacatcgttaaatcaacgtaaccattaaaatatttagataaaattttt

SEQ ID NO: 145601 - DNA, 690 bp, Cannabis sativa
aaaatcatttccttaattagaaaataatttccataaataaaatattctaataatttcttgaaaagaaaggttggtttttgtaaattaataatatgaattattattgaaaataaacgttattatatattcttgccactattatatatagtttagtcattagtacaagcatattaaaaaaattgcgtttatcttcttattatcttcgatattttaatttaaaaataaaattttgtcacatttatttaatcataaaattagttattaattataagaaaatttttaaatagtggtatgaaaatatttgtcgcgcaattttttttttttgggaagcaattaatattaacaaaacagtttatagttaagagtttataatgtttttttttaaagcctacaattttattgattaaattaaaaagttaaatagtcagcctcttaattcttcgatcgtttgacaaaaaaattaaaaatattgcaataatctagcactcagaaaacacaacagtataaattgttgcaagaggttcattcaaccagctcgtagtttgagtactcaactattgtgcaaggtatgtaactacactactaccaatcccttcagtcccagagaacttgttattcccaactattaacagtgatttaactgcgagccatagaagaacaaatgagaactaacaacgaaacaaaacaaaa

SEQ ID NO: 145602 - DNA, 542 bp, Cannabis sativa
  modified_base (485)..(493): a, c, t, g, unknown or other
gaggctagaattagagaattagacataggtttctaagtttctaagttagagttaaggcctttatataggaaagtctaaatgctaatttacaactaaacccttagatgtttacatattaaattgattaaatacaaaagactaaatttccccttgaaagtagatattttccatcagtttgttggttgttaagggcccaatttgcaggtagcttgcaatccccgtattaggctatacaaagaatcctgccaggccaatcttggccaaccatacactacaggatatggtctagtcggccatgcttctgccagggcctagcaggtcatgtgcctgccaggatcttgtaggtcatgttcctatcagctttatcaagtggaggccaacctttaaatgtggataactttgtacacattttccttgtagaggacaggttcccttggtcgaactaaactccatgtaaagaccgcttaactttaatttggaaattnnnnnnnnnttagggtttaattatgaaacttgtatattagttatgaattatcatttta

SEQ ID NO: 145603 - DNA, 1178 bp, Cannabis sativa
gagagagagagaatgatatagattaagattaaattataaaaatctacaataacaatgaatctgaccacattaaaaaagagtgttcaaaagctctattactgcctgaaactacactgtgcaaccataaaacatctattacaatcgttttgcgaatggtcgcagagtgtaaattcaatgtggttattttgcaaattttacaatttcatgttgttagtttggcaaatttccattatagaatggtcccatagtgtaaattcagtggttgttataagagggttccaaatttccaatgtctatcacttcacacttaacaattaacagtctaaatccccatttcagttcacaagcaagaaattccacaaaaattcacattcatcttcagtaagaatctatttagggtcgattagaactaagaagaaatggcagaatactcacatattcgaattaagtaagaaccctaaaaagaaaggggatagtgaaaagagggttttctttaaaacagtttcaaagaacaaaattattaataaaacaacaaaaatgaaagaaacaattacttacctgctttgagtttagggaagaggaactgggaagaaccctaaaaataaagtaattaactttaaaaatcaaaacaaataagaaaaaaaaaataaagcaattaaccttaaaaattaaaacaaaaaggcagaattgcagcttgacacgcaactgaaaagtttttttttttttaaggaaaaggtagggtcttatctaattagtcgtcatatgaaaataatatatcttatctttttctttgctaaactgaatatatattatcttatcagattgtttcaagtcaaattttcagtttggtttgattggagagtgttggagaaaatgggcatggaggatgtggttgaagatggtcttcttcaggtttaaaccctctttttaaacataaagttctagtttttacattactttctatcaatattatcagtcctttttatttgtagaattagaaaaaattattgaatcgagtttatgactgctgtgtttatggaatttgttaacagcatagaatacgcttcttcttctttcatttattttttattttttggttttaggtaattagaatcatcccaaatttaatcttttttaatcttcaacgtttgagtaataatcccaaattaaagattcaa

SEQ ID NO: 145604 - DNA, 1298 bp, Cannabis sativa
  modified_base (27)..(51): a, c, t, g, unknown or other
tcaggagcatacaaattgggtaagtannnnnnnnnnnnnnnnnnnnnnnnngtaccaaggtattggaatggagaatatttaagaaaatactaccaatagaagtaccgcgtcggatgcccatatcaagtactaaataaaaagaacatttacactcttaagtgaatggccttctaggcagaccatgcccaaaggttgagataaaattacaaagtactcaggtcggatgaccaccatctaaagtacactttttaatttctacattttttttatttcatgtaagttactaggtaacaaacacattttcgatcaataaatgaataaagatgtttatttcaaaattaaaattgagtcgaatttactagcatccaatgcgtagaaaaggtttggtcaaacccaaaaccccgaacagacaaaagagcatacttgcaaaaaattataagtgaccaagagtcataagtctactcggtcacttggggggcacctatacctgtacaaagcatttgataaaaataaaacaaatacagttgcatgatgattataaacagaggatgaaattcattaaagataataatagcatgtaaaaccgagattaaaggctgcccggtcagcctgttgctgaaaaatgaaaaatcattccaagtttaaagaccgcttggccactcaccatgtcttaaaaaaggccttatggccagatagaaaaaaaaaaaagataaaaagaagaagtattcaaatggctggagttccaggctctttgtacgggtcatctttgccagttggagctggaggatcagttgtctgagcggggggcatgtcaacattctgaccggaggtagaagtggtcgcctaggattctccatatgccacctgagaagcgcaatactcgagaaacatgtctttcgaatcgcccaagtaatcaaagttttccttgggattagccttccaaaagtcataaaaaatctcgagacccgctgtctctaaggcatttaccttccctccaagcctcgccacctccgctctctactgctcggcctctgatttgtacttctcaacctcagcttcaagctcctcctccttagccttcttctctgcttccaacctgcggaagaccaatcgaaggacctccctttcttcctggaggctggtcacttttttggacaaggaagcaatggcagtttcaagtcgataagaagcctctagatcttcggtcagctcggccaccttcttctcggcagcgagaagtttcttgttaacttctcccagctccatccggactgccccaagttgaaccctggcttcat

SEQ ID NO: 145605 - DNA, 614 bp, Cannabis sativa
gtactcactctatttcaaaaaactggtggagtagtggcccatataaaatatgataaatggcgccggtgcaaacttacaaaatttactaacataaaatgaaaagattccgacgtaagcctacaaggtaaaataaaaaaaaaaaaaggggccccctacacggagaaactttccctttgctgaaatgtactctgcattgcaagccacccccgacggttagaggaagaaggagggcgtataatctcagaaaccacccgaggtaactcctcagggaaggaagaagtagatatgcagaaaatcgagggcaaagcatccgtaggaacagggacctcttcgaagttctcagactgtgcagtagactcgaacttgggataataagccgccgtcgtctgagtcgagcttcactctgacacctcaggctcctccttagccgtttcaactggtgccaaaacgggaggaaaaataacaaaagggcacatagccagaggtggcgcaacctcgactcgagaagcagcataagtccctaagcccaatgcagcttgctcgaaacagggacaactgcagacctctaaaaaatgcaatggaggaagcgtagtgggctcgaaatcacgaaaact

SEQ ID NO: 145606 - DNA, 916 bp, Cannabis sativa
aaaatattgtttctgatgatgaaaatgatgatgaaatggccttgttggcaaaaaatttccaaagatacatgaaatttgttggaaagaaaaaggaatttttcaaaaacctcaaaaggtaacattttaggtaacaatccctctaaaccattttcatctaacattaaaaaaggtattcaatgcagagagtgtgaagggtatggtcatacccaatcagaatgtgccaataccttaaagaaaaataaaaagggattgaatgttacttggagtgatgattctaaaagtagtgaagatggaaaagaaaaggttgctataacaagtgttttgccaagaaatttgtaggaaaaaggaaatatcatttgcatgtataataccttgatcgatgacaacaaggaagaagcttgatccgaataagatttgtcagaaattgatgagaactctatggctgaatcttacaaggtaatgtttggtaagtggttggaaatatgtgctgaaaaatcgtttcctagttaaagataatatagacttgtgtaacaacattaatgagttggaagaaaaaataaaatgttgtgaatctgaactgtctttaaaagagtctaaaattaattctttgactaaggaacttgaaaacattaaaaagaatgtcaaaatgttaaatccaggttccaacatttttgaaaagattcaaaaatcttcccaaactaatcttgttggtcaaggttatgtttctaatcaatctaatttcaataccacttttgttaaatttgatatttttgtttctggcataactgtttctacctcgcacgattctgtcacttcagtaaaacactccgttgttacagaaaagaagcagcacggtaagtttgacaattccaaagggaatggaagacatttgatccctatttgccatttttgtggg

SEQ ID NO: 145607 - DNA, 1020 bp, Cannabis sativa
  modified_base (39)..(70): a, c, t, g, unknown or other
tttataatcgttttggaagttcatatttagggtgttaannnnnnnnnnnnnnnnnnnnnnnnnnnnnnnngtaaaataatttccaacagtatgggcgaccaagattgacctagcaggactctatgtacaacccaaaacgtggacacaaggcatgggctgcaaattgtgccctaaaagcccaacagaatggataaataatatccatatccaatggcactttagtcttttgtatttatctaacaacctatgtaaaaatctaagatttaaacttttaatctagggtttaggcctcctatataaaggccttgactctaacctagaaacctaagttgcctctaagtcgctaagcctccaaatcattctaaatttgaaaccttattctctctttctatctagtacacgcccaatagggctctccttctctcttctcacttcatctctcacacgcctacctaaggctatccaacaccctagaccgcccgacaccctaggctacccaacacttgagatctgcctactgattcatactttgtaatcctaagggtgttatagcagatcccacctatagtgatctagatagtatttctctcggtataaatacaacccaaaatggagtaggttattacctgctatcacaagggggcggaacctctataacaaatctctgttcttattgctttttcattctatttgtgtaacacgtggcaagcattagatctatacgacccaactgtcagttgatcattttttaagatcaatagttcggtgctttcattgagagcgtggatattgtagctaatcaaatgccatggttaacacaagaagaactcctgtcacaccatctgcatctttgggtctcccttaacaccctcagactattggcccagatactcaggttctaggcacaactggaatcccgatgaacactgtagatgtggtgaatactgtcaccagaacaggcgccacgagtctcgtctcctctagacagagctatagtgacctgccaggtcctgcagacct

SEQ ID NO: 145608 - DNA, 658 bp, Cannabis sativa
ataaaatgcacataaaataaataataactgtacaaaaaaacatataaaaataacagaaaaccaactatacaacacctaaacaacaacataaaactaactataaaataacaaaaaaataaaactataaatcaacaaaaaaataacaagacatcaatcttgttaaaatatacaaatcattcataaattaactttgaataaactacaaaacatccaaaaagatattgtattgagaagtaatgtgtatggaacgctcgagacatcaatttgtgttaatagtcctagatatgtaattgctcatgatatcatcttactatcttcggtggaaattgttaatgctacacaacatgtagctaacctaacataattaattaatttgtgtattgaattataaattgagaggaattgcggatatcatataaaaacgctaaataactttcaaaatgggagttatctcttctatttttgatagtattaaaaaaaatggttatttttgataaaaattttatgaacaaataaaaagtaaaatattcattttttttttacatatcttttaatgtaaaaaaatagaaaaatataaaaaaaagtgttcttaatttaatttttaagagagaaaaaaaatattaaaaaaagaagatataaaaatatcctataatgaaga

SEQ ID NO: 145609 - DNA, 656 bp, Cannabis sativa
actgccaaaaaaaaaaaaacagtataaaagttaagttgagcgtgtaacagtataaatgaaagaaattgggaaaaaacagtaatggatgtaaatttcccaagagtaaacatgtaatttagtaatattccacagtcatcacatatttcaagtgtgttgtaacttgtaaggtgacatttgacctttttttttttttagttcttcatctagagaattaaatgacctcttttttttcttcttttttttttaaagaattttttagttttaagcaaaaaaaaataataataataataatattacaaaaaatattttcaactggccaaattaataaatatatagcccaagtaaaaaaaattacacaaatactacttacacacaccttcaacccaggatcgatgctacctgggcaactatcacgcaactatcacacaactacgcagcaaccaaacacaaccgaaacgaaaattcaactagaaagagaatcaccattaattttgacttcacgtgagaagacgaccagaatcaatcaaaacatgggttgtttcaaattcaaaaaaagtgtagaaaaactactacgaaactaaaattcaaccggaaaatccaatttaatttacctaaaactaatgttttgacttcaatttttagattcatgaaaggca

SEQ ID NO: 145610 - DNA, 1179 bp, Cannabis sativa
gagtgcacatagtctagctttcccttggttgtgtgtagtcctggagtgaatttcactctgctgcacttaccatacacacactcttcacagaatcccagttctttgccaagtttgcctttgagaataccctttttctccaattcatagagacctctctcactaacatggcctagtctcatgtgccatagccttgtgttgtctctatcactgctcttgacaaccagattcgattttcccacaactgtctttccttgtagatagtaaattccattcttgatgtctcccttcattactatcctagtgcccttcattactttcattgaaccatctatctttacagtgcagcctttagatacaagttcactaattgaaagtaaatttctctttagttcagggacatacctgacttcttgtatgagcttgatctgaccatcattcattttgatcaagacacttcccattcctgaaatcttgcaagctttattgtctcctagcagaactgatccaccctcaatcttcttgaagtcactaaacagttccctccttggtgtcatgtgaaatgaacacccaaagtcaagaatccattcacaaccagattcttgacttgtcacaaccaaagcttctgcagtctcataaccatcaaaaataatgcctgcagcacctctttcttgtcccttttctctctctaattttgccttgagtgccctacattcatctctgaaatgtccttccttcttgcagtagtaacactgctttccttgcttggattttgctttggatttgaatcctaaattgtgtcccttgttttggttgttcttgtgattatttttattgtgtccacctctgaagtctcttgtgttgcttctggatttcacaaacaagctgtctgcaatgccatcagttctttcatcatttttcttctgtatttcctttgagttgagtgttgccttgacctctgtcatggtcaaggtttcttttccatatagaattgtatccacgaaatgttcataggtttttggcaatgagctgagcaacaagatcccttgatcttcatcttctaatgtcactccaatgttgctcagatccaggatgattcgattgaactcatcaaggtgttttctgagttctttcgaatcttccatcttgagagtgtatagcttcttcttcaagtataacttg

SEQ ID NO: 145611 - DNA, 546 bp, Cannabis sativa
  modified_base (492)..(493): a, c, t, g, unknown or other
ttttgatatttagaattagttaaattttaaatattattttaaattaaatttgaatgttttgatagtttaacgatatgatcattttcattattttcgaagataaatttaggacgaataataattttttttaattactattacaaatgttgccccccattttgtcaaaaatacgtggaccaacctgactgtgacacgtggattgaagaagcaagactttgggataattcgactaagtctccttgatcaaaaggatcagcatttaacatgcctcctggagaaggcatgagggtttcacatactcccggagagcaaggctataacaaagcacctccgggaggtataaaatcctatctgagcagtcacctcgcatttaatgccgcatgggagaagtcgtattgaaactgccataagtattaaagtatgatggcgtaaaccccccttttgcagctactatgctatgattaatgagcctagtgacgactactttatgannaatcacatcagtcaagaaaggataatggattacatccatctaacccctaaaaa

SEQ ID NO: 145612 - DNA, 617 bp, Cannabis sativa
gccatagtcacattagcccggccccgagcatccacgaaactaccccagttcatcctctcaatttgagcctgaattgcttcgaacctaggttgacgccgcaagggattttcaggaaattcaataccccgatcttcaatgtaaggcttaattttgagcctcatgaaacgattttgagcctccacatttacgaatcgggttctatcgaaacccgtagctggcaggtttgatgacgaacttcttcaacatgccttgttctttttggccccattatctcagaaataaaacttttttttcctttttctttttttttttttaaataattctaagaaaaattgggcaacacctccccttaattttctacttcccaaaaaaaatcaaaatcactcagaacagtgcaaataataccactaacaactcaataccgcaatataatttcaacaaacccaatatcaacaacaattttctcacaatattcactattaccaccaaaaatccataaataataaatcaatttcctaaatatgataggaagtgatacttacaaacccaaagaagcttttactccacctccattgttgaatatccttgaaagcttgaggttgaagatgaagaacaat

SEQ ID NO: 145613 - DNA, 648 bp, Cannabis sativa
ataaaatagtcacgcgtgcaacgcactgtttcaatgcaattattggcgtcttaaacttttttgaatttcttaaaattttacagaatgtcttaaataactataatttatatgagcatgaaaaaaaatttgagaaaaatattatttcgaatactaaaacagataaagatgtatcgatgtatcccttttaaagaggtgtattatagaatttcccaaaacctctttaaccatattatgagtgacaaaattacaactagtaaaatatagagagaatctattacaaaaattagccccaattaaaagaattgataaccacatttgaatcactttttataataataaaattcttgccttcatttttagcaacttccaaagttaagcagcaagttgttgcttttccacacagaacatcagaatgttggaccctgctcttctaccttgtcaggctgctacctcaccttaactcctacattagtatgatattgaccactttgggcctaagccttcacagttttgttttggggcaccttcccaaaaggcctcgtagtctccatccttatagggtgattctacaatgcacccccttaaaagagatgtattgatacacccttgacttatttcggcatctagaagaattttttagtctatttt

SEQ ID NO: 145614 - DNA, 717 bp, Cannabis sativa
agaacctgaacctagacaaagactgtgatcgagacctggacccaaacccggaacgggacctggactcaaactaagactcgggacccaaacaaaagcctggacccagaccaggacttaggaaccggacatagttgggggacctagaccatggacccacacccaaaccaggatctgacctggacctagtaatccaaagtcgaacccagacccagacccaaaacctaccccgaacaaaaaccaggacaggaacctagacacggaccaggaaaaaacctgaacccaaacttgaacccaaaattggacctgaactcgggacccgaactcagacccagacctagaataagacccaaacatagacttggacctaaacctgaacttgaacaccgaccgaaatcggaacccaggacttacacctagaattgaacccagatacagatcgagttcaaaacatgggaacttgaacctggacctagaccccgccaaggacccgaacccacacctggagcctgatccagacctagaccaaaatccagacccgaacccaaactcagacgagggattgaaccccgactggaactcaaatccaaactcaaactccgaatcacaactagaactagaatcacactaggactcggaccaagaccaagacctaaacccaaacccgaacccagataaaaacccagaccgagacccaaacctgaaccaagactaggactc

SEQ ID NO: 145615 - DNA, 573 bp, Cannabis sativa
  modified_base (161)..(163): a, c, t, g, unknown or other
tcaccattaaaggtcaaagattgagttctaaaactcaaaacttgactaagcaacatatcatgcattcaaatcagcccaaaattacttaaacatgctcacagccacaaatttctcaattttccctttgaaaacttaagcttttgaatagaaaaaccataacnnnaagcaataccactaatcatgcattactagctgctcaattatcctcaaataatcatgcttaaatctctacaacaacaacaaaatcacagtaacaagaacaacctaaactaagcatgcaaacaccatcatttcataaaaattcttcaagaaactaaaaggaagagctacaaggatcttaccaacaacttgaggtcaaaatctatgccaaaacgagcttgaaatccaagagaatttccccccaaacccagctgctcaaaaccgaactagagagaaggaaagagagccttttgaattttctaactttctaacttttttctaacttttgaaaaattaaataagagtaacttaacccctaatacttcagccaacaaaaagcataataaaacacatatttctcaattattaagtcca

SEQ ID NO: 145616 - DNA, 692 bp, Cannabis sativa
cctttacctaggatcgatgatctttttgatcaacttcaggggaatacggtcttttcaaagaatgatctctaatcgggctatcatcagttgagaatgatctttttaaataagatgtgtttatcgatgatatccttgtgtattctcaatcagaagaggagcataagctacatctccgaatggttctgcaacggactcgagaacacaagctttatgccaagttcaaaaagtgtgaatttgggttgtctcaggtgtcctttctagggcacattgttagcaaggatgggatcaaggtggatccaggaaagatagaatccgtcagggattggccaagaccgaaaacagtggccgaaatcagaagtttcttgggtctagccggttattatcgtcagtttgtagaaggattttgctaaaatctcaacacccttaaccgagctcaccaaaaagaatcagcgttttgtatggtcagacaagtgtgaagctagttttcgtgagctgaagcagaggttgattacagctccagtgttagctttgccttccgacaaagaaaagttcgtggtttattgtgatgcctctcgtcagttaaaagattatgagcagtgatatccgactcatgacctagaattggccgcagtagtgttcgctttaataagttggcggcattatctttatggagaaaaatgtgaaatttatac

SEQ ID NO: 145617 - DNA, 860 bp, Cannabis sativa
tcctagtttgccttcagaaaatttgttaactgctattttagtttttcatccagatttttcccaataaatacacatttagtgggattatctggatctaaaacaacttcttcgagttcttcaattggctttaactggtttttctcttcttggattctaagatctagatcctcttctttcttctcgccttcttctgttatgaccaccattagttgatggttggctcttctattccgaagttctacacaatagcattcgtgagccaacagctggtcacctcgtactacacctactcctgctggtgtttggaattttaaagataggtgtttgattgaactgactgcccctagtccaatcaatgcagggcaacccatcaatatgttataaactgatggtagatcaacaactaagaagtcttgcattaatgttgtagataatggtggctcgcctattgttaatggaagttcaatgatgcctcgactggcgacactatcaccaataaatccgcataagctcaccatacacggttttaactttgcattttgtagtcttattttctttagcgtatctttgtataggatatttatcgagcttccattatccaccaatactctttttattctcttgttggcgagttgaactataaggacaagagggtcgatgtgtggatacctaacgtgtttcgtatctttctccgagaatacaattggaagttcttctattttgaatttctttagttattccagagtaaacactgattgctcattcttgatttcattgacatatctcttctgggcattactactttctccaacgagatgcggccctcccgagataaccaatatatcctcgccttcaacagg

SEQ ID NO: 145618 - DNA, 533 bp, Cannabis sativa
  modified_base (351)..(351): a, c, t, g, unknown or other
aataaaaatttataagtaatttttacttaatatttaaacacaccatgtatttttaaaatagtgtactgcatgcacaataataattatagagttacttctaaactcacatttaaagaattttagatctagtactcacatttaaagaattttagggtcaattagatcctacaattaaaagtaagataacaaataaataaatattatggtgccgtttggtaacacttttgtgttttaattttttaatcacaaaatgaaagtaaaaatttttatttctaaaaattttgtttttgaaaaacaaaaatacgttttgttactacttttcttttttaattttaaaaacagaaaacaaangtgtgttctgtaaagtttattttccttttatttaagtcgggtctaggttcaggatcggattcgtgtttgggttagaggcgggttcagcgccaaggccgtggggggatctgggtccgagtctagttggagtctaaaatattgattaagaaggaaaaaaatgtttaagaaaatattaaaagtga

SEQ ID NO: 145619 - DNA, 545 bp, Cannabis sativa
gttgacaagaagctaacctgtcaccacggaaggactagctgcagcatcaacttgagtgatagcaaacacctgagtaggtacgggctttgcttcctgcttctactcttctttctttgcatgagggaaatctttcttaaaatgcccaaccatgctacactggaagcatgttttccggttgcactctctaggatgatgtttcttacaacgtgggcactcagggtatgaataaccttgacgtccacctctaccttggttcactcgaaactgcttgctctaccccaaaccacaagacggcaacgtagcctttcttttctggttagtggtggaatcaccaccgttcctactgtatataggagtaggaagagtaagggttccaccaacacttggagtctctcaaggctcttgaaggaacttcaccgcacccttagctctcaaagccttatcaaccattttagcataagtcgttgcctcactcgtagtaattaccagaatgtgtctaatctttgcatttagacccactaggtacttctctttcttcctgaagt

SEQ ID NO: 145620 - DNA, 781 bp, Cannabis sativa
cgtgatcaggttgtggaggcagggttgtgcaattcgatcgaaaactagtgatagttcgaccctggtcagcggatttaaatgctatgaacctggtgcgcactgttccattgtggatcagacttcacgatttgggcttcaatactgggggtaccaaaagcttaagtgcgctggttagcacaatcgggaaaccaatcatggtggatcaacacacgaaagactgaacaaggctgcagtatgctagagtgcttgttgagatggagatcacggatgcgccaccccgattcattcctttttttaatgagtattgggcaaggcttcaagaccagaatgtggagtatgaatggcttcccgcaaagtgtgcccaatgttctaagtttagtcacacaaaagccacctgtaggcatgaggagattgttaaacaaaaggctgaaaagcaacaacatcagcaagagataaacaaacaaccacagaagaaagaatcaaaagcaaaggcagcaaacaagattcaacaggaatgggtggttccgaagaaaacaataccagttgcaacaaccagtcaacctggaagtccgaagaagaaagctgagagtagcagtaactcgtttactctgttacaagagcagaatgaaggcagggtagagatgcaggtatctactgaacacattgattctgttaatgctactgttgcctataaatagtaataacatagggtgttggaatgtgagggggctgaataaaatggaaaagtaaaatactgtttttgatttatgttgcttgaata

SEQ ID NO: 145621 - DNA, 548 bp, Cannabis sativa
ggtacaatacatataaaaagaggtgtgtttcaaataaatataaaattagagctaaatttaattaattgattaataaaagaggcatttttcaacttacccctaattataacttattgttttgtatgggtttcttcatttttatcgagtagttcagacttttctttctcatcattagtcccaatttatcagcatttatttttagataatcttttaattttgtttgaaagatactttgatattatagatatatgtttagtatttttaattaatatttactattaaaataaaaaagaatactataaaaaaaatatcataccatataacatataatatttaatattttttatatatatttttatttttttattattattttatcataaagttttaaaaaaattatttctttaatatatattaaataataatataatattattttaataattttaaaaagtactaaaattatcttaaaaaaatataaaaaataatgtaaaagtaagataaaataaaagttacattgaaaatataaattgacattttatttacaa

SEQ ID NO: 145622 - DNA, 528 bp, Cannabis sativa
ataaaaatgtaaaaagtattgtatacactttgtgtaaagattcttaataaattattcactttgtttactaactacataagtgtatattaaatggatcattttataaatactcaaaaaatgatttttagcaaaagaaaaaaatgacaaaaaattatatttttaccaatttataattttttgctatatttttacgatttttatttttaatgaaaatacatagtgttagtttttgttatttttttaaataaaaaaaaaaagagcaataatagtatttatcgagtgagcaatgtttctttggagttcatttctataacgatgaacgtatgaatatttattggaccacattcaatgtttttaagtttatccagattcgatctaattatacagtggatgttagattctaccatccaatccgatctaattaatttcagtcatccaatcgatataacatcaattggatgttagattggattagttatatccgttgaatgtattttatatctatatttattagtttaatttgagttt

SEQ ID NO: 145623 - DNA, 520 bp, Cannabis sativa
acctccggtgctccgtttccgacgccgtttgaggggaaattcaccattttccatattctctcttttttccaaactcatttcacccaaaaaacactctaaacccgtaaatcacataccgatattcggccattaacaaactattttgaaaaaataaataaaaaacttgggttctcagcattttcaacaaaataaagaaacgggaaatatggtttaaatggattaactcaataattattttccaatttaattttctcgaataactttaaaaaaccagatttttttttttaattaacaagccctaaaatcaaatgtccaagctcatgataccaattgttaaattaatgagcattctattatcaataataataatcacaattaatactcataaacatccaagatcaatcatttttatttagggtattgaataacaataaacataccttaatattgtgcattctttaattgtgagtctccttgattcaccacaacatcttctaagcattaagagagcttatggaaa

SEQ ID NO: 145624 - DNA, 1739 bp, Cannabis sativa
tccacctttccctttgggtaattcttcgaataagttgatgccccacattgcaaagggccaaggacttgtgatggagtgcaagtggctcggaggttggttgacatacatggttatacgctgacacttatcacatttcttggcgaagttgaaagcgtcttgtcgcagcgtcgaccagaaataccttgccgcatgatttttaaggcaagagaattacctccagtatggtttctgcaaataccactgtgcacttcacggaggatataatcgcactcctccccattaatgcatttgagtagcggttagttgaagcttctgcgataaagtcttccatcataaatgacatatcgagcagctcgatatcgcagttttcttgcttttattttgtcttcaggcaagacctccttttccaagtaattcaatatcggagtcatccatgtaactcctctggcaatgtctatctccattacttcatctcgactcaccgttggaatgagttaatacatcgacaggattttacatcgagcaattcagcttctcttcttgaggccaagcgggccaaagcgtctgctcgtgagtgagcacgcggtactcgagagacaatcacttttttgaatttctacaacaactcccatgttatggcgaggtacttagccaaacgcctgcctctgaccagatattctccatttatctgacatacgacgatttgggagtcgctaaaagcctataagtactcgatcttcatctctagggcgagctttattcctgcgatcaaagcctcatactcgacttcattgttagatgcagaaaattcaaatcgtaaggcagcgtgtaccttaaaattgctggggctaatgagtattatgcccccgccggagcctttgctgttagaggctccatcgacgtataaagtccattcttcgccatttggtacatcaatatcaattttttcttctatgagtgccacttcaatacttgggaactcgagaatgaaatctgtcaaggcctgtcccttaatcgcagatcttggtttgtacttgatgtcgaactggcttagctctattgaccatttcaacaaccttcacgatgcttctggttttgctaaaacttgtctcaaagggtaattcgttaaaacttcaatgctatgggcctggaaataaggtcgcaattttcttgacgctattaccagggcaaacgccaatttctccatttgagggtaacgagtcttagcgtctagcaaacatttactgacatagtacaccgggtattgcctaccttggtcttcgtggattagtactgagctaattgcatattcagacaccgccaggtaaatggataaaacttctccaagcattggttttgacaggattgggggctgccccaaatgcgtttttagtgcttgaaaagcttcttcgcatttttcgatccattggaacttcttattgccttttaagatttgagaaaaatatttgcatttattagaggatcgtgatatgaaacgatttagagcggcgactttacctgtcagactttggacttcttttggcttagttagagatcgcatttctactgatgctttaatcttcgtagggtttgcctcaattcctcgctgatttgccataaacccgaggaatttccctgagccgaccccaaagacacacttaagagagggttgacatggtcttcggcatgtttagattttacgagcatatcatcaacatacacttccatggtgtccccaa

SEQ ID NO: 145625 - DNA, 617 bp, Cannabis sativa
  modified_base (26)..(34): a, c, t, g, unknown or other
aagttcttatttaggatgttaataannnnnnnnntgagtagatctaagatcctgggaaaataatttccaacagcactcactacatgctctgtgactactaggtgcacgcgcagctcctcattgtctaggcatttagtcaacaccggtggtttggccaattgcttctttagctcttagaaagcattttcacattcctctatccactcgaatttttggttgcatctgagaatgttgaagaagggtaggtatttctttgtagaaatgacagttgtgggagacttcatgtccaaaagggcttggatcttgtctagatttgcttctattcccccagtgtttacaatgaagctaaggaattatctcgggcctatgccaaaagagaatttgaggaggttgagctacatgttgtagctgcaaaggattttgaagcactcgcctaggtctttcacatggcccctgcctttctggactttacaagcatgttgtccacatacacctccttgttgtggctgatgagatctgcaaacatcatgttcactagcctttgatatgtggcccctgcattttttagcccttaaggcatgactttttagcattataggcctaggtccatcatgaag

SEQ ID NO: 145626 - DNA, 667 bp, Cannabis sativa
aatttttggcgccgttgccggagaggtttctgcgctacaaaaggttagtatagtagtttatttttttttttttagtatctgtttattttttttgtttatgtctctctttatttatttatttttaattgatttgtttccttatttatttaattattaaaaaaaatataaaaaaatgccaatttttttttttctgttagtagtttatctttttttattttcgtttagaatatatagtagtgtaaaaaaaaaaaagaaaaaaaaaattagttaatatagtgtatatatagtttttttaaaattatttttaatggtatagttataaatatatatataggttttaaaaaaaaattgtacttttctcccctcatttcgttagtgtaaagaaaaaaattgtttcattttgctagagtatatatatagttttatttttgattttatgttatttagtaaaaaaagagtcaattaaatttgcttcattagttatttttttttttattgttttattttgatttatcatagttttattttagctataattttgttaacttttctttgctttattattattattttattttattattttttaagttagtaatagacttttatcttttagttttctttttttttttaaaaaaaaaaaattacataaattttagtttataaa

SEQ ID NO: 145627 - DNA, 732 bp, Cannabis sativa
cctacctctcccaagtcgttaaactttgtccaaaagacaatcttaagctctcaagtcttgagctccaattgtttagtccaatattagatattactcttatatataccatcaaatggccaaataattatcatcattgcattcgacattaaaaatcgagtccaacgacatataatatgactatacttaaaagtttggagttctaaaacctcacctaagcggtgcagagtaactattggtggtagtaaaaattggtgtaccggaaacatcaccaaaaataggggtagtatatatcaaaacgactaccttgatgagtagatcacacccatgccaaccgtttgtcaaaacattacacgatatcaccagaaagtcgtcaaaaagggacagagctacaaaaacgtcatcagaaaaagtagcaagttgggcaaaatggtttaatgtaggttgttctcctcgacgagctgagtctaatggttaagatgactcgttaaatggacactggaggtggctggaaaatctgttcaaagtttgaacctccaaactttgacttgcgattctgggctaacggcggtgaaaggagcggtgccacttgggggtttaaatcgccgacacctaggggttcgaatggtcctacgtgtggggctgggtggtggccgaagatggatcgctggagtcatgccgccgctgggattttatgggttgtcttttgttgtggtttgagagagagagagagag

SEQ ID NO: 145628 - DNA, 737 bp, Cannabis sativa
ttagagcataaaacccaacaaatatgactctgtgttggtcataattgacatgtttataaatgcagcgcagttcttacctgttcggacaaacatctccattgattagtatgctaagttatatgttagagaaattgtttgtctccatggtgtcccaaactccattgtttctgattgggatccaaagttcacatcaagattctaggagagtctacatcgagctatgggtattcagtttaaattcagcacagcttctcatcctcagatggatggacagtctgagaggaccatttcgattttcgaggacatgctacgggcatgagtgttagactttgaggggtcatgggtaaagtaccttcctttgatcgagttctcgtacaacaataactatgaggcaataatcgggatggctccttacgaacttttatatggaagaaaatgcagatcacttgttcatttggacgaagtaggtgaaagaatgttcctaggtcccgaagctgttcaaagaacaagtgaggcagtggataaaatcagagcgcgaatgctcgtggctcagagcaagcagaagagttatgctgatccaaaatgtctggatattgattttcagatcagggatatggtatttctccgagtatcgcctatgaaaggcataaagcactttggtaagaaaggaaagcttagcttgaggttcattggacctttcaagatcgctaagaggatagggcaagtagcgtacaggt

SEQ ID NO: 145629 - DNA, 1228 bp, Cannabis sativa
tataattgtttacattgtgaataaaaaacgcaagcaaacacaattgtattaagttcgaatgaaaatagtacaaggcatttaagatatgaaaaaacccaagaagggttacaaacttgtctttacaaaaatgccactaggggcaaaccattaagtcatcttcctaaacaaagaatgagaggggaatgtcgataaactcgagaaagaccgtcttcatatagcttgggatagaccatctgcacgtagcttggagaaagaccgactacacgtagctcaagaaagattggctacatgtagagagccgtagtctctacacagacctaattctcctcatcaaaagatcccatttcctgcagccgagactctattcccagccttaggaaattcctcgataccagaaagaggttggcgcaaaggtcttccagtgcaggtttgggtcttgggttggctgaattctctgatagaaatcaggccaacttccctcccagattcatcagaaaccacgccaactttcctccaaaattccttgtcagcctgaggagaacctttaagatcgttcaaagaatctatgtctattcttgtggagacaaagaaaaaaggtcagtggagcaacaaaaagtaataatccggctcaaaccaccattcaccaggaataacacttaccctcaacctcaagaattacttatacttatgttatgaggtgaggatcgccccatggcgggctacggggttcccctagtttcgattggtcggaaactcctcacccttagaatccatcgtttccggttccaattgaggctggaagtccttgggaataaatggaaaatggttagtgcatcctggtattatgagtttgggaacttctaaactcagaagggacattctagcaagtaagagacgatccattctcaagatggatctaaaaaaaaagccagagattaatgaaaaatgacaagcttgggccgcccttttatacacaaagttcagtgacaagaaaactaaggattgggaaatctaatggttgggagtagggcagaatatgaagagacaattcataatgaccctcaaaatttaacaaccggccaaaatcaaaggacacattttttccaagaagggattttgacgaaaataccctctataattattaaaaagtcttttctttaccgaaaaagaacttttgaaggggcaattattatacccgaaattcggctgccatctcagtggaggacac

SEQ ID NO: 145630 - DNA, 528 bp, Cannabis sativa
ttttatcttttcaaattatgcatgaaaatagtatttttgtaaaataaggcaaaatatcggggcgttacaatcatctagcccgaacttactgttgttcagcatttgccttgtctttacctacacatgtaaacaatatctgtgagtcgacagactctataagaaaaatataaacataaacatataaccagatcgtaatcaggcgcccatgcacctaatcacgaccctatgcgcacactaagtctagaacgtttgtatcactcaactaaaatgatgatacattgaaggagatgaaattaaacccatttcatccaaattattctttaatcgcaattttcaatagagtggtgatatcaatgttcaacaatttcaattaagtgactttacaaattttattcacaaaattattaccaatatcaatattttgagaagatggtacacaaaaagagactacgctgattgtcacgagctcaccttttcaggcagcggaacacccgtgcgacaccttgacttctctaagccaaggtcagc

SEQ ID NO: 145631 - DNA, 1034 bp, Cannabis sativa
tcgtcaaatcctataggcctacactgggaatattcttgggcagaaggaacatgatgaacagttaagggagacttactggatccagatgtgccggcgtccggggccccagtattgggaactgggaccagcaacttaggccaagaaggcgtccgctctttgcccgcctccagtcgaagggtcttcccagcagcggcctgagccttaatataagcttactcctgttccctccttaagaggtacttttggtatcggtcctacgccgaggccatgatgtccgccttgagcaccttttcagcgtcccgggtacgaatatttgggcatagaacctcggagagattgaagttgtctaccgattgactctcggagatgagcttggccttccggcagttctctattgtgaccaagtcccccacgttaagacctttcttatcataagtggagaaaaccttggcatgctggaggaacagctgggtaggggcagtgcagagaagaggagggatcctgacccactctgtgataagctctgggcgatccacggcttagaagctagaagagaagaaaaagcggtggcgatatttcttaacattcttttgaaaattaaaagagatcgggcccttgttagaaggatgggcccggagagtgaaaaaaccgtccttaaacatgtccctcttttttgggaaaaacacgagttgataaaatataagatttcagccgggctaggcgaagcccagcctctggctatataaaaattaaataagcctgagagcaggcggtaagcttggggaataatttggtacagcgcgaggccaacaaatacgaggaaattaatgaaataatcctgaaggggaagcatggctccggacatgagatgggtctggctccaggctccagaacccctataattgtggttgggcgtctcttcgtcccgaggtaagcgatggaaaaccccagacgcggatggtttaatcccagcgaccgtcacgattttctccaattgatgggcacagatcagggtggagtgtagttcatccgct

SEQ ID NO: 145632 - DNA, 1065 bp, Cannabis sativa
aattgcctttactaatccacattactagagcggtcattacactattcatgttcgcttcccacacaactatccattagtcgtggaggtacagataacaaataaaacagtggcccagactatgatagataatggagcctctacaaacattctgttcaaaacaccatatgaaaagatgggactccaactcaaagatctgatcccctgtacccaactagtgtatggtttctccggccagattgttgcacttttagggcaaatttgccaacccctcactgttggacaagatccgaagagcataactgtgatggcacaatttttgataattgatgttccatcagcctttaacgttatgttacgctgaccagccttatatgacttggaggctgtcacaccaattttccattcgtgcatcaagttcccaacaaagaatggggtagggtgcctaaagggaaatcaacaagtggctcgggaatgtcataaccttgccctaaccaaggccaaaaaggaagaatattccagccagagttcggataagggaaaaagcattaccgaataggaagctacccaaggtggggacgaagatgtggatccccgacttggggaaccaaatacaaatgttgggccagtagaagaattggaagagatagaaattgaacctaatgtcccgaccaggaagctcaaaattagcaacggtttgctccttgaagtaaaataagctttgataaaatttctaagagcaaacctagacatttttgcctggtcacttgaagacatggtccgtatcaatccttctataatttcacacgccctaaacatcgttcagaaatttcatcctgttcagcaaaaaagaagattgttagacaaagaacgggcacaagcattaaaagaagaggtagaaaagttacgcaataacaacttcatgattgaggctttctacccggcttggatagctaatcccatactggtacccaagcccaacaaaaaatggcgagtatgtattgacttcaccgacctcaacaaggcgtgccccaaagactgttatccacttccaagaatagatcagct

SEQ ID NO: 145633 - DNA, 762 bp, Cannabis sativa
  modified_base (428)..(428): a, c, t, g, unknown or other
  modified_base (731)..(736): a, c, t, g, unknown or other
atcgaatcagatggtaaaatctaacatccaatatataattggattggatctggataagcctaaaaacataagatgtgatccaatgaacacccctacccacaagtatggatactcgtattttgtgaattgaattggattgagtattttatgaacacttctttgtgctaattaaactcttcatattgcactcttttctaggagtgtttataaagtagttgatccaattcaatcagcacgatccaattcattctaatccgcaaaagtgcggatatctgcacttgtgcagattgaattggattggaaaattcaaaattcgcacttgtgcggattgaatgttgattgatatgtaaaagtaattgatacaatccaatctacacatatttataaaaaattaaaaaattaaatatacaaataatattttaatgtanagaaaatagtaatttaaaagtataatacacataatacaattatattttaaaacttaataaattaaatgtatattctattcttatatataattttttttatatgcaatttaaaataaaattaaacatttttttatacatacaattttttttcttccttttattatttactattttatttattttaatgtgttgttgaagatataagataactataatttattttattttgttgctagttatgtgaaaatagtaactatatatttgttgctagatataagataactatatctttatatattaaannnnnntatctaacggcatttcttggtttaac

SEQ ID NO: 145634 - DNA, 1157 bp, Cannabis sativa
aggaaagctctcaaatccatagaagcaaactgtagacctattctatggaaagggcaatcaatgttccatggtgctggagcagtagcctgggagaatgtttgtcagtcaaaaatagcaggtggtttgagaatcaaaaagctagaggagtggaacaaggcagccatttgcaagtatgtttgggccatatcaaataaacatgaaagcttgtggttaagatgggtacatagtgtgtacatcaaaaagcaagattggtagagctactctgcttcagtccattccagctggtactggaagaagctggtagctctaaaagaccagataaaaactctagctaatgttgcagagtttcagaagcaaaaatactacattgcagctggatacaagctgctcacatcacctcgaatcaaattagtctggagtcatgaagtgtgggccagattgaatactcctaaacatagtgtaatactatggttggtaatgctcaatagactaaaaccaaagatagattggttaaatatggtatacaaataaatgaaagttgcagcctttgtaatgtccaaaatgaaaatggccagcagctattctttgagtgcagtgttgctgattatttctgatggagattaagagatggttggattggaatgcaaggaccaacaaccttcctctattggtgagatggattggcaaggaaaaaatcaccaaatttaggaagcaagtttatgctgcagcaattgctgccttggtttataacatttgggggtcaaggaatgccattatttggtaggagagtcaattaaactccaccaggttgatcgaagacattaagtggagtttaaagcttcgaatttctatgcttttgccaacgaaaatcaagattgtagataaagattggtttcatgctttataaagtatatacaatacaaaagtatagcaagatgcagttgaatttgtatagatttccttaggccctgtttatagggtgctagtaggatgtaaagattggtttgtacaatacaattatctgatttatcaaaaaaaaaaaagagagatattggcggctaaaccacttaaactttacggtttgtaaaacacttagccacaaaaatcgaaattttggcggctaaactacctaaaccctggttccgttttgctctgca

SEQ ID NO: 145635 - DNA, 647 bp, Cannabis sativa
  modified_base (27)..(28): a, c, t, g, unknown or other
ttgggtttatgccgcttacaaacttannactttgggtacttatgccgctataaattatatattatatttgatgataactaagaaataaaattgtattaaattttaatattataaatttttcatataaatttctttaaaaaatatgaaaagttagatataaaatcaaacccacccaacggatttaggaatttaggccttatatgtatcatatttaagataataacggagtctgtacttacaataacagagtctgtcaccgcttcatactttagcttttattatacctgaaagttagctgtacttcagaaagtgacacgtgtcaatctcgtgaaatatgaaccagcagatatgatgataattatatcattaaatacaaaatggaataactcattaaatatagaattaatggagtatattcttaactcggtgacttcatagtctgaggcgagacaaaaatacacaaactatcaattcatgtattgacgagaaaccatcttgccttggaaggcataatcccgagggagctacggacagtgcatagcgagacattgttacgaaaattctgtttattacgcaagtgtacgtatcaagtagtatcccacgcaagtgaggtcgaaccacagagaattggactaagtactactaaa

SEQ ID NO: 145636 - DNA, 932 bp, Cannabis sativa
  modified_base (52)..(54): a, c, t, g, unknown or other
ttttgggctgtacaaatgttcattgggccggcccacagtattgttgtaatannnttccctttttagaatattcctgtttttttccctatattctaagggggccatggcccctatatgctctaatgtacatccgcccctgagaccaaccaacatgactaaagttttagcctgtaacactaaaattccacctgaaaaaatatcaaaaaaccaaaataattttaattagaaaactatcaagctgatcaaaaacaatcaaacaccaaaattaaacaactaaatccccctttaaaaatactagaactagccaaaaggaataccctttggctagtaacaacttaactcttatattttacttcataatcatcttaggatgactatcccttactaagaccctaagacctaaaaaagattttgatatgtaatctagtaacaacaaataagccatgcaatgctcccacacttaggatatcaaaagtttcctttgaaaattatcacaataataagataagcaacgcataatgtttttaatgtacccactatgactaacctttgaggggtttgctcaacgcagcgtggactatattatcttctgataatataacatcacctaatccaactaagctcgtggtgcttaataccgctgcatccaccataagtttagagtgtaaactctcttcttgggcacctctagaatttctagccaaagctcttctattccttccattagtttggagacttttttcgggaccatccttcattgaaatgatcgaatcataataactaattatccactcaactacatgttgtggttgtcttgtctgttggccatgaataatcttattcctttctgtccatattgcccaggaacacataattaattttgcaaaggcatctctttccaccactttagaagcataaagtaaaatattctt

SEQ ID NO: 145637 - DNA, 942 bp, Cannabis sativa
gtaataaccctgactcatgtcttccctggatcaataatattaccatacatcatcactttcttacctttataatattttagggtaataaccctagaccacatttaattaagcttaaggtactagtttaccgggtctagcttatttatgccttaaacgcacaatttataatctcaatatacatacatatatcatgacatatcaatacttattaacaattcactagggtaaaatcgctcactttagagtaataactctaatcccggtttctcgttactcatatatatcatattccgtacaagcaccaccgcgtataactctatgtgctagctactgtcttacctaatatcctgcaaatatgaagattccaaatccccgggtgctcctgaccaagtgccggtaatcctagtcacaatcccgagatacacaagtatagggttaatccctagatccatttccacaaaatataaaattggcatttaaattacagataatcacatagagctcaaaacgagctttccaacgatataaagaacatcctaaacggggtctcgagtcaaaagttatggccaaaataaaaactcgaaaaaatacaataagctgccataaaatggccgcggctactggtttaacaacccacgaaacccagtttccagccacgaaaatgcatccgaaaataccaactttaatgctaaaccagcccacaatcaaaacaaactttcacctagaataattcaaataattagagaagaattacacctaattcactctctaacaacaccaagaattacacctagaataatcatcaatttcagcaaggtttaactggagcaaaaataccaaatcaagagcttgcataaccataaaaaaatatcagcatctttacacaaatttattctcaatataacccaagcaaatgccttaaatcctcatccatgcataaaa

SEQ ID NO: 145638 - DNA, 573 bp, Cannabis sativa
ttgatttctcctcgcaacttggcaaactttgctggaggaaagaacttagacaaaaattttgttgccaagtcattccatgtagctatggagtttggaggcatggagttcaaccaactcttggctcgttctctcaacgagaatggaaacagtctcaaacggatggcatcatcactaactccattgactttaaaagtctcacagaatttcatgaagtttgcaagtgcaaattgggatcttcggaagggagtccaccaaactggactgaagactgcaccatttgaagtatgggaggcttaatttcaaagttgttagcatccactgctggtggtctgatccatgaatgaacccccgtaagagttgggaggatataatctctcaagctgcggccatttgcttgatcttcaacgacacctccattattaccattgttgcctccattattcgcaacattagcgttatcagccatgatttgtggtgattcagcaagtgctgaaactctctcttgtcttttgttccttctgtttctcctacaagtcttctcaatttcaggatcaacgggcaatatgactcctt

SEQ ID NO: 145639 - DNA, 781 bp, Cannabis sativa
ttttttttgataggataaatagtatattaattaaacttgttattatgggacaattcttatagatttttttttttaaaaaaaaaaaattgtaattgttgtatacaataatataagacgtgtgataagacatcagtcatatttcttatacattgaatccaaaaatatgaaatctacacttagtgcgaaatggattggatgaacactcctattaagaatgataaagtggagataaaactcttcaaaaaaaaaaatagaaaaaaattcagtgatataaaatcatcaaatgaaggttacaagaattgaactcatgttatgattgaacttaacatgagttaggacaacttaccatatgtgctagaataatttattttataatttaaatcttattcatttatatattgttgtgtatagaatataaatatatacatgtgttttctaatgtaatatgttactttttcgaactatatatttattttcctaaatagtacttaatattgtttttatctaagtttatgtatatagagaagaatatatttaaagcacacatatattctcttttgctacagaggctttttgctaaaactaaaatttgaagtaaaaaatctatgaatatagaagaagatttccatccaggtggtaaagagtggtctctgagaagaaaatataattatgttaaaaatttgtattactaactagttcatgcatgcttcatatagatagtgtaattaaaataaataattaattcaatatctaaaaattttaaatacattgaacatttacc

SEQ ID NO: 145640 - DNA, 1329 bp, Cannabis sativa
tgactaattcatcaatgggcgaaggagacaagatgttcacgaagctccatcgttcatgccctctcatcggagctcctggttgttcatcagtttctggacatggtggttatggaggtaactagaaggaagagatgaaggggaaagaagaaaaagggtcggggtgggaatggtgatggctttggggtgagagtttttggtggtgggtttttggggtaggagttcctggtggtggtcaattaagtatggtttccatggccatgcttgcggccgttgaagaagaagaataatgagagagaaagagttgaacataaagagagagaaaataaaataaaaaatgttaaagtttttatttatttttttaatattttctataaaaaaatattaaattttttaaattttttaaattttttaatttttaaataatttattttatttttttaattttaaattattttaaataaaaaaatatgatttagactaataatttgtcgacatgtggcattttatttgagtttaacggatctgttaaaaaagggaccaacagacttacagaaaatgcgatcttaagccatctccaaccgaacactaaaacaccaaatttagtgtagtttcacactatatttactccaatggagcactaaaactatactgataaatgggtttgtctacagtgccccaccaaatttagtggggcactttagaccatactattttttttttaaatttcttttaataattaaataattcttttaaaaagaaaaacttattaattatatatatttagtattaaaatattcttattatattaataaaataataaagaacataaaatttggtgtaatttttagtgttatggttggaataaaaaaaaaattattgttgaaatagtaattttttggtgttgatttaacactgaattaagttttttcattggagatgcccttagagactattaccactaatttttgaggttggagactaatttacatcaactctaagttcttgaggatttttaccgcaattatccttttaaaagaaaaaaggttagtaaaatttttaaaaacactaaaaaattgtgttttttctatgaatttttaatgtgccaaatttgtttacttgtatacatgtctaatcatatgaagaaaattactttttacacccttttatctgtataaaaaaacaattcattaataaaaaaaatctaaaaattacaaaccggttacttttttttttagataagaaaactattatattaaaatgaaatcataatacaatagtcatcagaggaggtggaatttcctccatccaaacacattctttgtccaccga

SEQ ID NO: 145641 - DNA, 728 bp, Cannabis sativa
atacaattgtctactttcttcactattgaggtgccaagtacaacaaaaagtatattgctattgcattcaatatcaaatctcataaattttaattgaataattaacaattttgcgaatgaaattttgacaacactgaatctatcccctaaaatacacaatttgctaaaaattctccgtaaacttttacatagaaatttggtcttcccattaggttttgtcttattattctttttaaatactgatatgtctttataaattagcaattttgcttgctaaattttgatgactatcaaatcgtacccctcaaaataaaagtgagaaaaatacaacctttttttttcttaaaaaattaatttagatcttaaaataataattttgaaattaaaattttaaattaagcgatttaaaaaattatttatttttattaaaaaaatccatttagatataacaatatattttaaaaatttaatttttgtaaaaactaaattttatgggaacgagtttgagtctatttttttctccaaaaatctaaatttgtttaagtaaacataatatttttttatttaatttctattttgttcaaataatttcatattttattgattttttaataatttttattaatttttaaaattgatagaatattataattgttgtgaaaattatatacgcaagtatacgcagtcacacaagtaataaagtgataagtaagatcgtctccacaggga

SEQ ID NO: 145642 - DNA, 762 bp, Cannabis sativa
  modified_base (327)..(327): a, c, t, g, unknown or other
gtttcaactattccagaaaagataaaagtcatgaaaggaattcctaaagaatcaacagttagaggtctcatgtattttctagtatgcattgaaccggaaacttgctattgagttggagttatgagtagatatcagtataatccacgaaaggatcattggaagataatcaaataaatcttatgatcaaaagaggaactatatgttagtctataagggccgtattttaatactcttagactacaccaaataaaatttttagacttgcattaatgctagaaagtctacttatgagatggtgattactttgggggtggagcagtgattttngagaagtgtaaaaactaatctggagtctctaactctactagtgagattgattgttaaagtggcccaaaaggctactagataattatttagcctatggaaagttctatagagcttttgacattattccaataatggattaactactattgttacttcctaactaacacaaatatcgttgccaaatagtcatgaatctagtatcccaaggagtaaacatatagaaaggaatttaacaatattagggatttgtgacttaaggagatgtaatggtggagaaagtttttattgaataaatcctgtcagatcttattacaaagataatactacatactacacgtgatttggatatcaaattattcagattaattaaaatgcacttttagttttatattagtgcaagtgggagtttagtgagattttatgccctaaataaaa

SEQ ID NO: 145643 - DNA, 629 bp, Cannabis sativa
aattaaacaaaagtccttaaatttgacaatctcaatagttcggggtgaatttttaacgggcaaaaaagttcatggggtacgatttactacaagtcaaagttcaggagggaaaattactaattagcctaatttttttttcttgacataaccactatagtatttatatcacgcaaagtagagatgtacctcaatcggtttggccagattataacataattttattaatttaatataaatatcgggttgcaaatatttaattgtaacccgcctaattaaaattaaaaaaaaaagttcaatccgcccaattattttatcagtttggtcgggttaacccgtccaaaccgttcttcactttttttttatataattattattgttactttctagtattcaaataattagatttaaaaaaaaaatatatattatctatatttcaagttaaacaatactatagtttaaattaattttaagaattttagtataagaaaaatataattgagtaaacataaaataattaaataaaataataaaaaaaatagtaataatattgtatagagattttaaacttcaacatcaatatttaaatacaataaaaattattaactataaagtctaagttttaagttaaa

SEQ ID NO: 145644 - DNA, 1198 bp, Cannabis sativa
  modified_base (42)..(44): a, c, t, g, unknown or other
ctcccacaaagaatttccgagccttcacttgtttgttgaaannncgagctactttttgttgatgggctctcaactttaagtttgctacggttcgcttctctttgatttcaccaagtgattcggccaggagtacgtgctttgcttcttggttgtacgtcaatcttctttgggatggtgggtcgagatctacgggcagcatagcttcatatctatatgccatagtaaatggagtttgtccggttgcctttttctcagttgttcggtatgaccatagaacttcaggaagctccttcgtccagtttcctttagcatcctcgagtcttttctttagtgtatccttcagggtcttattgactgcttcaacttgaccattttcttggggacgcgccactgcgaagaaacttttgatgataccatggttcgcacagacatcagtgaaggactggctatcaaactatttgccattgtccgaatctattttgtacggtaatctgaaccgacagattatgttcttcacaacaaagtcttgaactttcttagatgtaatggttgccagtggtccggcttccgtccacttagtgaagtaatcaaccgcaaccactgcgtactgcactcctcctttgcctttgggtaattgtctgataaagtcaattccccaaatggcaaaaggccacggacgttgcatctgagttaactcattgggcgtagctcgaggtatcttcgagaatctcttgcatttgtcacattttttaacataggcctttgaatctccaatcattgtcgaccaaaaataaccttgccttcgaattttcttatataaactctacagacagcatgatttccacaaaatccatcgtgcacctcagataaaagtcgtgcagcttcttcttgagtgacacatctgagcaacgtcatggagaaacctcgtctatacataattccctctattatgatataccgtgcagccttccttctcatctttcgagcttcatttcgattatctgggagttccttagtgttgaggtaggctgttattggcatcatccagtttgggaaagtatcaatcatttcgatcttttctgtgccagttatgctaggctctttaaggaactggacagggaccaagtttgctttatcacttacattactacttgccaatcgagctaacacgcctacagtcgtgttttcttcccttgga

SEQ ID NO: 145645 - DNA, 683 bp, Cannabis sativa
cccgacatgtacaatcttcattcgctcgctcttacggctgctcaaccttagccttgcccttacttacacatgtaaactatatctgtgagtcaacaaactcagtaagaaaagcataaacaataacataactacaactagaattataatcaggcgcccatacacccaaccataatcttatccttgtgtctgacacggtactgagtcaagaacgttcgtacggcaatactattgaccataatatagtctatactcggtgcgctagtaatattctagtcgtaccgatgtaatactgtcaagtagtacagccctatcgactataatatcagcctattcttggtacgctagtgataattggtgaaaagtacacatttcttgatcttaaagtataaaataaattaagtttaaattaatattttcacaaaattaatgaaatatatttttatattaaaaaaaaaattatttgaatttaatttatttttattttgtaagaattaaagtgttgttgaagaaaagaaaaagagatatgaaactagcaaaactgaaagaagaattaaggaaaaaagaggcagcccaaaaagaaaagaagaaaagaaaaagtgaaaattacatgaaatatgagatttcataccaaagttagaaaaatatggcatttataggtttgtcactcttctatggcatttttt

SEQ ID NO: 145646 - DNA, 532 bp, Cannabis sativa
tgttggcatcttgtttggcctgtctactgctcagctaggaaagcttcctccatgcagatatgtgtggtgttcggttcagcatatctctttcgagcagatatgtgaagtcaattccatgtgtcacaaccatgcgatgccacgttagagtgcccaaattgggataacattttccccccaagtctgtacgggacttctgaagttgcgtgtagacttcatccgagctgcctttgcatttgaatgggtgacacgtgttaggcacgtctattcgtgatttgatgtgaggctgaccaggcatctcttcggtttttggctaattaatgctctacttaattagttcctcgaaacccagttttctcctcacgctttgacggttacacttgattagttttgatttcccaatatttgctttgtgggaggaaatcaaagcgtttgaggcatttcaaaatgattaccccttttcaccaaagtgcctataaataaggctagcatttcctcatactttacttttactgatttctctactaaacaaact

SEQ ID NO: 145647 - DNA, 629 bp, Cannabis sativa
gggcatccatctagcacgagactttctgttcaggtcggccaacacacttgaatcaggaaagaaggtaataactgtgtataatatgtgtaagtgtcatgtctttgtgtggcaaattacgtaaatactcttgttaagtatttctgcatcagtgtttgtttttctaacatcttttctgtcgttagttgcatcagatttagctaaatctattttagtgccatgtcagctttctggtgtttgttagaatgtgtcagctgtacttagctggttggttagttagtcagtttttattatcttcaggatatatattctgttgtgtctgttttgggctaattaactctcttcggttagaatcatcttcttgattcttgctctgctagggcacaatatatctttgttttgtattgttgtttgcagatagagattccagagatcttcccgaggttgaagatggagatcaaatctgcttgatctgaagggagttcagactactgcgctgaaggtggttcagctaggtgaatactacgtgttcttatgtactgagatctaaatgagtttagatctcaaaacttgagtgtgttgaagtgttaggtaacattgtataaaattcaatttagattacattgtttgat

SEQ ID NO: 145648 - DNA, 506 bp, Cannabis sativa
cagcagtagccaatgtgaagttcaattcaaatcctactaccataaaacaaaaaaaaaaaaaacaaggcaaaaataccctattgtttgcctgtaaaatgtgatttttcttaaatcctctatataataagctggaagcagaaaagatttttccttttgttccaactcattcgaatcaagctgctgatataccactagagcagtcgttcgaagaaacatcgtgaccagacgaaaccttttgtttccttccatgtcttcggtggttattgcttgctcctcctcgaactgcccctcctcctactactccccccttccttcaaaccctgcccttttttatattctcattcttctcttttccactcacaatcgcaactcctcccaccgccaatcgcaactcctcccaccgctacacccccaatcgcaactcctcccaccgccacacccccaaacgcaactatgttggtttctggtttagatttcctgctccatactttgtaaccagacgagag

SEQ ID NO: 145649 - DNA, 844 bp, Cannabis sativa
  modified_base (771)..(772): a, c, t, g, unknown or other
tggttgtatccctggctctgtcttctcacatactgcttaaaatggcctcgagcaatgagactctctatctcatctttcaattggtgacatttttcggtcgtgtgctcaatatctttaggaaatttacaatatttgttagaatctatttttctcctcaaattcctcataggctcgggtttaccaaaggctaccttttgctcatgcgcgaggtaaatattttcccgagtttcattaagctcggtataaatagtatacactggcacatatttgtcatgcttcttttgtttctttctatccttcaacagtttcgtaattctgtcctttttttttggaccagaaacccacgagttatcatttctcgtcgaaacagtttctgttgacacaatacagggtttacttctcgagcaagttttcaacaagttcatttcctttcaggcttcttccttccggacgaacacctgagctctctcattgaactcagttatgtttcttaccggacgtccttgtacatcatcacacaactcgcccccagcggttaatggatctagggagattccaacctgaagggctgtaagttgcatgttgtcatccaagtttctaaccctagcggcagccaagctaaaacgacttaagtacgccttaagtgtttcgtcaagctactgctttatattggttaggaaggccgcttcgggtcgcctatccctagcggcttggaattgtttcttgaaatccctgtacactactcccaagaaattattgaatgacgagtgnncttgttaaaccagctactcgctgcgccaacaagcgaggtggggaacaaaatatagcgtaaattgttcgtcac

SEQ ID NO: 145650 - DNA, 548 bp, Cannabis sativa
taatcaaacaaggaatattgggaggcaatcaagaaagaatctctaaaagtgacttatatgttagatgataggggtgtatattagaatccttatatctacactaagtcagaacatattattagagaaggtggtaactctgggggtggaggaattattatagaaggatgtaaaaactcatctataataatttaagctccaccagtgaagctaaataacttagttgtttttaaatggcgttataaagttattaaaactgaagaaagttcttgactggttttatctctattctattttggatagaattagagttgtttcttctgtatattcagatactcttaataagcagtaaagaattcagtatccctagaggagtaatacatgcagaaaagtgatgttgcataacgttttatgaacacgaaggaagtaatggtggagaaagttgttgcagaccatagccttacagttcttgttatttaggtttagtcaaacacactatacttgatatagatatcaagacaatggattgattgaaatgcacttctagtttt

SEQ ID NO: 145651 - DNA, 795 bp, Cannabis sativa
attagttttataaattaattttcagtttttaatccctgtgaagacgatactcgatttatcacttattacttgttacgattgcgtacacttgcgtatatctaattttagcataacagtggagtagtgttttttggagaagtataaaaacctatatggaatccctaactctacgagtgagactggatgttaaagtggcaaggaagactactagataattattcagcctatggaaagttctatacatttttcggtgttattccagtaatgaattaactactaatgttacttcctgactaacacaactatagttgccaaatactaaagaatcaagtacaccctaagaggagtaaacatttagagaggaatttcacaatatcaaggattttgtgactaaggagatgtcatgatggagaaaggttgtattgaatacaacctatcaaatcctattacagagatgatactacgtactacacttgatctagacatcaaggtgttgagattaattgaaatgcatttttagttttatattagtgcaagtgggagtttgttcggttttgtgccataattaaaacttatttcaataaaatcagatttactaattaataaaagatcaaaaattattttatgttgcattgttcacatgatttatttcatgattatatatttaatgtataaattttattaaatatagaacatatagttagtcatgattatagtgttgttaacacaatggaatataatcatgattatatgtttcaaagttttaagtctcgtgatttgtcaatacactggatt

SEQ ID NO: 145652 - DNA, 806 bp, Cannabis sativa
gaatttttagctttaatttttctttaaaaagtaacattgtatctgtagtgtgtgttgtgctatggttgcacaaagtaacgtgttaatttaaaaaagtaacttcgttgttaaagtttagatattatttttgcttgagagagtaacttggtacttttagttttgattttagtagtaataattaattcaaatgaagatcctttgttcataagtatttagaataaaattttaatatttttttttctttttggtaaaattagtatcaaaaagttaatgtagaataaaataatttaactaataagtcaaatatttattttttccaatctaaaaaaaactatcatgaaaattttgtgaaacaaaaatatatattaaattacaaattcaatattaataactaagataaataacaattttcccaaaaaaaaataatacaaatctctacaaataaattaacaaataaaatatggctttatttcataaaaacttaaacatatggaaatataattccacacaactaacttaaattagaaaaagaatcttttattcaaaaaaaaagtcataaattaagtaaaattataatttctcaatatttatcaaactttaagaaaaaagtccatattctacataatttcctgttataaatatatatacgttgttaaatttaattagtgaattaaattgtaggctaattagtaatcttttcccgcgaactttgacatataccaaatcatgccccttaatttttttggctgttaaaaattccctcggaacaattgagattgttagatttaagaatttttgtctaattt

SEQ ID NO: 145653 - DNA, 584 bp, Cannabis sativa
tgagactaatttttgtttaaaagatgaggaaattattctattgaagaaggaacttgaaaattttttaaaaaatatattgtttctagttgtaaaaattaaaagaaaatatactctaaatctttaaaaattaagaaaaggctagaaaacaatatcaatactctatcattataaaaccaaaatatacgtacatttcttaatttctaaaattaatgtcattgtaacaaataaatattcaaaatggtctctcttgaatgtaaatctcaaataaacttgcactataatattaatgcaaatacaaattgaaaaaagaattatcattttttttagtagctccaccaaatctcctagcaaatcacaaaggaaaattaaaaatgggaattgaaaccaaaattaattaatattttcacatgatgcataatctaacctcgttacaaattcaattttcaagaagctgaaaaaaaaatataacagaattattagtttcataacgattatgtgatgaaaagaaatttaatgttataaggctaaaacctactcaatttaaaaacacaagttgagatatccttagcattattctactcatc

SEQ ID NO: 145654 - DNA, 964 bp, Cannabis sativa
tttttaaaataaaaattatatatattataatattttattaattattgtttatttaaaaaatataaacatatttatataattaattttgtattaatataatatacgattttaaaaaaaaaaattagagtaatgcaaaaagagttattgatgtttagtattttcctaggtgtcatattattattggcacaattaagtatcgagtctcatataatttgattaataatttttagagagtatcactaaccagtcatggtgcttacacatctagatagtaataagcatcattaatgcctaataacaatgaatgatctttaactaacaaaatgtaagtaaaaaataaataaaatataaaattaatgcttaatatttaatatatgtttttctattcttataggcattagaatgcagttggcatcattgtatatgagataatgtgatatacagtgcggtggcacatttatatacgcagttgtataatgtataaaatgtgattattataattattcatagaatgttttattaaattatcttactgggccttggctcacgggtgcactattgtgtaagcaactgtaaaacaatattgagttagccatgagtttgagggttttaaagatgaattgtacatgttctggccaagttagacgagagttgggcccaacaaggaattgtataaaaattccattttgtcacttaggtcggcttgtatgtaataacttgtaatattttgaaaataattttacgagatcccagacatgactttaataatttattttaaggtaatatatgtttttattacaagttatctgtttaattaagtgaaatttattttaaatcacttcgcttatggaccccgatcaacgagattagcatattttaatcttggcacgtggcgttcctctagacgttataatatttattcatcttaaatatattttatttttgaactctcgtccacatgtcg

SEQ ID NO: 145655 - DNA, 1274 bp, Cannabis sativa
gtattgccatctcttgtttgaaccccattactccacaactctttcaactcgtctaccaatggcctaagaaatacatcgatgtccttatctggtgatcttgaaccaggaataagactactcaacatgaaattattatctttgatagaaagccatggggggagattgtagtttgctggcacaacaggccacatgctgtacgattaactcaaatatccaaaaggattaaatccatcggcagccaatcctaaacgtacatttctagggtctctcgcaaaatcaagatatccagcgtcaaactctttccatgcagacccatccacagggtgacgcataaccccaatttctttcgatcgcgcagtatgatgccatatcatctctttcgctgtatgccttgaactgtacattctttttaaacgacgagtcaatggaaaataatgcatcaccttacacgggaccttttgttcttgagaattgggattagtccatctgctagttccacacaccggacataaattttttaaagcatgctttttgtaaaacaaacagcaatcatgataacacacatggatggactgatatcctaaacccaatttgctgagcttttttttagctttttcatagtgggtttcaggaatcgtattctctttcgaaaatgtaaatttcaacaaactcaatagttgatcaaaaatattgcatgtatatatatatatgtgttgtatgtctatatatataatatatataatatatacaatatttatacagtatattatatttgaaaatatgggtaagttttgattttaaatttttatttacagtatattatatatattgtatgtatagtatatatagtatattgtatatactgtatattgtatatatagtatattgtatatacactatattatatatatagtatataatgtatatacaatatatttttatatatatatcatgtaatagtaaatgtaatttatagagtttattattaaattttgttaagaaatgctatgtcattaattttttaaaaaaaatttacaacttgcaaatatgtacaaaattataaaattgttatataattgattatttgattatttttaaaaaaatgtagtaaaaaaattaaaataaatctatattattgaaaaaaaaatacttataattaaaatattttctaacattaattatataaatatatataaataatttttatgtatgtaaaaaataaaaaaaaattatgtaaatgattaaataagattttaaaatctaaattataattt

SEQ ID NO: 145656 - DNA, 501 bp, Cannabis sativa
tttggctagtcatactttgaaattttgttggttttttgtttttaagtaattttgagttagtagtatcatggcttgtgtgtcaaattctaagtttgtagattaattgttattttaaaaattgtcattctaatataactgtattttttttatttggtgttgtgatattttttttagtttcgctagctttgatgacaactattactaatggaaaagtatttttcaaatttgaaaacgttatatagctttattatgtctaaattttcgggggcagttttgtcccatgtggctcgcgataagatatctgtagctcatagtttagcaaaacatgctcttcggttagacaataaattatcctaattcgcggagattccaccgccgattgtgattaattgtgactctgttcaccacgtcaaaaaatatatcagttttttgaaaatacattcaatatagattaaaaaaattatatattccacaatttatttaccaaacacttaatatata

SEQ ID NO: 145657 - DNA, 843 bp, Cannabis sativa
aagtgctgatccaataaaaaaaattcacacaaagtctggacctgcaaatattcaagaattcatccttgttgatcaaaggtctaaaattaatatgttttatatttttaaatattactgcatatgttatgttaatttttaacaaaatatatttgtccagcttgcaaccaaaactttaactatgtgggacgagctaattgagactgttggaaaaataatatgtgaaattcttccacaaaatcctattataataggaacacgcctgaaagttgtttcacacaacggttagatttatttcaactaattatttagtattattaaaagacatcttataatatatttttttaacaattcaataggtatatctttatcatccaagaaacagagttcatttatcatcaatcttacaactattccacaaataaacgagcttcgtcaatggtaaactaatttatacttattttttataaattactccttattacagctatccataaataattcttatatatctaataattttatcctataaattaataggagcattaacaatgaagaatacctatctgccattatcaatgagaagagactcttcccaagccaaactactctaagaactcttcaatataataatatcattaatattaatggcattcaaaatcttccacaagaggtatgtaaaatatgtttatttaacttttaattaactaattagtttgttttctcattgtttatagtgtttataattttttttggctttacataatattatatactttatttcaataactatattatgctttattagcaaactactttttggatcaatgcatcaatctccatcaa

SEQ ID NO: 145658 - DNA, 853 bp, Cannabis sativa
ctctctctctctctctccttcattctctcacacgcctaaccctaggctatacaacactctaggctgtccaacacttgagttctaccagatatcgattcatacattgtaatcctaagggcattatagtagatcctacctatagcgatttggatagtaattcccttggtatcaatataactaaaaaatgagtaggtcattacccgctatcacaagagggccgaacctctataacaaatcccattgtctattacattttactcttatttgtgcacacacgtggcaaacattagatttgcacatcctcgttgtcggttgatcaattttcaaggtcaacacaaagttttaatactaaaaaggttgtcgaacccacatggattgattattaaattttactaattattatactgtataattttatactttaattagataacacaaagtaaattataattaagaatcaaataataaaataaatggaaaaataaacagacaaaaaataatttttaatcagaaagtaaaaacctagagtattgatttccttatttcaaactataaatctcaatttctcgattatcccaatttatcctataatttgtagtttcaagaatcctaatgtaatctattgaactctctcgagtgatgatatatttaacttaaattaactaacaagatatctctattcaaagttaatcaaataagtactcataaagcaatatgattctctttaaataaaactcatagaattattagaatttctcaatctcatacttttcctatgtcatgcgattctaagtctaattttagattacctctctcaagtgtaaaacctaaaatctctatactaattaatggt

SEQ ID NO: 145659 - DNA, 575 bp, Cannabis sativa
agggcataaaacccaacacaaccccgaaggactcgacctgaatcaaccaacctcgagagaccaatctgcgaggtatcccaatcaggagacatagattgacgaagatcccgaacgacgtaaccctcgcagtataccttcacgagacaacgacatagaatccgcctcctcgtcctcgcatggtcgcacacctagcaggtacacgaggttcggttctgtggagacgcagcagggaggacgatatcaggttcataagggtgatctgcgtgatcaccttaacgatgttttcagagcacgctcccacgcccctcgtcaggaggaagagtcccatgatccccaaatgggcgatcagggtgtaaacactcgcaaaaatctgcctaacgcaccagctgcggctaccggggttgatgtcctagcaaacctcgctgaagtagccacagcccctccaaccgtagcagtccctgctcccttggtgggaggtattgatcaaagcatgctcttgcaggctttgaaaatgcttgagcagcggagaaagcccatatacaagctgcactggacctctcctttcactacgaaag

SEQ ID NO: 145660 - DNA, 500 bp, Cannabis sativa
tttgggactgggttcaagtctaggtgtgggttcgtgtccttgtcagggttcgggtccagcgctgggtcccaaatctacacaccgactacatgttttgtccaagccctacgtccagatcttgatcctaatcttgggtccctttctggttcaatttctggtgccgggtcatgagctgggtcctaggttcatgttcgggtctcggtcgggtactaggtcccggtcctagttctgttcccaggtccctgtcctgattctgggtccagctcccgattattgtgtgggtttgggccctgaacttggttcaggttggagtcctagtctcggttcgggtttaggtctctgtctgggttttgctcttggtttgggtttgggtttaggtccttggtcctggttcggttacagttccatttgcgattctgagttcgagtttgggtttgagttcgagtcaaagttcgagtccagttctgagttcgggttcgggtccagatttaagtctaggt

SEQ ID NO: 145661 - DNA, 620 bp, Cannabis sativa
ataaaacatatcgtttataacataatttacaattagtcactaaattcttaaacaaaaatcaaaagaacttaaaataaaactaatatttacgtggcaagccacgcaactctcatctagtgtataaagaaatatttagttttttttttttttttttttgaaaaaaaatgatatataagaatgaaatatacatttaatctataaaatttaaaatataattgtacatattatttttttttacattaaaatattaattgtatatttcattttttaattttttttttataaaaatgtgtggattagattggatcggttatttttacatgtcaatcctcatctaatccgcacaagtgcgatatccacactttataaattaaattagattgaatcatacagattaaattggtcgtttattttatgaatagccctaactctttcttttgttttaatttactaacagaattataaagacaaaaacaagtttaccaaagtcctacaatacatgacagatataatttaacttgtacttctcttttatttatttgatgacactactaattttttttttttttttgacaaagtgattaaaatcactcatgaatttacgacgcccacgttcgcca

SEQ ID NO: 145662 - DNA, 554 bp, Cannabis sativa
  modified_base (49)..(52): a, c, t, g, unknown or other
  modified_base (516)..(529): a, c, t, g, unknown or other
ggagtcatttaattctcctgcaactaatgtaaggtttctcatacctttnnnntgtttattttatatcattttagaagttcatgtttaggatgttaaaaacatacttagttagtaaatctagatcctggtaaaatatattccaacagaaggacgaggcgtgaagaggggagcattacctcggggtgcacgagaacccatagtcgatcaacgtgaggaaaagagagtactcgtcgcaataatgatcgagcaagaataggcacgagtaaaattgaaagttacttaaggacaaggtccatgagcacgacaaagtccatgagtaggacgaggtccgctagcaattataaccaaccggatctacgcaaccacttgaactagaaaaaacctaatctttgccaacaattcggtccaaagcaagaggatcctattgcgaatagatgagttggaggataagcaacctggatatgactcgaatgaggaacttcagccatttcatcctgttggaaatattttaccagnnnnnnnnnnnnnnaccaagtatgttttattaacatcct

SEQ ID NO: 145663 - DNA, 648 bp, Cannabis sativa
  modified_base (151)..(172): a, c, t, g, unknown or other
ctttataattttgagccttatagtaaaagagtacatgcccacccataggaagtcaagtactcaatcatagtgtgtaggactgtgaagaatccaacaccttaaggtgaatcgggctcagatcttgataatactctacgacagaaaggaacannnnnnnnnnnnnnnnnnnnnnggagacatattattccactgcaatgaatgtaaggtttcttaactttatatgtgtttaaattccattattttagataattcatatttagggtgttaatcaacatacatggtagtaaatctagatcttggtaaaataatacccaatagaggctccctaggtggtatctggtcattcgtgccagtcccaggagcatttggtggtggccttggaggcaaaattgagtagctggttttgaagcctgctcctagcacctagggtgcagaagtaaccccggttcttgctccatcaactggcatgcccccaatttattggctagctattggagtctatctatcaacacatgtagaacgtgatgcaactatcttgctagtatctttctcgattttgggctctcaatgaaagtacaaaaataatgactcaaaaatttggactagacttttaagccacactcgctcactaaattaacgagaatgatt

SEQ ID NO: 145664 - DNA, 520 bp, Cannabis sativa
ttataaataatcaatagaacttaactttttatcttttaattgtatgcttagtaggggtggcaatttgtgttcgttgaaacttaggtattagttaaaagcaaatgttaaatttaaattcgattaatttattaatcgtgtcaaaaactaaaactcaaacccaactaatttataaacgggctgacccgacctgacccaacccatttatataaaaaagaataattaacaatttaaccccataaatttttgacaagaattaataattagtatttttgctccctgaactttcggcactaccttatttagtctcgtaaaatatacgaattgttaaaaaaatttcttaaaatataacagttacataattatgacccttctattaggttctattatctttgccgttaagaattagtatttttatctcttaaactttgactaatataaaactttgcccttttataaaaaaaaataattttaaaaattataatattctatttttttaagcaattataatattctattaatt

SEQ ID NO: 145665 - DNA, 1495 bp, Cannabis sativa
tgggttttatttagggtacaaaacacaacaccttagtcaactcagctactttcttctcagtagtaaaaaacttcttgttgacctcaccttgctccatccgaacagctccgagctccaccctggcatcatcagcgtccttcctggccaagtccacctccgcccccatggtgttggacagagcaccgttcttggaggcggcagacttagctcgggagtaagtgtaagccaacttcagaccagcctacacagagaaaaaaatttagagtctgaactgtgtaaagaaggactaaagggaacggtcaagaaatacttacccttgtgaattccttaaagactcctaccatcagcagctctagagaagattcgttgtcagcgccagctagttgctccctcacttcaggaaccaactggttcatgtaatgggtgagcatctccttacctttcttggcctctagaagcaatggcaaaggtggagtaggaacccgcatctgctcgaatccactcttggccagctcggatccaccttttgatttcttaggcctgtccgagcttcctcctctagaatccttcgacttagcaacttttggagtagaggggttcgcaacagttagctcctcggaaaggtcaataacctccccggctggtgccttttccttggaaggggttgcctcaccgcccctggacttcttggccggaggagaggcgcttgagcttcctccaactctcttcttcagagcatccagcatcttcagagacatgtctgcatgcaataaaaacaacatggttagaggaaaaagacatcagaagcataaagcataatagtcaagcagtttaaaaacaacacgaagtagccttgaagacgatggcccgagcaagactcgaaagttaatcatcacttgataagtctcttatctcaaccgtaatagctttccctttccctagcacgggagaagatggccgagcaggtgaactaggctctctaatgcgaattgcatattcaacgggcctggattgggccagaagtttcttcctcctcttgagcagagtcacctgctcttcctcagccttatcttcaggattgaagggctcttgagcatactgcttggccctttcatctcccttcaacttagcctcacgcttcagttgaatcagctcattttccttatgagctccctcagcccgtccaacaccagatttcctcttcctaggaatgaaatcctttgaatagagctcgtacttcacaaagttgtcctcagaggtcaactgaatgatgttaccggtcatcccccagcagctgagcaagctcttgagctctatctctaagagcaagagtgaagggagggtggtgatatgtggggatctgctgcaatcgagtgtgggtagtgcccatgcgatccaccatgaagtactcatcaacaaaacacccaattttgctgatggccttatccccagtgcccgtcaaccacttgaagtctggttgagagaaatagaagta

SEQ ID NO: 145666 - DNA, 682 bp, Cannabis sativa
tccagagcatgccgcggcatttgggtgcagaacccaaaaaccagcaagttcatactcgaattttcaatccaaaactcaaccaaactcacacaaattcataactaaaacttctaaattataaaccagagttgctagcaattactaaggatttaaaacatagcatcaagcattaaaatccagcaacaaaccctcaagaattcagatagaaaaaacacctcaaaatcatgcacaatcatggctatactaagctcttgaacaagagcttcaactccaataattcaaaccataatgaaaatatcacaataacctatgattcaatactagaaaataccctatgatcaaaatccatactcaagaactcaaatcaaaagattaacatactcaaattatcaagattaaatattcatttcacaaagcatgcgtaatcaagctcaaacaacttaagcatgtttttaccaccataaaattcagaataacattaagcaattaagtaataaagctacctcaattcacaccaaggcaagaacaataatctttctccaaactctagctgcaaatcaagccaaaaaccaagttttccttccaaactcaaagttgaatgcaaagagggtttgagtgaaagagagagagagagaggggtcgggtgagataggggaacaaaaccagaattttactttgattt

SEQ ID NO: 145667 - DNA, 1070 bp, Cannabis sativa
taagtttaattgattcgtgtttttattccaggttcactatggcttaggtgaggggaggaatgagggtggtgtgttttcgtatgaaacgattacagtcgatcaatccattttggatggttgatagactcactcgggcatattcttccccacttagtgcaaagaatgagcaatgggatttggtgtcaattcctgagtctgcatcccctgctgtggatgatgaggttgaggttctagatgtaatgcctttgcaatccagtgttgctgtcaagagacaagaaaaacctggattgcattgtagatctcctttcgtcaacgagtttggttcttctgaaccaaaaattcagaataagaaggataaggaggcatctagtgaattagcttttgaccttaaggagttgtttccctttgtcaaagagattgggaagaaccccggccttgatgattgcgggggatatgttaagtggatcgaaggtgctcggttgatgaagaagaagtatgttttttattgttatgttattatttttgtttttaatagttgctgagatttattttttaactggtttttttttcattttggatttttttttctttgtgatttcaggaacaatgagaaaacagctggcgacattaatcctcccttttatttcagcatagctcagattgatgacaagtcttcgtttgtgattttacagacttgtggtgaagaattgactgatctggtacttaactagttattttttttgtctgtttttatttttattaatatctttgcttttttcaatttttaactggttattgtttttgtttattttgtgcagcatctgaatgtggccttttactatcttaggaagagcatcatttatgatgtcagtgttaataagagagtgacgacgacatgctcgtattttgatgcaactattaagggagtgtatgctgattttataaaggtgaaacatgatccgagtgtcatcaggtacgacaacatggtcaccgattacattctagggcaatataacttttgcttccagccttggatcggtgttgacgatgttgtcgatccgtgtcatgtc

SEQ ID NO: 145668 - DNA, 598 bp, Cannabis sativa
tgataaacccatttaaaaaaaaaatatatgcatattttataatgttaattgtaaaattcaattagttaaattcaaattttttttattttgttattttctttaaaaaaatataattttttaatgttatattttgaccaataaaatataaattttatttaattaagtttttgatttttttttaatacaaaaaaaaaaaaattaatccaactcataaccaaacacattactggattcagcataaccctatccaatctaatccaatctaatccaatacaatcctgcataccaaacggacccttactaaagtggatagtttttacaaactaagagtattagttaatcattattcaaaacataaggtaccaagtgtgcattttaacaaaacacaaggttacaaataagtatttatcctattttttgtgttaattttgtggttatagcatgactttttttttttttaggaaatttttatttacaactgttattttttgttttggaaacttatcatacaagaaaataaattctctttatgaagtctaaacttgtttaagtcaattatatttgtaattatttgagactttactaattgatttcattc

SEQ ID NO: 145669 - DNA, 598 bp, Cannabis sativa
  modified_base (489)..(491): a, c, t, g, unknown or other
ttaggggtcctgtcacacaaagtaattattcaagttaggtgtagtgtatcagagttacgagtttcgtaacgaaataactaaccgataccgaaatagggttctacatagtggtgtcgatgtacactcgcattagggacactatcactgttgacgtttaggtgtcccgtgacacaaagtatgtaatcaagttaggtgtagattattggagtcaccagtttcgtaacgaagtaactaaccgatatcgaaatagtgttctacttagtggtgtcgatgtacactcgcagtaatgacactatcactataggtgtttaggggtaccgtgacataaagactgtaagcaagttaggtgtagtgtaatagggtcacccactaaccgatacaaaactagggttctacttaggggtaccgatgtacaatcgttaggggaatagtctgtaatatatttaggtgtagtgtatcaaagtaccaatttcgtaacgaaatcactannngatactgaaatagggttctagttagtggcaccgagctcgcaatagtgacactatcattgtagatgtttaggggtcccgtgacaaaaagtatttaatcaagttaggtg

SEQ ID NO: 145670 - DNA, 545 bp, Cannabis sativa
  modified_base (46)..(47): a, c, t, g, unknown or other
caaggtctgctcgcctaccgctaggcccacgagtggaactcgtgannggggattgggcggctgaccatttctagtctgggaagtattcaacctccgaatgtctgtctcaccaaggggaatgacattcggaggttgctgacctacagtttggtaggctttccgtatcagcacggtagctttccaactacaattttcaatctctgcacggtgagccattaatgcctccatctctctatccctccattcggtaaacatacgcttttattcgtcgaacgcgagattcatcgtagtgtggagttcgtcctgatcatgatgtagggtgttgttgtgaccctacatgagcccgagagcttcgtcgagattttgtaactcagtagcatctccgatagtcgtctgggcattggttccaggcggaacagttgtgttgtgaatgcagtggttggtgcggaactattattccaagtctcttgcacaccaggcacgacttcatctataggagttgttacaccattgcccacgttttccggctgtccaggattaacagc

SEQ ID NO: 145671 - DNA, 567 bp, Cannabis sativa
  modified_base (502)..(520): a, c, t, g, unknown or other
tggttttacatcaaactttgtttgcaatccctgtggagatgatcttacttatcactttattacttgtttgactgtgtatatttgcgtatatatttttcacaacatagtgctgaacattaatgatatattaaaatttaatggtgagtacttgatttgtttattaaaatatgacaattgaaaaacaagtaatatttattacagtagtcattttatataaatttctattgtcttataatattatttgtatttgaaaaatagtcttgtaattaaatttgagtgtattcatataatatgtttatctaattatgttattacacagtaattatgtaatcgcacttataaaaattaagtgtagttactaaaaatattttatttaaaatattagttgttaacatctaaacacactttatattttaaaatatagtgtaaaattattatcttactaattatagtaattatataatattttaatgggtgattattcaatggttacatttttatnnnnnnnnnnnnnnnnnnntttttttacatgtaatagcaggttaccaataagtaaaaatttcattt

SEQ ID NO: 145672 - DNA, 638 bp, Cannabis sativa
gaagaaaaaaaaaagaggaattatcaggacactacacgtgtccttagtagtaagtctgttaggtggtaccaacggcagagtttaagaagtgagattttgagtattaatgctacaattttttaaaattgggtacttattagcaacaaaatgaacaaaataagtatttatgccgtaaatttccctataaattaattaaaattaattttgtagcatagtataatggaaaagagtagtggcccaattgatataaagaagaatagcgactcttctaatggaaaatactgatatggtgttgactgtgtagtaagaaaaaatagaattacctacgagttgttttatggttatccattatggaaggtaacttcttgtcgaattttgagaattcaagcacatatattatatgataaaatttattgattatttgctatgtgcagaataaaattgaccaatgctacaaattttgaagacttgtcgaagatgaaagatcgatgacttttatattatttgatatcacagaagtagatcaactattggtggcaataaatttaattatgcagttgttgttaacgatgaacattacttttgataaaatagccaatttattgttgaagataaacattataattgcttaaatgtta

SEQ ID NO: 145673 - DNA, 778 bp, Cannabis sativa
cctagcaaagaaggaaagaaaaaatggaagtgcaaaagtcacttcgaacaaccaaaaaaaagcgcacgggaaatcaccatttttaactttcccagaaaaggaaaaacagtagttcatacacaacaaaagtagtaaatgacataaaatgaatgaaaacaaagagcataagtcatcggacgcccaactttgggggcgtcatattaacagtggccataaccgtcgtttcaaggaatccaaacacatcagacaaaaatacattgtcatctatacttgccctaacaactgaaagaaatgtctgaatagaaacttacacaaaggcggcaagacaaaagttgataacacctggtggtaatatttcgtctggtaacgatagaggaaaagtagaagaaaattaggggcgtctagaattttatcgaatggttttggtagactagaagctgttgggtggtgaaaattacctagttgggaaaagtgttggcttttatagaccatttgtacggtgaggattcacaacgattcgaattttatgatccgacgaatgggatgaacgggtgtaaagaggagaaagggcggttaaaacatttgagtacctttctgacactggtattgatggaagggtctgtcaacaggaggggagtgaattgttgcctgcaaaagaaataaaatcaatgatgatgatcataaatactacccacgcgcctggggcacgtgccatttcatttattgaaactggagatggctcacaagtcttatttacctgcaactaaataagacttgg

SEQ ID NO: 145674 - DNA, 526 bp, Cannabis sativa
tttctcaacaaccacaccaacctcaaggctctcaaactagttctttggagagcttaatgagagattatatggccaagaatgacgctgtaattcaaagccagccagcatctctttggaatcttgaaattcaattgggacaattaggtaatgatttgaagaataaaccacaaggcactttgcctagtgacactgaaaacccaagaagagatggcaaagaacattgcaaaacagtaaccttaagaagtggaaaaattcttgagtcaaatgtggttgaaataggcagtaaggagccctcttcaatccaaaagagggggaaatgaagaaaaaaccagcaatttcagttgttgaaattcccccagatgttacaacattaggccagcattctgctgcagaaaaatctttgcaaaagccacctccaccattttatcaacaatttaagaagcaacaagacgatggtcaattctggagagttcttgatgttttaaagcagctccacatcaatatatcattagtggaagctttggag

SEQ ID NO: 145675 - DNA, 665 bp, Cannabis sativa
ttttaaaattctaggttaatatgaagtataataaatttatattaaaaaaaataatattttaataaggttctagatttttttttaaaaaaaactaatcttgacaaataaaaaagaaactatttccattcaaaaacaaccccaaaaaaaagaaactattaaaaaaataaagtcttgtagttaatggaattgctccgttagttttagtgagtaaagtttacaaaaataaattaaatgatgtgtcattatcattaaatgatgtgtcatcatcatattggttagacataatatgggacacatatttggacaggggatcttgattccgccaatacgcatggacatgcacttactaataccatctttaatgaatggtgtatattttagattaaatttagctgaaaatataccaaaatgctatatttggcccatttttaaatttgtgcttcaatacacaaagtacaaattagctataaaaatcaatattacaattaatgctcattcaaaatatataaaattattaattatatttatattattctaatatcttatgaatatattttattccaaatcaataaatatattaataaatggcaaagaggtaattaaaaaatgtagtatttattgtggactaaaatttagcccacgctatcttttgtgccaaatttgac

SEQ ID NO: 145676 - DNA, 692 bp, Cannabis sativa
  modified_base (73)..(75): a, c, t, g, unknown or other
  modified_base (495)..(498): a, c, t, g, unknown or other
ttgcaaagtggaggttacgagagaatgccatgtcaacttcgagatgtgtacaacagggttgctggtgccaagnnngaagaaaagatagagacggactcaaaagaggcgttgggatttcttcattgtctcgcagagaatgatccaaatttcttcgttgtctatcaggttgactaggagaatcgattggctaacttattttgggaagatggaaactcacgtgtggactgtgtggcttttagggatgtactagggtttgatacaacctacatgacaaatgagtacactaagcctctcactgttctcattggcatcaaccactatttcaacacatgcaccttcgggtttcctctcctcctccacgagaagcttccatcctattgttggcttcttcaaatatttctcaaatgcttgccatgaaacatgccatcatggaacacatgccagatgttacatagcatctatgcgcttggcatctcaatacaaatgcttccaaannnnttaaagatccgatcttcttaaaaacatttaaagatctgatgtacaactactatgtgtataaagaatttgaagcaagatggttagacgtcattaaaaggaaacaattaacagataatgaatggtgtcaaacaacattcgatacaagaaaatagtgggcataaacttatttaaggggttcattcgttgcaggaatg

SEQ ID NO: 145677 - DNA, 620 bp, Cannabis sativa
  modified_base (140)..(146): a, c, t, g, unknown or other
  modified_base (592)..(595): a, c, t, g, unknown or other
tttattgtaggtatatatgttttgttgtatggcatatagtttttgttgtctatagtatatcattgatttaagataatattaaatttttattttattatatataaattttttagtgtgtatacatattttaatagtggtannnnnnnttttgttagcatgatatatatattcttggagaattaccccatataatattccttaattttttctttcaaatttacggttggggttactcgagtggtttctctggtgatttctatgtgggttgttatacggattttgattaaaatttaggttgctctagttgctatagaggtttatgtgtggaattctgtaaaaatatgtaaaaaaaatatatacattttaaagtgtaaaaatgaaaaaactattgagaatattttatcaggatctagatttactaataagtatgttgattaacatcttcaatatgaattctctaaaacaatgaaataaacacataagggtttaacaaaactttacattaaatacaacgaaatataatgagttcttccgttcaagatctctagctcttgattcctttctgtaacatagcattatcaagatctgaacnnnnatctctttctctccttcgggtttgg

SEQ ID NO: 145678 - DNA, 1127 bp, Cannabis sativa
ttagacaacaaaatatattaattgaacattagttgtaaagtaaagtaaaattataaaatactttacttacgtcatctgtaagccattcctgtagtgttaacagcttccaaagaatgatggaccgtaatcaccacttttcaaatcccaaagtcggtggttcggaatgagtccacaacaccacttttggaaagtatccaacaattgctcatccggtggcgccaggggatcaaacaacgaagaaggcctctatttcttcgtcatctccgtgtagtcacggaaccatacagggggatttatcttcctcttctgactcttaacccctgcaggttgtgcctctatcgccaaaatttcaccctaggactcgctgtcatgtacatggataacacctacaccgatgggagtagctggagctccctcataaggatcatacccatcaagaaagacctcctcctcttgtagtgggggtggtgcagctggtagtggggtagatggatctgttgggacctccggtgctaaagttgtcgttggtgaacgattcaacatggccaatatatttctgagttgctccataattacgttctgaccacccttcagctctacatggctggtctcatatgccttctttagctcggcttgacaaacgtacatacccttctggtcagccctgatcctatccaacctccccactaaatcactatactcggcaccacgaacgcctaatgaagatggtgcactgggctgagggtttgaaccagtggcctgaaaaaatatataccaaaaaaaaatacggtaagcatacaaatatgacagaacaaaaacaataaaacaatcaagtatacaatcataaaaaaaaaatttccaaaaattggtacctgagtatctgcctcagcgtctatgtcatccacaccatcatcaaccaggtttttcacaccatcgtaagagatggtcctcacaaaagcctcctcttctgtctatggaagtagccccttcaccacttcaagattctatttatggttgaaaaaatatcacagtaaaaccatttagcatttattacaaacatttatgttaaataattactctgaacataagtgaaattcatacctgtctagaaaataatgcactgactt

SEQ ID NO: 145679 - DNA, 938 bp, Cannabis sativa
taagtaaattagcttttagtccctcaataagcataacatttttcaaccttggtaacccttcaaaattgagagttcccacaccaatgacatttcctgttagaccattgtcaaacgtaacctcaccaaattgcattggtttgatattcactataaaatccttgtcatccgtcatatatctagaacaaccactgtcaaaatatcacatttgagaagcagcacttttatcagaaaaactagctagacatttttcttttttaatccaatttcatttcaaagcactgtgtttcttttgaaaaattttcaaattaccaaaataatttgttttgtacaaattttgcatggtgaaatatttaggtcgaatatgccccttaatatcacaaaaataacagatttgaacaaactttcttacctgagattttatcctttttgaacttactggagactttgcttctgcagacgacatttttgctgcaacagatcttaaatttgcagcagaagttaaattcgttggaacactagatttgacaaattttgtttttccagaactttcagtaccatttgatccaagaccagtaaagcctctttgacctgcattttgaacttcctcaaaaatagaagatccagggttaagcatttgaatatttttcttgaaattttcaagttccttctttaatagaataattttctcatctttaaaacaaaaatcagtctcatattcttttatttttaattcaagagatttagtttgatgagacaattgtttatttatttttgacaatgatctattttcagaagtaacctgtatccacttttcatacataaccttggaagactcagcagtgactcctcacagattttagattcatcagaattagaattttctttttcagtggtattattcaaacataccaatctttctttcacctgtgaatcacaaa

SEQ ID NO: 145680 - DNA, 589 bp, Cannabis sativa
gtaatagatctacacatatccgtgtttttatgtaccctttttgtcaatgaaacacgaaatacagcaagtgtgcgtttttactagttttttgcgattttagcaattttttacgacatggtttgcgacatgtagggattaagtgctgccatgaggttagggatgagttttattgatatgtatcaatgtgttgcgacgtacgtcgcgacacatagaattcttgtgttatgttgtggatatttttcatttttctcgataattttatgacgtttgtcgatatgtgttgttttcgacaattttcacgatgagttgcgattagtttcatgatagtttgcgacatttttgttttccataatttgtggtcatttttttttgcagattcaaatgtgtttgtagttgtactgtatgatggggcttgggcagttgaaggtttcaactggatattcaataatccaaaaagtaagatgttaatgtttgtagttgacactactttacaaaagatgaatgaaattttgtatgaagagttggatatagaccctcatgtgtatgaactgaaaatagaggtgtgttatatgtacatgaaaggcaatat

SEQ ID NO: 145681 - DNA, 709 bp, Cannabis sativa
  modified_base (634)..(637): a, c, t, g, unknown or other
tagaatcgtgggcagaaagtacaatttttcttttatagaaaaagaaagtttagctccagttttctattcaagaaatctgatctaacaaaatgggaaactcacaaaagatcagaatatacttgctggttagataagaataaattgtgtaatcaaacttaccatttttacctcaattttcttaaataggaaagcaagacaactttcctttcaagtttagatacacaaaatatggacaccaaattaaaacactccagctgaaatatacaataaataacaaactatttttgtcaattaaatatgccaaaattagaattaagaaaccatttaatattagagttaaagaaaacacgattaagaaagtaaaatatgaagaacgcactcaattttttatgtagttggagcattaacgagaattagtccatgagtccgtattattatgtattttgctaggaaagtcctagggaatacaatgaatatgatcactctataattgcctgagtaattaagccatttctctctaatgggataagttttggtttaacttgtgcagcctagtccgtggggccaatgtatatatgctgatgtggcagattaatcatggtcatagtgttaggttttataccctaaataaaannnnatttcaatgtaatcttttttattcaacatcaataaacaaacagaagtatttttttcatttgtgtatgttttg

SEQ ID NO: 145682 - DNA, 701 bp, Cannabis sativa
actgtatgcatatgtgcccatgagcgaagtcacatacagggccagccctgagctaagacgaaggagacggccgccttaggccccccaccgttcaaggccccatttcagaaaaaaaaaaattaaaatatagttagtaataaaataaattaatattaattttaatgctaaatatgtgttgtagcacagtagtaatttgattatagtttaacaattaaggtagtgtttggtttacatgaatgagtgtaggaatggaattgctattcctaaagaaagattattcaagtgcttggtttgtttattgtcatgagaaaactcattccataggaattgtaattcatgtaaactaaggaattacttttcgtaaataaaatgacttgaaaagccatttcataccaactaaaaattattttttcttatctacccttctcataaataaatgattaaagttataattatatatgggtaatattttttattttgaaatatatatctacaacatttaatattacaacaatatgtttattatatttttttttttgtacataattataggaaatcaatattattataattatatggataaataatgtgtgatgatttaattatatgaataacgtttatgttgatgcttaaatattaaatattaaatggactattaaattagatatttatttatattttattatttgataattagatct

SEQ ID NO: 145683 - DNA, 2313 bp, Cannabis sativa
gacctggacctagaaccgttaccaaacttggacctagacccagaaccataaccggaccaggacccagactccaacccagacctagacctgaaccggggaccagatttggatctcaacccagatctggactcggtgccgaccctggacccgaactcagaaccaaacataaaactagactcgggacacaaaaatggggctgggacttagaaccgcacccagtctcgatcccgaacccaaactcagacctgggaccggggacctgaacaagaaccagaccgggacacgtgacagggatccagatttgggactcagaccaggacccgaacctggatcaagacccaaatctggaccctaacctagactcgggacccaaaacgggaacctaaacaagaacttccagactaggaccctcgaacaagactaggatagtgactaagacccggactcaaacccaaaccgaactcgaacctagccccaaaaccaaactgagaccaaaactcgggcacagacactgttgtgtacccagaccagcaccgagagctggacccagacctagacttgggacttgatcctagacccagacttaaagctagatagacatttggatacgaacgtagactcgaacccagacccagacctagatcgggatcgaaacttgggacctagatccagaccgagaccctgacccagacctagaccttgaccaacaccgaggactcgaactaagacccagaccgggattcgggcctggacccagacccgaacccagactcaaaccaagactcagaccctgacccagacctagacccaaacctgaacccaaacactgaatcgaaatcaaaattgggactataacccaaacccaaacatggacatagactgagacctaggacccggacctggacctacgcctcggaacccatacccaaatcaaaactcgagactcaaaccccaacctagaccaagactcgaacccaaatcaggacccagaccgagatcggaacctgaacccagactcgaaccaggagttgaaccctgactgactcttagactcggaccgggaccttggacctggacccagatgagggacctggactcgggaaacgggcatcagaactgggaccgagactcaagacctaatcctggacccggaccctgacctttgactaggactgggacctaggacccgaagtggaactagacttggacccggagcttagaccagactcatagtcagtgttttgatctgggacccatacccggactcaaacccagacccagactcagacctagaaccaaacccaaacccagacccgtaacacagacctaggtcaaagtccgagtctaggtttgagtccgggaactagaatttgaataggacccagacccaaacccggaccgggacatggactcgaataaaaactcagatcgggactcgggataaaaacccaaacccagacacggacttggacccagacccgaacccaggacccagaccgtgattggagattcagacccggacccagtaccaagacctagattaggggtccaaactctaaattacaaccaaaatcaagacccaggactgggatccaagattagaccccggtcctggtcctagacccggacaaagatacaaacatgggcacggacccaagattcggatcttgacccacgatgcaacgcttcaaccaaactcgtagtcggtgtttagatcttggaatcgtactaacactcgaacttggaaccatttccaagacccagacccgaacctgaacccagacttgcactaggacctacgacctaggacgcgtgacttaggaccttgaccagaacctagactcgtaccagaacccagacccagacctagacccagacctagaacaagactaagacccagacccaaacacaaattgaaacctagacaaagacccaaacccaaacccagacctgaacccgaaatcgtaacataactcagactcgaacccaagacacggacctagatcgagatcaagacagggacccagacccagactagcaccgagacctgaacctaaattgggacaagtactcggaatgggacccgagcctaggatcgggactaggacctgagaaccaaaccgtgacctataccccaacaaggtcaagactcgagataaggactagtacggaacatggaccgggacctgcactcagaatgggaacctaacccagaccgggacctaggaccttgacctgaatcaaggacatggaccaatgactgaggacccaataccccaacctagaccaaaaccttgacttgagacccaaacc

SEQ ID NO: 145684 - DNA, 1249 bp, Cannabis sativa
gtttctcgttaatgtacgagacaatagtttgtatattcttatctcgcttaagactttacagtcagcaagttataattataattatatttgttgattcgtatcccaagttaacatgtgtccttctatgaagtattagccgattttcgggtataacaattgcccattcaaaagttctttttaataaaaagtacttttttacattattacagagggtatatttgtcataataccttttgaaaaaacactcgtcctctgattttggcggttttgtcatttcgaggtacattagtatttaataaccatcttttccacttcttttccaaattctacctgtaggatctattatctccctgatctaacggagattaacccaagagtataaaataaaaaagggaccatatttccattacctctgccattttagaaactttgagaatttattaagcttttccgtcgaaaaatcattaccagatttgctcaaaaatttgcatgtcatctctatcattaacattttttctacgagtttcatccgatttaatttttgacttgaagcattcggagggatcttcacgccgttcgttgattcacaaattgcagagccgttcatcatcccaaaaatcaacttcaaacaataagtgactcttctccttattttcttacaagtttgttatgttgtatttctgggtgtaattaccaatttattggtttgcattgttgtcatctcattttgttttagcaattttagggctgaactgtatctgggtaaatgttagggtttagacagtaagtaggttttctagattcttcaatttaccaacttctggtttgataaatttcttccagtaattgggattgctttcttcttgcagcaatgtcccaatctagttcagaagtattttagaaattaagcatcctactgaatttgccatcccttacaaatccaagatttcaaaacccaaatccaaattagaggtaaatgatgccagaattagggatcacttagtgaaaattcaccaagaagacattgctagttgccacggacgcttcttgcaagagattactgaaggcaaatgtcgtttcttgcgtgaagctgcttggcctgaacctccctgtgtgtcttctattcctttagcagagcctctatttttacccaaggtcacaattgcttttgaactaggtgacttagattttgaaataatgtctcctaagccacgtaaatcaaaggctccccaagaccccaatgtcactt

SEQ ID NO: 145685 - DNA, 732 bp, Cannabis sativa
tcattcatctcttgttttctctctctgtatctaacactctcacacaaaacacatatttataaagttacaaaatttaggcatcaagataatttggggaccaagacaatccaaatctttcctaaagactcatcaaaacttggtcaccaagactttcctttttcccacaattaataattacccaaatataaattgcaactttacatatatagaataaagaaataaacaatttgagtcaaactccaacaatctccaccttgactcaaattctctaaactcacaactcaaaccaattcatactcttattgaacttcacttgaacacttgtcttcacattcttcaatctttcattgatgttttctttcttcaaacaatttttaactgaaattggagtcttctccaccttgtcacattccttcacactaactgaatgcattttgtgacttgactcaaccttcacaactccacctaaaatagtcttcccgactaatttatacaaatttcactctttcttacccttcacaactaccaagtcacgtttcttgataattatttcgccatcttttgtggaatagacacaacctcgagtatccaaagctcccaaagagattaagctcctccttaatgttggaacatgtctcatatcagtcagttttctcacaacaccatcaaacatcttcaccttaacagttcttattctaacaactttaaagctagaatcattatccatcaaaa

SEQ ID NO: 145686 - DNA, 534 bp, Cannabis sativa
  modified_base (477)..(477): a, c, t, g, unknown or other
  modified_base (506)..(507): a, c, t, g, unknown or other
aatcattaatgaaaaatttacttgatttaagttggtctaaaattaattaaaataattaactttcaactttaatctatttttcaaaaggaaaatttaaaaatatcagcatttaaataatgcatttcgaaatcatgtaaaaaaggattaataaaataaaataaaatatacattaaaaattattctaatttaagttgttctaaaattaaaaattccaaattaaatataatattctgtccaattaaatttcttgaaaataactaatatttaggtgtctagaatgaaatcaacttaaatatttaattttctaattaattaaatgtattaaataaaagaaataaataattaagtatcttgaataaaatcaacttaattgttaattctaatataatatctaagaaaaatattctagtttaagttgttctaaagttaatttttcaacttaaatatatttttctatttaattaaatattagaaaanataattagttactagaaataactatctannatatatctcattaaactaagtgttatt

SEQ ID NO: 145687 - DNA, 538 bp, Cannabis sativa
gcttataaatatcaacttttattataaatatatgatgtaactaactaaaatgcatatatattttttttgattttttttaataattagcagttttaccccctgaactttcgaccatactgattttggctcctaagatatacgacttgttaagaatctcccctgaacctttacatttgaagaaatttagtcattctattaggttatgtcccattattctgtttaaatgatgacgtatctttgtcaattagtaactttaccccctaaactttgaccactatcaaatcgtaccccctcaaaataaaaataagaaagatgttagtttctttatcactcataaaatatgtaataataatattcaattttataaataaacatattacatataattataagtgtataaccatagatctaaagaatacctttgttgattcaaagagaagaagccaattagcggaagcgtaccttaattcatcaatagtgataatcttaatccatcttgtagagataatctttgtggtgattttcggtaatgatcttc

SEQ ID NO: 145688 - DNA, 866 bp, Cannabis sativa
tagcagcgacttcatagataaacttgattgcatagtaaggaatccaaactattttgttccaccagtgcatcaccacgttagagtggatgtacttagtaaaatatctttcccagggttcttctagcagaagactaatttatgtcgagaggatattgccctttttgcaataagaaaaattaattatgctaagataaattgttcgtatccttctggcatattatctggtaggttgtatttgtaattatctctgttgtaatttgatgtgtgatatatttttcttactccttgcagaacaacctgccacttttcaaatgagtcttcttaacaacttcttagatgctaacaggggagttcttctggccagtttcctttggcatcttcgagtttcttctttagtatatccttcaaggttttgttgactgcttcaacttgaccatttgtttgaggatgtgccactgcagagaaacttttgatgatactatggttcgcacagaaatcggtgaaagattggctgtcaaactgtttgccgttgtctgagactattttgtacggtagtccgaaccggcatataatgttcttcactataaattattgaactttctttgatgtaatggttgcaagtggttcggcttcagtccacttattaaactagtcgactgctaccactgcatactgcaccccgcctttacccttaggtaactgcccgattaggtcaattccccaaatggcaaaagggccacggactttgcatctgtcttagctcgttgggcggagcacttggtatctttgaaaatctctggcgcttgttgcacttcttaacataggctctcgaatcttcaatcatcgttggccagaagtagccttgc

SEQ ID NO: 145689 - DNA, 534 bp, Cannabis sativa
agaatcttcttcaaggcctccacctcaggcatgcccccggctgtactcgtcaagggcgtagttatgcttggccacgcggagattttgcctatcctcatccgcagtgaccggggtcaacactatgccgtgcgacacagtgtattcctctgcctcggaaggaattccagagtcgtggctcggcgctggggccggagtgtctaccctgcgggttcgcttagaaggttccgccaccaccatcttgccctttcgcttgcgctcaagggcagccgggtcctccgcttcaccttcctcaacttccttctcctcgtccaccaagacgatggtgtctgaaggagcattggaggaggacctcccgggagtagttaactgggaggcagctggaggtagagaagcatccggactgtaggcctcagcaagagttgccaggagattgtccatgggccttgctgctgcaacaaagaaataagtgttaggaaattaatgaaaacaaactacacttagcaaaaaagtaataaaactagtcctaccctgact

SEQ ID NO: 145690 - DNA, 633 bp, Cannabis sativa
caataaaaggctttgcaaacatcatatatgcgagatatgttatctttgccagaatacaaaaactcgaagtaatccattagttctttaaccaattcaaaatgattaatcaaactaattacgtcattatcgatagaattttgaatttgaaggaacaagcgagcatcctcacggagccatattttccttgaatcgtcttactccataccaaataatttgaaccaattaacttatggtccgtgattttagacatcacgagaaccacatcagaaacaatgattgattttgaatttgattttatctctgccataatctcaaaagcaaaaacaattgatagagaaagggaacaaaaagaataccaaagaatgaacacacaaacacgaagaaggcaaaaaaaaatattgaattacaaccttaaacagatgcaagcaggcttagaaaaatagaacaaagaaccagcaaaagaacgtcgtcaaagatgccgtcacacgcgccgacgcgtgggaaaatgaacagaaactttaagcgacgcgtgagccccatgcgcgtggaatttagcgaccggactttggggttttgtagatcggcggctgggcaaccctcctgagtgggcggtgagaatagattcgcactcca

SEQ ID NO: 145691 - DNA, 501 bp, Cannabis sativa
tgtataaaattctaaagtgggagtactctacaccagtagaaatcgagtatctctacttggttaaggctgttccagcaaggaagaatgtggcaaggggattctattatctcggtgctcactctagcaagcctaaaattattgtggacctactaaacaaagtgtctttcaaagacgacttcttttggcaactggcctttccccaatcggcacaaccacctttcgtagaattcgtaagtgattgctttcttcatgttctattggattaatccttgtcttttcattttgaaatttctagctaatgtttcggttttttttcacaaccctctcgaaaagacctgtccctactcccgagatggtcagtcaacacagacgcttgctgactcttccccacggccttaggtcgtgcgacttccttctaaacgaggccaatctaagaacggtgggccttcttactgacaaggagtatacttgcgattacaagttgttggaaatattttacca

SEQ ID NO: 145692 - DNA, 507 bp, Cannabis sativa
taagtaattgttgttgttcctattttcagaagtaattttgaggttatttatgctagattaagttgagttagaggttggttatgaagtttgatcaaggtttgagcttaagagctcaaactttgctctttaatggtgtttttagtttttaagtgtattgcttgatgttattttggttgaattatgcttattttgtggcctaattaggtggtctggaggtgttggttctttttgggattgatttgagttgattaggagggtttttgtggttcctacactgaactagtcgatcgattgagtttggacctgtaagaaccgatctatcagttcctcccttggcagtccccacagattcagttttccctatgggaaccggtctaccagttggggcaccctagattttccccttttgtgatatttagaatatttccaagttatccctcgatagggaaacttttagttttgattttaagtccccaaaaagtaatttagtgtatcactcatcagttt

SEQ ID NO: 145693 - DNA, 900 bp, Cannabis sativa
ctaaacgggacaacactggattctagtcttgatcgaataaaaggttgttataatggtatctattttaaatgggttgactactatattcaatgatattatctttgatttgactctcgcctaaacaggacactgtatcagtttgttaggaaccttagatattatttaagatgtgtttgttatgtatctttacatgtctttcttacttgcaatttgtatgataatttcttaatgtgtatgaatttatattgaaccgtgttattttctgttattaatgttgtagtataatttcgaattttcattgttggtctagcatagcttgttgtatttaatgtgacaaatcccaaaggatggtcatccgttagacaaacacaatagtgctagatcacgacagataagtatttgtaaatgtaacatctagttgtacatctaaagattataatttagactagtgtttacaatatgaatcattgaagaaatttataaaataatgataactttgactcttgcgtaaacgggacatcattgaatttttattttattcgaaattatcctttattagttttcctattggcttttcatttcaaatttgcttaaacagtatatcattagataaatggtttataaattatctgcttatgatgtcattctattttcttctatgaaatttaatggcgcagatgactatattcccgacattctatcctgaaatgatataaatcctcgatcttatagaatctcctacttgtatatgcttaccattggcaacttaaccatatagttaggttagtagtggtggtccaagctagaataataactcaaaaaaaaatttggtatacatttaagtctttgactttaaattttagattcctaatataaattttaaatttcagttccaagaat

SEQ ID NO: 145694 - DNA, 1034 bp, Cannabis sativa
gtaactacggaaaaactgttttcaataccagttttattattctgcatttaattaatcaattaattaaataattaaactgggaatattaaaatacgaaatttcaagaaacatgctcaatcgattcatgtacgtttatggacatttcaaaaactggttccaggtgttcgtaaaataactataaaacaacataaaaacaactattaaataattgtttccagaaaactcaaaatttagtttttgtaactcctcttcgaattaaatcttcctttaatgtcccaatactcatttaaatgatataattgagtattgtaacagtttctaacaacaagaaacttatcccattgactccataactttcatatctaataactcacttaattacatgtgatccttaagttacaatttatattcagatttgtaaatcctcatatgttacaacttttatgtgtattattatactatataggatataatccaacctccaacacataatatatattaatctcatattaatatataatttgtcagatttaaatgttttaatctatattatattagaacaaataatataatattcctccactagattaaaatttgtgacacaccattgtaatattatttaatcaatcaaatattacatatatcccccactttgattgaaaaaattaaatacttttatagagatcttgcctagatgcataaagtaaaatgtctttcgacatgaattttatcttagtgtagttaccacaaagtttgttgaaattttggctgccgcagcattgaaccactttcctttaatacaaactggtgatagcacacacatctttgctagagttcacttgagacctcattatatctcgcttgtgcgcctttaatggccatgtgcaacatctatttcatggactctctagagaataactcccaattctcataagaggcagtgtcacctctagtccatataggtggaaattagtgtctcacaacttctctttagacacatcattccattaaaaaacctttcggttttaaccctc

SEQ ID NO: 145695 - DNA, 711 bp, Cannabis sativa
  modified_base (318)..(320): a, c, t, g, unknown or other
tttctttctaacttctatagtaaaccaaaaagacatagaaagatcacaaaatcaccaaggaataacaaaacaagatcaaatcttaaaagaatcgaaccgatctgaagcagcgaggaaaaaaaaggggaattagaaagaaggaatgtgaagtaaaggaattgagatctggggtacctgataagtgttgtcaaatttatcgtacatgaagcgggtgatgatgctggtcttgccgactgactggtcccccaggaagacgagcttgtacttggcgagagctgagactggagccattgattgtaataataataataataatannnataataataataataataatggatcaagacttgaatatggggaaagagagagagagagagagagaagagagaaaggtttgttgttcttcttcttcttcttcttcttctctttggatgatcagttgttttgtgtgtgactgtttaccgcgtgcaaggttcgaaccatgtaaaaaagctccggttgtcttctctaataataataattattatttttaatacgtatatatattaaataattaaagatatgtagttttaaggctaattagttatttttctttgacatgtactgaatcgtgcttttaaatttttttggccgttaaaaattatccctgaactattgagattgttaaacttaaggacttttgtcgaatttcattcaattttactattt

SEQ ID NO: 145696 - DNA, 525 bp, Cannabis sativa
tctagtgataactcgccttctagtgactttggtaaatcgattaggtgaaaattttcacttttaccctttttcatcagcctttttaacaattgtaatgctttgccttattttgcagacatgggttatgaagatatcatggaccggaaaggcaagaagagcgtaaccaaccctggggtccctacagatgctgaagtggttcctcccaagaggcaaaggaaaaccaccacccataagaagaagtcactggtcgacccatcgatcttgaggtctttcacaacgagatccaagaacaagttcctcctctaatcgtttctgatgccaatgctcctcgtcttgaggcaacccacgctactgcttcttcgagcaaggccattgagaccttgtcggccgcagcaatagaggctaggtctgaacttgcccaagcgtatggagttgcttgctagcacaaacttcaaactattcttccccctgattgggattttcttaatcttgggagtccaaaagagatgctttcaaggagcttgg

SEQ ID NO: 145697 - DNA, 746 bp, Cannabis sativa
ggcgtctccttggggcatttatccgatctgtgagacaggtatccggatgtgggactgggtcaaattcatatgggatctgaaacacaaggagattgttgtggaggaggtgtacttgtatgcgtcaattgtggtcgacactatttggcgcattcataatgataaggtccataataaccttaccttgaacttgatgcaaggtattgactctattcgattttcttatgcagatttacatgtgctactattttccctagtcccatccctaacctgaaggagaactggtctcctcctcctcaggattggattaaactgaattgtgatattagagtggggcttgatagcatgtgtttagcagctgttaccagaaaccatttaggtgaggtggtgcgtgttctaacgtctagaatggactttgctgatgcgttttgtgggcaagcggcggcttgctgtttggctatatctgcagcgctggaagtgaaggcccaatttgttattgtggagagtgattcgagggtggttatcaatgcactcaatgggaaggagtccagttgggtcattgaaaactatgtatctttttgtaatggtcattctttcttattctcttgttgtattttctctaatattaagaggacttgtaattatgtagcccatatcgtggctaagtgggcgtttacccacaagatatttggtgatatcccgttatccaccatcctttcaaacattttatgtaatgaccgagaggtcta

SEQ ID NO: 145698 - DNA, 639 bp, Cannabis sativa
tctgactgaagcgtcagattatataatccctcaattacaaattcaatatttgccctaaacatctccgaagctaactgaggagaaatcatcaccatattggaaatctgatctggtccttttcaacttaaggcatctgccacaacatttgcctttccaggatgatacaagatttcacagtcataatccttcaccagctctaaccacctcctttgtctcatattcagatccttctgagtgaaaaagtacttgagacttttgtggtcagtataaatctaacaccgttcaccatatacgtagtgtcgccaaattttcagggcaaacaccactgctgcaagttccagatcgtgagttaggtaacgctgctcataatctttcagttgtcgagaagcgtaagctatgactttatctgcttgcattagcacacatcccaaaccttgccttgatgcatcacaatacaccacaaacttctcttgatccgatggcaaggccaaaacaagagctgtaatcagtcgttgtttcagttcttggaaacttttctcacacttatctgaccatgtgaatcgttgatttttcctagttaactcagataacgacattgcaatcttgaaaaaaccttccacaaaacgccgataataaccc

SEQ ID NO: 145699 - DNA, 588 bp, Cannabis sativa
tataatagtactataaaatctcacttgaaaatcagtaaattaaacatatgcattgaagtaatgtacaatcaagatctcacaatagttcaaaactaattacaactgcaataaaactatatatgatagtaaattaggtaatttaaaactaggaataacataccatcatctcagtgccatattatttggaaggtactgatccatggatgaaataaatcaataaatgaacgagaaaaaaaaaacaattagttctaaagaaatgatccattttggggaatagcgtgtgtagctgtcaaaatttctgcatcaataattaaccaaaacatgaacatgtcaaaatgttaggcaacaaagtagttaggaaattttatgtcagatactatcaattatatatcaaccctaataaattatatacagtccaacttaaaaacaaaataatcacacatgaacaataataatgaatatagttataatttctttctttaaaaaaaataataactcttactttcatgaaagttccactaataaaactagcagcatctctaccaaatgttattgcttcttccacatcaaattggttcccatatatat

SEQ ID NO: 145700 - DNA, 607 bp, Cannabis sativa
atttcttttttatcatggattgtgtgaccgagcaggcggtctttaatcctagctatcttcttatggccttgacaagtaagtgtccggatttactttgctaagtcaaactatgcctggacgacttagaggcacgtttagtagcttatactaagcgttaaaatttctctgcataaattcacagtgtgggggatagagttaattgtacaatgcatcgaactagcacaaagaacttatctagagatattttaactaagagtataaccccaaagtgaccatgcacacaagtcttttggtcacttactattcatcaagttttctaaatttgcgtgggttctatcttgtgatggtaccatattacgcacgtggaactaaaagagtaactttaagaagttagtctatgtgaaagtagtttagacacaataaatagaatatgaagattgttatttattcattaatttgtctttgttggtgtgcaacttacataaattgaatctacaagcttacatcacacaaattttgcttctagatgtcaagtggctaaccctgcttgccttgtaaagcaaaggccaccatttaagaatggtgggagtgttgggttttatgccct

SEQ ID NO: 145701 - DNA, 716 bp, Cannabis sativa
gaatatatagtcacgggtagttgttgtgcacaaatactttggatgaaacaaactcttaaggattttgatgttgatttttaatgtacacccataaagtgtgacaaaaattggattttgatttcacggttccccagttataacttttatagttaatttttaatgaaaatactttccaagccaaaaattagattttgatttcacggttcgccaattataaatttgatagttaatatataaatttatttttattgtatgttcttaatttataaaaaatttgataaatttgttcacaaattttatttttttgataaattagtttcaaatttatataagttttagcaagttgttcaacaaacttaattttttgacaagttggtccgtaaactcttattttcttggtgttgaccttgcttttagtgaacgacaatgagtctaatttgtaaaaaacaagtagtataatacgagtgtaatataataaagcaaataaagacacaagaattttataaagccctgaacagttcagtaatagcctaatcctcgtagtgtgtattgacttaagaataaggagcatggttccttttcttagagctctgacaataatatctttgaatataaactcttagacaagtttttcgagcctttgcccagtgagtatgaatcactatttatagggctataagcttgggagggaagtgttgttggaaatttattttacc

SEQ ID NO: 145702 - DNA, 973 bp, Cannabis sativa
ctatcttctctctaatccagtagacttttatatcttatatctatatgtttgcttttctcatgataaacttgattcttaccaaggtggattgaagactggctatccgaatacacaatcactcctcctttgatttatttcaactaaagtattccccgaagccataacgcttccttaaaagcttctgtagtcaccataaattctgcttcaatgatggaaagagcaaccacagactgtaattgagccttccagcatatacagttctagtttgtcaaaaaaaatataaaaagtggttgatttcctagtatcactattcgaggcatagtccgcgtccacgaaccctttcaactctaattctccttttcctttctcataggtcagaccataatcacatgtgcccttcaaatatctcaataaccatttaagagcttctaatgttccatgcccagattggacatgaacttgcttaggatgcttaaagtgtgagctatgttcgatcttgtgctcaccatcacgtacattaagcatctaagaaccacagcatagggtacatccttcatcttttctttttcttttatactgttaggacattgttcctttgataaaatgaactgtccccctaaaggaatggatgtactttttgcatcttccatgttgaacttctaaataatcttcttgatatagccaaactgcttcaaactaatagtcccttcctttcggttctgtgagacttcgataccaagtaccttttgaactgatccaagctccttcatcgaaattctctcttgagcttgggtttacgacttttgatcactggtttatcttttctcgtgatgatcatatcatccacttagagaaataagaatacagttgtagattatttcagattcttaaaataaaggcagtgatcatatgcagatcatttgaacccaatttgatgcatatacgtatcgaatcttttattccattgtcttgg

SEQ ID NO: 145703 - DNA, 635 bp, Cannabis sativa
  modified_base (28)..(38): a, c, t, g, unknown or other
  modified_base (160)..(160): a, c, t, g, unknown or other
ttttgattgattctggtcgtctttttannnnnnnnnnncagaattaatagtggttctctttctggttgaatttttgtttcggttgcgttgggtgctgcgtagttgcgccgatggttgtccaggaagcatggatcctaggttgaaggtgtgtgtaagtggnatttgtgtaatttttttatttgggttgtatatttatttatttagctacctaaaagtatttttgtaatattgttaatttttttttattaaatctgaaaaaaaaaatcctatttttaaagaccgtatgtagttgattctcatgcaagtggagttaggttgggtccactgtttatcaaatggtttgacgcacgcaataagaggggagacgtggcagcctttaagtacaccagagaatgtggaatatgcattttagagcatcttcaaagcatctccaatggtagcattctttgaagatgctctatatctccacatcatccaaaatataatattttattttacttttcttccacatcatttttggtacctttactttttaaaacactccaatccaatggtataataccttttaaaaatgttataattatgatatcacatattattatatatataagttttttttttattaaactattata

SEQ ID NO: 145704 - DNA, 704 bp, Cannabis sativa
acgtggttttggagttaaaattcttcatagtccacgagtcaatcttattcaaatttttgagtatttttttagggcctccttcataagagttttttttgtccccgttttgagattgtttgccactatttataattgcatagtggcagttaattacaaagatgactagaatatgattacagtcattatccctaaaatcgtgggatctgattacatatcacaaaatgtaaatgcggtgtattattttgaaaatcatatagctgtgattttactgcttttactgggtcaaaaatatcatgtattaaacatgtctttaatttttcaatttggagatgtcttgacaaaaacttgattgtagtgatcccaatggcgagctggaaccattcttctttccaaggtcgacaagatatgtcttacgtcgatcgcgggtgtatagaaatcttctgacttgctagggttatgagcctcgctcccgttagttggattaaactatatgaagttttctcgtagcgagatggtcatctcgcattcttgttcctcgagttgatccaaattttacacttagttttcttattgcaagcaaatgaatgtgttacttttctctagtgcctcgctattctccttcagcgacatatggtttctcgttaatacactaagtgccaattaatacattgattcctcgcctaagaccttacggtcagcgggtt

SEQ ID NO: 145705 - DNA, 1197 bp, Cannabis sativa
aaatcaatatccatattgtacagttgtaatcatcaataagacacactgcctggccacctcaatataaggtagactttcgatacaaggaaccatacagattttcaatcgtgaagtcatcacattgacagttttatgcagtccactatcacaacgctcttgaacgtttggctctggtaccattagttgggttgccgtctcactttaactcttacattagtatgatatttttcgctttgggcctaagccttcactttttttggcaccttcccattaggcctcatactaatggagtaagtgtaatatttacattcaagccaactcttattcttctgatgtggaacttaggttgataccctaacaactactacaccaaacaatacagttgaataatatttacctacattaatatttgtataaaggtaaaaaaaatattcaggtataagctctaaataactaagaatcgagttaaatttcaaatgaggtgaacactctacttgggctttacgtggctttattcatggggtaatttcataaatatagaaaaataaagatagtttagataaatattgaaatattgtaaggaagtaaggaaacaaggaaactaaacttaataggtaataggaaaaaatatggtatttaaaataaaaacttaacatatatgagattgaattaccgtgaaagatattaaaattctcttcatatatttttttaaaaaaataaattaattgaaactatagtgatcgccggagttgtcaccggtactggaaaatgaaccggagtttgctgtcggcgccaaaagtcactggagttattgtcggcgctggaaaagtcatcaaaattggtatcatcgcccgaaaaatcaccgaaaaaataccaagaaaagtcatcagaattggcattatcaccagagttcttgatgaagaaaccagtttcttggtgatttttctggtaatttttccggggataatgccaattccaacaaatttttttgctgtcagtactagaaaagtcgctggagtagctgccgatgtcgaaaaaatcgtcggagttgctgctgacgtcataaaagtcatcagaattggcattgttttcgaaaaaatcatcagaaaaattaccaagaaactggttcttggtaatttttccagtgactatgtagatttcgatgacttttctgaagtttgttatcggtgccgaaaa

SEQ ID NO: 145706 - DNA, 622 bp, Cannabis sativa
ttgttttgtttcagtattttgatctttaatggtgtctccaagacccatagtatctaaatggattttagcatcaagaatccataataaataattttttctaaaaatatcaagtttctaaaaatatcaagtgcctatcaagtgccacaaagtcaagttttgtaaggtttgccatgaagaaaacttagttaaaggctcgtgctgatacgtattatgaaatattagtattatgtaatattataatttagagaaagaaaatagagaagagatgagaattttcttaatattttattccaataggtaattctatttatacatatataagagtcaaatattaagaaactaagaaaaaaagaaattaaaaaaaatatattaattacattaataataataaataaaaacactcaaaaaaaaaataataataaataaaagatatagatatctacataattaataatatttataatatttataagactttggctatttttcatcttctttttaattaatctccgactgagagagctatacttcctcttcaacctaaaccctaacatctctctctgtgaagtgtaacctcttcagctcaaaccttggttggttcaagaaagaaaacgattctaca

SEQ ID NO: 145707 - DNA, 786 bp, Cannabis sativa
  modified_base (591)..(599): a, c, t, g, unknown or other
tagaatcccctccctgccacgatgttctcttccatgttcatgaataaggtactcaatatgatttttttttctctgcaaagccttatggtgaaagtatttagtattacgatccccacacttcatccaaaccgccctagctactacgttgtctccagtacaattccttcttccctaagatcctgtttaattgtttgtcttccttttttaacagctgccaagtggttggattaacatctcgagataactctaaaattctatatatgttgacacacaacaattcaattaaccaactccttccttctagccctttatcacaactcaaattttttgcctttaacatagtaggagtcacaacaaaatttgtgactaaagataaaaatgttgtggctaattacaaattaacattattgtgttgtgactaaaaggttcgtagctaaaagtattagtcacaaaaattacaatttgttgtgagtaaatgtatttttagtcacaatatttgttgtgactaaaaccaaattagtgacaacttataactaaatactatgttttagtcagaagtaaatttttgctgtgactaaaagtcacatttannnnnnnnnaatttatgttgtgactaaaaattaaattatcattagcaattttttgtaataagatagagataaatatataaataagcgtattgaaacaaatacaaataaattaaaatgttattgatacttgataaaattatttttgacaattaaataaaaataaggtatagaatgcaaaattcctaaaatgcatata

SEQ ID NO: 145708 - DNA, 626 bp, Cannabis sativa
  modified_base (578)..(601): a, c, t, g, unknown or other
gctaccataggcaagatgagagctggaaagtccctatccgaatagatgttcgaacagggacttgaggggcaaatgttatcccaaattttgtccacctgacgtggcatctccttgtaagccaagattgaggacacgtggaatatatccttgtcaatagcaggataaagtcaccttactaggcatggcaaaactatcaagcaacaagcgaagggagttaagcaagccatcaagaagccgcacaaccatgtctggccggctaaggggagtgcataggccgactagaggaagcttgtatgccgaccagggtttgagcacaagatggacggccaaagggtgactgtcaaaccaagaaaggcctgttcaaccaagaaagcctgacctttgcaaggaaagttgtacaaaggctaaccaacacatgctaaggctggccaacatatgctaaggctagccaacacatgggaaaactagcaggcagttggtgtgcagccttgaccctagcaggcacttggtgtgcagccttgaccctggcaggcacttagtgtgcagcttgtatctgttggtttttatgccctaaatannnnnnnnnnnnnnnnnnnnnnnnttactaattaataaaagatcagaaa

SEQ ID NO: 145709 - DNA, 1388 bp, Cannabis sativa
  modified_base (46)..(49): a, c, t, g, unknown or other
gaaaatacattttaaagaatgagatttattattattaagatattcnnnntccattgttggttttacaccgcgtttttgtacttccttggttcttgtcagggatttcatatccaaaaggccttgaagcttctctggatttgcttcaattcctctggcattgacaataaagcccaaaaactttctcgagttgactccaaatgagaattttaagggatttagtttcatgttgtactttcagaggactttgaagcattcgtccaggtcatctatgtgcccccccagccttcctagatttgaaaatcatgtcatacacatatacttccatgtttcgtccgatctggtttttgaacatcttgtttaccaatctttggtaggtggctccagcgtttttgagaccaaatggcatgaccttatagcaatatagacacatatctgttcgaaaacttgtatgttcttggactggtggatgcattttgatttgattgtaccctgaataagcgtccatgaagcttaatatttcgtgcccagctgttgcatccacaagctgatcgattctttgaagtgaaaaatagtctttggggcataccttattgaggtctgtgaagtcaatacaaactcgccattttttgtttggcttaggtaccagtacgggattagcaagccaagccgggtagaaagctttaattatgaagttgttattttgtagcttctctacttcttcttttagggctagtgctcgctccttgtccaacaaccttcggttttgttgaactgatcggaagttgggatccatatttaggacgtgaaaaattaaaaaaggatcaattccgaccatatcctcatgtgacaaggcaaaaacttgtaggtttgctctcagaaattttatcaatgctgattttactttgagcaacaaaccttttccaatttttagcattctggtcgggatatctggatcgatctcgatctcttctagctcttctacaggtccaacgttgttgtttcggtgcccaagtcaaggatccacatctttatccccgccatgggaagttccctacttggaaatgttttttcccttatctggctagaggatacttcctttttagcctttgccacgacaaggttataacactccctagaaatctgctggtttccccttagataccctaccccattctttgttggaaacttctggcataaatggaatatcgacgtaacagccttcaagtgatataagtttggttggcctaacatgacgttaaacgctgatggaacgtccaataacagaaattgtgccattgtagttatgcttgtcggagcttgcccaacagtgatgggagggcgaattttccctagaggtgcgacttcttggccggagaaaccatatacag

SEQ ID NO: 145710 - DNA, 1201 bp, Cannabis sativa
agcaaagaactatccaatcaacccaagttttaataaaaccaataaaatttaatgtaagcccaaataaaaagtctaacataaagatctccaaatgtttttcctaaaacactaaaaataaagcataaatctgcacaataaaataataaaaagactaaaacacactataaattcaactctcaaaaatacataaaaataaaaataacagcaacaattttgaatgtaatgacaactacaagtgagatactgcgatgacaataattttgaaattatatgatgaattttctataaatttatcgattgttatattattttttatgaattctaatttagtttatttatgcaaaatatacatttgaaaactaaccatttactaataaatgtctataaataaattacttaattaaaagagtaatttgcggtataaatacttaaatttaattcccagttataaataaatacctaagtttaatttttgacggtaataatacgtaagttataattctgaaacttctgtaggtacatagctattaagtgttaagtaaatcgtcacgtggcaatccctaataagttcaagttattaactttttagtttttttaaaaaatagtttaaatataccaataataaaatgacacgtggataatgacttaatatttaatggttaggtacatacatagttctaaaaatataacttaggtattataatcgccaaaaattaaactttggtatttatttgcaactaggaattaaacttaggtatttatgccgcaaattacttagttaaaaattattatttattaagtttaaaataattaaaaaaattaagattttataatattaatttattttgcttatattattaagaaaataagagtttacttatattattttaaaaatataaaatttaaaatttgatataatttttaatttaattattactaattaaaatataaccgcacccgaaacacaaattattttctaaataaatgaatgtgcttaaagcgattttgaagtaaactcaattaaaattaataaaataaaagaattaaaataaataaataaatatatttaaagaaaatgcaatctccacttatatgatatacagtataacctctattcaagaatacacttgggaccaagtaaattatattctaattgagacattataactaaatagagttacattagaaaaaaaattaaaat

SEQ ID NO: 145711 - DNA, 502 bp, Cannabis sativa
  modified_base (55)..(66): a, c, t, g, unknown or other
  modified_base (415)..(453): a, c, t, g, unknown or other
ttatatgtcaatcaacatccaattatcataagtgcagattttgaatttttcaatnnnnnnnnnnnngcacaagtgtggatatccgtactttgcggattggattagatcgtacagattagattggatcgactattttatgaacactccgaacaacagttgcaacaaattcaaaaaaggagtctttatttatataagttaatttagttttgtaattacttgagatttatctaataaattttattttctgagcgtatctccgtaaaccaagaacaattcaaaaggattactaataatacgtataaaatattgtgtgtcatttttgtttctatatttttactttttatagtaaatttttattctgtcagattctatatctgatagaacaaagtcaaattctgttcaaacaattttattnnnnnnnnnnnnnnnnnnnnnnnnnnnnnnnnnnnnnnngataattatgaaaatgaaatttcattaacttttaaatcttaacatctaa

SEQ ID NO: 145712 - DNA, 789 bp, Cannabis sativa
  modified_base (498)..(513): a, c, t, g, unknown or other
tatttttagtcacaatacttgttgtgactagtgacaaattaaatctaaatactatattttagtcacaagaaatattttattgtttattaaaaaaaaattatgttgtgactaaaaagttgtcactaaatgtaacaattttttgtcatcttcatatataccaagtaaaaattaattcatatcgtaagggtagtttagggattgtgtatatcctactaggcttatatatacatatatttatataaatttttaaaaaattatatatatacctaatatattatgtaaaataacaatttataaatctaacacatataatataaatatatttcaaacttaatagttcaaatgtctattctatttttatatattatataaaatgtgattatgtaacgaaattcttggtttaacgattctttttgagtttctacgttaattttaacagaataacctattaattaacagaatattttttttattaaatttataatattattatatatnnnnnnnnnnnnnnnntatgtagatattttatataaagaaattttaatttagatttaaaatatttttaatcatattttaaaatttattggcttaattttgaattaaaataaaaaaaaattatataaatattttatataaagaaataaagacactacaacaaatttttgtattaccggcagagacatccgccggtattaatagcccagaccgccggtaataattaataccggcggaattcgctggtaattatctgccggtattaataggtcgctataagtgactattagcgac

SEQ ID NO: 145713 - DNA, 1027 bp, Cannabis sativa
ggcggttttaaccgaaggcggttaaggcggttttaaccgaatgcggttttttcggttttcggttttttcggtgttcggacggccggcttactcggtttggtcggtttcttggattttttgctcacccctattttatacggtagtattagtatatcactttttttacaatttttttttttttttttactgattaggacgtaggctgtcacaaaagtgacaggtttttgtttttttattttaatggatttaaaaattattctttattatttttaatatttaataattattacataatcttttgattaaaatgttgattgggagtcgggttgtcacaaaagtgacatgtgtatttttttatttaaataaatataaaaattattcgttattatttttaatatttaataattattacataaatctcaactcccatgtcctactattcatcttcttcttctatttttttaggcacttattgtaaagtgcgtgattttttttttttttttcaaatttgtacaactagtgaataatccgcgctttgcggcggatatttaattttttttttaattatattataaaataaatcataacttttatttaatgataactaactaataaattgtatcaaattttaatcctattaattataataatatgttagtcttgaatcttattttgagggtgaattgtcataagaatacataaatttatagaaaactcatcatatgattttaaaattgttctcatcaccgtatctcacttctagtcaacatataacattcaagggtattgttatatatcgtcatatctctctggtagttaactatcattcccaacatattttttgtgtatacaaaataaatcaaacaatgaattaactactcacttttatacataaataattttaaaatttttttatagaagaaatataacaaataaaatctattaattaataatgagaaaaaaaaaagaattgtaactaattaaatttaaattctaatagtacgttttagatattaagttatttatc

SEQ ID NO: 145714 - DNA, 525 bp, Cannabis sativa
ttcattgttagagtgaagaaactatataggattttaaaattgatttcttcaaaggtaaatcttttatttttttaatataaattttattattttgagtagttctttaattttatcaagaagttttgagctctttgtagttaataatcttgctttataatattattagcattttatttggtgagtccgtaagtggagaaataataatcttaaaattaatttcttaacaaaaaagtaaatatatcatgttatatatacatttctttaattttattattttgggtaaatcttgaaacttcttatgaagttttgagtttgttttgatttttttttttaattaataaccttactcaattttatttttgtggaatttattttaaaatattagtctctcacatatatatatatataatttctaatatgtatactatctatttatatttatatatttgatatatcttgtaataactttatttgtaaagaataataattttaatacaattgatatatatattattaagtttaaaa

SEQ ID NO: 145715 - DNA, 649 bp, Cannabis sativa
ctttgactgaattgcctggagattattctccaaaaatattacatgctgatattaaattgtgatacaagtctccaaaaaaagaaatttgatacaaataagtctctaatctcgaaaaagtgcaataatagtatatccaatctcgctcaagattcactttaggtgatcatatatcattgagttttattttgatctatgtatgtataaatatacttttattattgataactctatgaaaatagagttattaatatttttttaggcattaaattagctttgttcttaagtatttttagtttattttagtaatttttatttagttttgcataaatattaattttagtatttttagattaatttttaataaattttgtaatattttatcaattttatttagtttcccattttataagtgttaatctcaatgttgtgtatttttgtaaaatgttgaaatggacatttggacttattatgtggtgaatatcttgtagtttatggactcaaaaaaggcccaaaaatctcatttgtccaaaatgtcaattcaatttgctatgaccatcattctattgggccaagtcacatgaattttggaatgacttattatatctttatatattaaaagtggctatctaacggcatttcttggtttaac

SEQ ID NO: 145716 - DNA, 918 bp, Cannabis sativa
aaaaaatggtttaaaataaaaaaaacggtataaataacggtatattcaaaaatttaaaaagtaacgttattattagaattaaatggaaaaaaacgtgtcaacatgtaattttccctaaaaaatatggcagctgattttggccccgtttggggtagcttttagaaaagttgaaagtgctttttgagaaagctgttgcttaaaaagtgtttggcaaaataaaaaaaatagattttttaaaaatttaagttaaaattatagcttttagctaaagttggccacaccaacttttagattttagcttttaagtttagctgaaatttaagtttaatgaattttttaattgacctaattaccctcattcaaattaaaaaattgtcattttacttagggtttttttctcattcgtaaaaatcaacccagaggcaaaaatatcatagtacggctcctcatctttgatcgcaggagtcttctccgtcaccgatcacccacgccgatgtttgccaacaccttcgacgtcaatagttcctgcacaatcaaggtttatctcttaacttttcttttgaattaatgccatgaaaatattttttttttttgattttattttctttttttttttccacttatgttgatcgcatgagttttcttttatttttatttttttatttgcaaaagagagattatttgtagtcgaaataatcacattatcttgattgaaattgtttgtagcagccattaaatcagacaacttaaccttaacaagtggtttttgaaacaataaaattgtattgttattatcgttttcgatcaaggtatgtaacttggccgtaaatcatttttcctaggaaaaacaacattgctatctttactatgggaaaataatttcccttatacggcatcctttgtttttttttttttttt

SEQ ID NO: 145717 - DNA, 547 bp, Cannabis sativa
atttcttaaaaactttatcatccataaaaatataaaaaattattcaacaattattttttacaaaattttaaagaataaataaatataaattttgcataatttttaagatgtttgcaaaatctgatctttaatatgtcatatacgataaattcataattaatataaacatttgcttcaatcataaatcttttcaatattctattattgtatatattcataaatataatttattttcttgacaaatataaaacatttattgaagtaaatatttattaaaatctatagcaatatgataattatttttcattattataaatatataataatatatatatattcatgatttattatatttcaatcaatattatacattaataaatattatatttacataatcttcgggatatatataagaattttatagagaatatatatatatatgaataagtattcatctcttttatcgaagacacgtaatcttcaaaatacactactacaatattaggctttagaggcagtttttcaaccctatttataaaaagggaag

SEQ ID NO: 145718 - DNA, 850 bp, Cannabis sativa
agcaaagaactatccaatcaacccaagttttaataaaaccaataaaatataatgtaagcccaaataaaagtctaacatcataataatagcatttcaaatttcaagattaaaaatcttgatatcagctgttccacaactacaataaaactacagtacactgagtggtattctaaaactatgataaatattacatgtgtattaaaattatcaacttaataaatgagtcacattaaactatcttaagaagcttcttgaattcaattttttttttaaaactcaccaaatattactgatatgtcacgaaatttagctcataaattttaaaatgtcataaaactcgataagtgatattgtgggtttacctagtatagtttaattgtgactaatactaggaacaaaaaaaattaaaatagtttagtggcttagttcttttgagaaaataaaatatataatttttattacactttttaattcttatattacttttaaacatttgtttaattaagtaatttatcttttcgttaaaataaaaaagtaaaaataaaaataagaattgatttgccacttccttttaatgtaatattatattatattgatagaaattgcacaatagaaaagttaaattgaaacgtcaaaataaatttaataatatatatataggagggagctatagcatattgtatatatgtatatatttcatagaaagatgagggagccatggcccctgtacagcagaacacccttccacccctgcccttaactatgtctaatccaactatattactcagtgcataaaaaaacaaatgaagaagataaatcttattgatattatacagtaaaaacaataaaa

SEQ ID NO: 145719 - DNA, 501 bp, Cannabis sativa
  modified_base (162)..(187): a, c, t, g, unknown or other
ctgcaacaagttgaactggatagtaggatgtaggatttatttaattttaaataattaaatttcaaaaataataaataataataaaaaaatagttttggatttttagttaaaataaaataatattaaaattaaacctgtaattttgaaaaattaggtttcaannnnnnnnnnnnnnnnnnnnnnnnnntgctaactacttttaaaaatttcatgttttttataaattaaatattcaataaaaattaaaaaatgataaataaatatccttttctaattttataatttaatttaaaaaaaataacaaaatttaaaggttagcaaaatatcatgactatagtaatcttattttaaatttttaaataaggtcaaattattttaaaaaaaataaaattaaatatttgaccctatatttaaaaaataagatacaataatcaaatttaaaaataagataaaaattaagaaaaaagatagatttttacctgttttcaaattcaaattaca

SEQ ID NO: 145720 - DNA, 675 bp, Cannabis sativa
ccgagtctctcatttcctcaattcttttcatttttgtgccatagttgggtgattccctacttcctgagttaaaataatccatagagaatatagtagaacctagggttgtaggtttggatttcctggattaaggttttgatcatgtgatttacccggtttcattatgtgattagggcatcaatctagcgcgagactttccattcaggtcggccagcacacttgaatctagaaaaaaggtaagaactgtatataatgtgtgatatcaatatctaagtgtgtgtatatgttgtgtgtatatgcatgcttaaaatgttaattgcactaccaacactagtacagttaaggtatagagtgcattggtatagtgaatgttatttaagaatacattacagtgatactagcacaagtgcaggaaagtactgagtgtgtgtggtatatcactcagtggtactcagggtatgaaacaaaccctaccaacactcgtacggtgaggtacgtagtgtatgtggtatagtggctataccctagtatggaacgttcttactcatctattgagccttgtaaatgggtgtatgagcgcctaaatacaagtcagaaattatatgatattgtcatatgcttttcttgctgagtctgtcgactcatagttctgcttccatgtgtaggtaaaggaaa

SEQ ID NO: 145721 - DNA, 958 bp, Cannabis sativa
tatgaatgtaaggtcttctccgcagtagcttccatgtcttgtttcgaactacaacaagtatctcatctttcatggtcgtattccaatcactatgacttaaagctttttcaaatgattgaggttcattgcttattttctcccaatttgtactactgagataagtcttcagtttgaatatgctaaatattgctctaataatcataggatgagtaggctacaacatggtgtcttttcccatagcactagaagcacatggtgcaatatcaactgtagttttacttctgtctattgcattagcaagtttagggacaagagtaggatctggaaactcggctgaacttccttcaaagagattagtcatggcaaaaacatcaaaataaccactgtttcttagctgatttgtgctagaattagacaaaggtgacttaggcgatccggcaatgtaggggctggagagacatgctgatgtgaggcatctgaggtatcttcctgataaacatcagcatttgaaaaccccgaggagtgttagcttggtggtaatcgcggaaaaggagtggaccaacatgggacagtaacagatacatggacttcagcatgacaagtgtttagaaaaccatgtcgaaagggaaattcatgttcattgaacaccacatgtaacgccctaagaattaggcaggctacgacaaccagtaatataacctaatcctgctaaaccaggattactagaaaataagagcgagaaaaaaatttaaactttaattacaatggaataaaaaaaacataacttgtaataatttaaattttacaatcaatccaaaaagaaaacatgtttcgggatcccataaaacttatcacaaaaaagtataagttattttacatgccgactaagcggcaaaatccaagaatacaaaatataactgctggtagacccaacccgtttggtctagtatggcccgaa

SEQ ID NO: 145722 - DNA, 760 bp, Cannabis sativa
tcctcacatactccttcaattgtttcaatatccagggtcaatccctaacatatcctggggttccaagtgaagtaatcttggttttgtctttgggtgctactggttgacaaccagctttcctcgtggcagcttgatatggcaacaacagcgggtcgatatctactcacgttgcaaatttttttttatataaattgctttaccggagtaactgccccttttactcttgtgactcgctccctcttgagataatcgaggtgtcccttcgtcctatagagagatggatgtctcgttatgtgttatctatgtgttttaacagctagtttgcctcgtcagcacttctctacacatagcaaggttaatgcctcgctatgtattttcaatattgtccttgtgattatgtcttctaatatgaaattgtttcctttaaatacatgggttaacagttcctacatccttgtctcgctaaggattgtgtagtctgcgagttataaatatacactattgactttgcatttaatgagttattcgatttaatatcttttaatataattgcaattatatttgttgatttgtattttctaaggttgacgcgtgtcattctctgaagtgccaaccgaattttgggtataaaaaaaggacatgacacttatccattatgtaagtaaattttatcgctgactatcacaacaatataaatctagtgcactaatgaatcatgggacataaaattttgaagtatattatcacaattaccttccac

SEQ ID NO: 145723 - DNA, 570 bp, Cannabis sativa
tgtgtttgcttgcatttttattcataatgtaaacaatcatattttgatcaaatgtacagtacttttgggttttttcattgctcgtattgttcctgtttaagtagttagtaatctaccaaactttttgatttttgagcagttatcaattatgcctcgatatagcagttacaatctgccttaagcaaacttaaatatactttaatgattttgtatatttttaatttgctcttatgaatagttatattatctattcattttctaggttcaagtacttttatcaaggcgtcgtgatgcctcgtttagtactttcatagctcgcgagaaccattagtattcagttttatacgcgagttataacttttgatttttctttcctgtcagataggttttaagtcaaaaattatagttgtttgatcccttcttcgtcaaaaaggtttgatcacgatgttataacgattcagcccatctctcgccaaaaaggtttggttagggagttataacggttggactccacttttgtccaagtggtttattcgagaacctttgaatttcaaaaaaaaaaattgaaat

SEQ ID NO: 145724 - DNA, 552 bp, Cannabis sativa
gcaatgagaataaatagtaaaaaaatcattccttaactaattttttaaagaatgtcattaatgaattttatttattttttaatattaaatttataatgacaattttatcttttaaaatatattttacaaaataactcatatactataatttaactcaaaaaagtaatttagtcaatttaaatatttcgattactatcattctatttccaaacagttttagtgaacaacatattacaaatattgattctgatcatttttcatttattctattattttattccaataaatactgtgaacgttccatattgtagatagggggctcttggttgaaaaaagaacaagtagaaaaatgctcatgcaattctatggcatgtttgttttccactcataaatgatatgattgtaaatccatgctttcgagtttatgtaatgtttctatagttactttataacccaataaagttaagggactcaaaactcaaaaccaattgaccatgttattataatttacttttacataatgataccacttaaacaaggctcaacacaaat

SEQ ID NO: 145725 - DNA, 610 bp, Cannabis sativa
tacatcattaatgtgccttgtgatatcgtccatccgactttttatacttatttttcactcaaaatgttcattttcctttaatataggcaccaattaagaaattttttccacctgcaataaattaaacataatatttctactatctaaataacataagaaaaataatgataaaataaagtgaacaaattcaaaaaataccagatgtgttttgtctcgtgacactgaggaaggctctaattgttcttgtccatcagattcttcttgctcttcttcatcggattctacttgttcatctccattagattctgcttgttcttctccatccaattctgcttgttcttctccatctgattatgtttcttcttttccatccgattctgtttcttcttgtccacttgattctgatttttcttctccatttgtttcagattgttcttcaaaacttcccattgactaatttaaataaaaagaggtaatattatattaatcgagtacaaacataatagtcaagctttacccacaaacaattgagctcaactcaagatagttgagctttatactaacattacaagaatgtggagactacatctcaaccatgaatggtcgagct

SEQ ID NO: 145726 - DNA, 544 bp, Cannabis sativa
  modified_base (344)..(349): a, c, t, g, unknown or other
acccagaccaggatcagaaccaaggacatagacccagaactgaatccagactcagatcgggattggaacttgggactcgtaccacatctagaccaagacccagggcgcgaacccacacgcggagccttatctggacctagactgaaaccaagacccgaacccaaactcagacaatgacgcgaactccgacccgaactcaaacccaaactcgaaataataatcgcaaatggaacaaggactaagaccaagacaaggacctaaacccgaacacaaactcagatcaaaacccatatagatagctaaacccgaaccgagactaggactcgaacccgaaccaagatcgnnnnnnaaacccacacaataactaggacatggaccaaaaatcaggatagggatttgggaaacagaacttgtaccgagacctagtactcgacaaagacccaaacgtgaacctagggcccagctcgtgacccggcaatagaaatggaacaagattgggacccagccctgcacccgaaccctgacaaggacccgaactcacacc

SEQ ID NO: 145727 - DNA, 523 bp, Cannabis sativa
ccaatggctaggaagcggatgagctccattctactttggtttgcgctcatcagctcgagaagattgtgaccgtggcaggcatcaagccatctgcatctggggttgttcaccgcctgcctcgagacgaagagacacccaatcataactacgggggattcggagcttggagccaaacccacctcatgtccggggccatgctccctcttcaagactatttcattaatttccttgtttttgtcgaccttgcaccttatcaactaattccacaagcttatcgcctactctcaggcttatttattttttatgttgccaggtgaagcccagccaaaattttgtatttttatgaacttgtttctatccccaagaagggggacaagtttaaagacggttttttcaccctccgggcccatcctttgaatgagggcccgatcccttttaaccgccaaaataatgtagaggagtaccaccatcgttttttcttttcttctggtttccaggtcgtggaccgcccggagctcctcac

SEQ ID NO: 145728 - DNA, 604 bp, Cannabis sativa
cccaagccccaaacctggacataggacccacatcgagacctgggatccgggactcgatgcttggacccgaccagtactcggtgtttggatcgaggacatacactagaacctaaacccaaactcgaactcaaactaagaccgtgacacataccaagacaaagacccacactcgtgaaccaaaaccaaaacatgaattagaacgggaccaagatctttgaatgggaccgggacctggacccagacccagcctcgaaccctacctaagactgagacccggacctgaaccttgcctcagacccaaatcatgacccgaacctagactcggatccaaactcgacccaaacctgtatctcgtgacttaaaactggaaacgaaactagaagcggatcaggacccaagaacaagacatgaccatgacattaaccaagacccaaaactgtaaccggaccaagacccagactcggtcaaagacccaccgtgggattcggtccaaaatctaaaccaaaacccgaactgggactcaggacccgaacccagacctgaattcagaccagaacattgaacatgactcgggacccagaactgggatcgagacccagaactg

SEQ ID NO: 145729 - DNA, 1232 bp, Cannabis sativa
  modified_base (1205)..(1206): a, c, t, g, unknown or other
acaagtgagaatcatgaagccaatagaaaagcctttcgtcaatctcgccggcagtgatgtttctgttaaatctgatcgaagtagattgatgcctgctcgatgtatggcgatgatggtaggaccatcgaagtcgaagaaggcacccttgacttcatcgaacgttgtggatcctagatttgtgacaatgaatggagctcgaagaactccaacaccggagaagatagagatgtcattggatcttggcgtacaaggttatgagcgtgttcgagaggctatttttggtgtttatggtggctcaccatgggaatcgattcacatgccgccgaaagattggaggaggatctttgatcggggacgacggtggatctttgatgaagatgttagagattttattataatggaagaaaatcaaaatattacaacactattgcaatataatacaatgactaaaagattgattaaaaaaatgttacaacaacaatatataaggaagataaaagaagaatatgaacaaaatatattatataattaatatgtatattacaagagaagaatatttatatatatatttatatattcactcacaatcttgagtgtagattaggaaggatgaccatgacttgaataatatattatcacctttgtccaaaatcttaagcactaagggaactctctaggaaacaactttgagaattatcaagccttagaattttctagcaaattgtttttttttgaagggaaaccgatacatgttaaaataacaaaggtaacaaagttacgcaagcagatgaggatttccttccatctataacagttcattgtctatcctaagggcatgcagagataccttaggagaactagacaataaaactataatatcaaaaaagaaaacctcaaaactgagagttgtcacttccgatccactaatagaacacctacaaaattaatacataataaatatttaataaaaattaaaatttcccttacaaaaaataaaataaaataaaataaagtatgaaattttatataaatagtcacagaattttctaatgtaaatactagaacttatctattctcatctccattgttgacggtgactacactacatctgatgtgttattatttgtaatatcccaataagttaaatggtaaataattagagtttatatttatattatgaattaatcaggtaataagtgggattnngatcctactaatttatttcagcataa

SEQ ID NO: 145730 - DNA, 937 bp, Cannabis sativa
caaactaacacgatgatgtttggcaaactgacgtgactcacaatctaatgaagacagcttactatattcgggacaaagtttcttcagcaaaggaagggatagatgacccaaatggcaatgagcctcaaaagcgaaagcaacactcggacaagcaatagaagttcgtggaagtgggtcaagaacatacaagccaccagattcatatcttttaccaataatattcttcgtcataagatcctgaaacaaacaatgatcgggaaagaataagatgcaacaatttagattacgagagagttgactaacaagaagcaaattaaagaataaattaggtaaacgtaagacagatgacacagtgagcagaggtgtaggaacaacactgccaaatccaagaacagaagatgataatccatcagctaaggtaacaatagaagtgggactatgagactgaaaagttgaaaagaaactagaattacccgtcatatgatttgtggcatcagaatcaatgacccattttgaggatttggaaagaaggcatgcattagagttacctgaatcggcaatcgcagttacagaagaagatgaagacttaagtgtatcctgataccttgagaacttggtaaagactgatttgtcagatgcatcactagtgatagcaattttagcagagtcttgttgtcgatttttgtactgtaacttcctacactcaaacttggtgtgacctggtttcttacaatagttgcacatgatgctcccagaatctggtgttcgattatcaggtctttgtgaattacctcttttgtatccgcttgaagtagagttttttcctggtgcaaaattactacaactcaccaaggcactattaagaggagctagagaggtagttcctgtgcgaagaacacgagtaaacacatcttgtaaggaggagacatcagaacca

SEQ ID NO: 145731 - DNA, 757 bp, Cannabis sativa
  modified_base (210)..(213): a, c, t, g, unknown or other
gacaatggcggcggcagcagccgtaagtccggccttttttgtcatcattgccaatatctcatttttcaatccaaatacttatatgattgcattcacaaaaacagggaagatatgaaaaatcgaaacttttctgagttaaaggaactcattttactgttacaaacaaaacaaagctatctaaatacagagagggagagagagagagagagnnnnagagagagagagagagtaccagttcctctagttgtcttagggaaaccgcactcgatgataacgccaatcaagctaactttttgatttatagaagtaatggcgtcctttatgtcaagaaacctatagtcatctctctcccccatttgctttctctctctaaaccctaatttctttcttctagggttttgcagagacaaaaatggtatttttctgtattgggagggaaacagatgcagttttatatatatattaaaaaaaaaaagaaactttttgtatttactttactagtgcttttacttctacatatttatctaatgtgcccaaccccataatcttattaaattaaaatctatacaacttttacacttaagtggcgtttggtttgagataatgaaatggaatagaatgaaaagaaaacaatttttattccattctttggttgtataggaatagcattccaatggaatgctctttccactattttggtggaatgactattctattttaaaaagaaaggaatgaccattcaatgtaacaagaaaaa

SEQ ID NO: 145732 - DNA, 1732 bp, Cannabis sativa
taaatcaaaattactaaaaccaaatggagtaaaaaaagatgcaattaattacaaaataaggatcataactcaggaaaaagaaaagactagagaaaatggatgaaatacttactgttcaaagatgggttttcgcacgacaaaaaactttgcaactgaagttgagatgggtgacgtgataaattctgtgaattcctgaggttgaaaagtatatccgaagaaatgcgcagaaaatatgtcaatgacaaagagggcatgcaaagcttagagaaaccggaaatggtttttcgcaggaaaagcttgaagtttttggaaagcagaaatggtggaataatgatttctgttcaattttataccttgagattgatcaccgttagagtaaaagaacaaagtttcaacgaatagaaacaagaaagaattggaaaagatgggaaataaatactaatgatgtgtctcgaaatcatgaactgccaaaattcaaaagcatacaatttttcaaattgggttaagacaattatacccgtacaatcatttaaaaagcattttttattaaaaaaatatttttaaggggtaattgttgttgctccagtttattcccaatatacgtggcagtcgttgtgtgtgacatgtggctgacatggacacgtcactcggagatgagttgaagacttatctaaaccaccttaagaaagagtacaattcgaagtgctagctcctggacatgagcaaaaggcctatctccttctccgagagctaaggtatggatgggcttctctaggctagtaaggttggagttgaacagtcactttgcatttaatacggcatggagaaaatatttgggaactcccataaaaggacgtgtaagacgtcacaaacccaacttagggcaatttacgataatcaagggagctagtgacggctctattatgaagaatcacatcaatcaggaagggatgaaggctaatctcacctaacacctacgtggcctactacgcaggttgtgcatgccctattttgtactttctgggaacttgtgcatgcccatagttaccacttaaagacaagttactccttttcttcttcccaccaatcgttataaatacccctcgtaaaaattaagagggggagaaaaaagaaaaaaaaaacacagaaacattctctgtaagaaatactctctcattattaacagagactcatggactacagctcattaatacttgaaccacgtaaaaactacctacattaattatccctaagctctcattattcaattagttgccgaaaatctcagtcaacaattgttataccaaaaattcggttacacttcagataatgacacatgtcaattaagtggaatataaaccaccagatataataacgattatatcatttaatgtaaaaagtaataactcattaaatatagaattattagagtatattcataactcgctgactgtatagtcttaggcgagacaaggatacacaaattattaattcatgtattgatgagacaccatcctgtctcagaagacgcagattcaaggacaaaatccaaaagaataagtgaagttatccgaatcaatcacgaacaatatatagcgggcatccacctcgctatacattagagaatattaacaagacgaatctattgttaaacacttagtgtattttccacattataataactaagtgtatcaacttggaaatatgcaggacatgattgtccaatctgcga

SEQ ID NO: 145733 - DNA, 745 bp, Cannabis sativa
cccagcgcatggggttttcggagacaattgggaaggaccatacctcatcgctgagaagattggtaacgcaacatatcgacttgcagaactcaatggtactgcacttcaaagagcctggaatggcgaaagtttgaagttttattatcaatagtactcgtagtatatcatatgtactcgttatgtatttatacttagtcaatttatctataaatgttctaagtatagggggtatatagcccactttgtactattgattaacttgttctttataaaagttaaatttttctcgagttttaaaaaattcatttttaccttagcattttttacaccaagctgtaaataataccacaatcaaaatagcaaaagacgcgagtacccgtgtactgcaaatatgataacataaataaatatccccgaagggatatatgttgttcgaaatattaaaaaccataaagagaaatttgtctaagtacaaatcgcgagtacccgcgtaccgcttaaaaagtttggaaaaatattcataaagtaagtaaactaagcattgggagcgaaagaggcagttggagtagcggattcatctgcgactttgctggcagcctcgtcagcaacctcttcagtattcgtagcatcagcgtcctcgggaaagagatttcccccacctccttgggtctgcgtaggtgacatagctcgaaaagcctcagccatctcagccgcctctgccccgaggatcgagaagtcgaagtct

SEQ ID NO: 145734 - DNA, 561 bp, Cannabis sativa
cccatatttgcacatacatgattccgagcctcctcaccagtgttcttactgaaaaagactgaagacttgtcaaaattcaccttttgaccagacgccaattcatagctttgttgtaatattccgaaaaataaaatgatatttaaatagacatattttattatatatgtaattattttggtaatgaagtaagattataatcttacttagggtaattagtgaggatttattaaatgattatattaagcgtaatttattaattacggagattatattgggatatgtgggtatcgaggataccatttctgaaataaaaatattttttttgggcccgatgactgtggaattttgcaatgtggttagaaatgtcatgacattaatgggagaattattttgaggatattccggactaggttagaattattttagaatgtcggtttaatggattagtaaaattaccaaaatctaggttattgtaaaagttttggaggggtagattagtcttttggtaattatgaattttgcccttttgactttttctagggatgaccattattttttttt

SEQ ID NO: 145735 - DNA, 937 bp, Cannabis sativa
  modified_base (777)..(779): a, c, t, g, unknown or other
  modified_base (809)..(811): a, c, t, g, unknown or other
atcagccgcttaataggtatattactactgcgagtctgcgcacaagaagactcaggattttaaaaaacaaagtcacctttcaataactgtactatttttaattttctatgtaaatcgtgtgcaaaatattttgccgacaaatattttttttttgggaaacgggccgacaaatatagttaagagaaattataataaatgacaaatgatggtattatattagtaaatgtttttattttaaaatttataaaaaaaataatcttttcactaattattatttatattattttttaatataaaaaataataattttttttttttatattttttaagaattaaaaacaaattatttaaagattatagtatatctatattaattttgttaattttttttttattttaaagttatgtcaatttttttaaaatttttacgagttattgtaagttgttggtatataaattttattgtacagtataattctgttttattgtacaatatattattattcttaaatgatatttattttttattttgttatgtataatagtaatatataattttgttaatatagtataaatattttaatatatataattttagaaaatagctatgatagagaccttagttttgtccctatagttgagatacttttttagcccttgattgttgatctaatggtaataaagttaaaaaaatatgatgataataatgaaacctaactagtaatatttttacaccttttttgtctatacactattgtcttctttttcttcttcttnnntattgtcttctttttcttcttctttttttnnnttatttttttattttatttttttccctaaaaaactaagtttaatggttattttatttttactttatagtacacttaaatagtaattttttattttttttttatattcttctaaatgtatttttttt

SEQ ID NO: 145736 - DNA, 793 bp, Cannabis sativa
  modified_base (382)..(387): a, c, t, g, unknown or other
tatgttatttaacatcctaaatacgaatttctaaaaaatttaaacacatataaagtttgagaaaccttacagtggttgtagcagaatttaatgactctttcggctcagatctctaagccttgtatcctttctgtagcagagtatcaccaatatctgagcccgattctccttctctaaaattcggattcttcacagccttacacactatgattgaggacttacttgatatgtgtgggcatgcactcaatctctaaggcttgaaattgtttgtgaagagaggctatagtgtttcaaaaattgaagagaaagaagaaggaagaggtctcatcaaacctagagagtaaactaggtttttagttttggaggcattagttggataatnnnnnnatagccttccttttatactattctctaatagggtgggccaattggagctggaggatttgttgtttgaacaggaggtacataagcagtctgaccggaggttgaagctgtagcctaagtttcgccataagccacttgggacgtgcaaaactcaaggtacatgtccttagcataacccaagtagtcaaagttgggctgaggattagccttccaaaagtcgaagaaaagctcaagaccgactatctctagagcattaaccttctctttcaacctcgccacctcggccaaaagctcctcctccttagcttccttctccccctccaccatatgaagaactgcccgaagagaagtcctctcatcctgaagactattcacttcagcaaataaggtctcgatggtctcctcaaga

SEQ ID NO: 145737 - DNA, 508 bp, Cannabis sativa
aataataataataacaacaatataattgtatcacacttaatataccaaataccaatatatgtatataaactggatattacaggtgattggaactatgcactttataaacaataagagaatgataagtaatgaatttaaatttgaattgtattatttttttgggtaaatggcggcaaaaccctcaatactttggttttggtttcactaaactcccacaatccaaatttctgcgggtaaacccccaaaactaatattctgttagcaaaaacacacttcatttcccctgaccccgttatttgcttacgtggctcattccaagtaagcaacagctcgccaggtcataaattattatgacgtggaaattaaaaaaaaaagattaatatttttttgtttaactaatggctaattacccaaaaataaaaaacaaaaaattaaatgaaaaaaaattataaataaaaaaaaattctttttaatttctttcttttttttttcttttctttcttttctt

SEQ ID NO: 145738 - DNA, 777 bp, Cannabis sativa
attgaattggatgaggaaaaaaaagttggattggatcggatgcccacccctactagtaagcttccttttcttcaagaggaacatagtggaataggagaaaattgcattgcgttgtatttgtataaacaatcaccgacaaaagagcctaataaaatggactcgtggactaaggatgcctgaaccacgtaaaaattttttgtttgttatcgcattatttatacccttattactttcttaagctatagaattattcggttgtcgaaaaactcggtaaacaggtgagactccagatttgacagggtccttaagtttattggatgagttgttatcaattgaagttgctctacacataggatccttgcttcttcttgattgaagggaggtggcgaaaatgggttctaatgagacctttatcttgaaataattacataaggtatcattttttgtaaaaaaaattatattttacgtttaaagattttttttacatttttacggtttttcatagaaataacacaaaaataacaagaagattacataaaactaacaggttaataacatccaaataatattaaagcaacaagaaaaaaataacatacatataacaaataatcatcaataaattaataagagtacaatattaaaagaccacattatctgtaaaaaaaattataaaaatatttaaaattccgtataattatatttttttatgtatatattttttttattgttgttatatatttgtaaaataatttcatttatctttctagaccgaaatgt

SEQ ID NO: 145739 - DNA, 827 bp, Cannabis sativa
gatcacttcatttgggtcaaacttcaaatagcaatataccaatacatatgagcccatattgaggattttaatctaaaaatctctcacttgggctacatatattttttgatagtatatgaccttataagtgcttaactattgttatcataattataagtgtttcaaaataatctcgtccattgattatactaacataggatcaaagcggcttttgcaatatttagcatagcttaacccattaatggtcacgtatatcaatataactaaatgacataaatcaataatggatgtgtaacatgaaaattacatgcaaatatgaccttagcatgcctattttcaattggtcctccttaattgagatcaatggattattaattctttctaaacttatacttaaacctcaatagaaaaaaacattaagagtactcaaagtccatactttatctataaaattaaaccataaaccataaacattcaaagtctaaatcgttgaatattattgtggttcgaattaaggaatatttaaggagcacattcaaggatggcataaaaatgcggtttataataatgtcagatgtaattatactagcagttgggttcctcctttagaagaaaaatttaaattgaatgttgatgcatccattgataaaaactcaacaactattgatattggagctatacttcaaaattcagatggaaatataatagcacgtctttcaaaaccaatattaggttacttttcagtggttcaagcggagagtattgcgattgtgatggctctggattggattttttctctaggctatactgttcatatagttgaaact

SEQ ID NO: 145740 - DNA, 573 bp, Cannabis sativa
agtcaaactaagaaggtagctggtgtgctagaggttgatgccattacaaaactgacaactcaggttgaggccctaacaaagctgatcgcaggcaagccaaacaagcttaagtggtttgtgagatatgtggaggtccccatcacttttctgagtgtcaagcagatgtggatgattttccaatggatgaagcaaaagcaaatggaaattattctcagaacaacaacaacaactattggttcaaccaaggaggtaacagaaggaacagtgggttctatcagcaacaaaatctgaaccagacacaaaaccaacagtatacttagcaacaaacctctggtggaaattctagtttgcaaacagatttattgttacaattcatgactgaaactcgatcttccattaaagacttgcagactcaaatggggcaacttgcaactcaggtagcatcccgtcctcaacgaaatttgcctagcacaacagaagtcaatcccaaagaaaactgcaaggcaattaccctgagcagcggtaagaaatatgatgggcctaaattgacacaaccagtagatgaggagatta

SEQ ID NO: 145741 - DNA, 886 bp, Cannabis sativa
  modified_base (826)..(828): a, c, t, g, unknown or other
tatattaataagtaaatctgataatattgaaatgtgttttacttagggcataaaacccaacagccactacttagatgtgttacacaagaagaggaaagccgaggaaagcctatcaaagaaaatactaaggcaaggatatttctggccgaccatgagtgaagattcaaaagcctatgttaagaaatatgataaataccaaagattttcaaagataccacgtgcactgcccaacaaactaactcaaatgcaaagtccttggccttttgctatttggggaattgacctaatcgaacaattgcctaaaggcaaagggggagtacagtatgcagtggttgtagtggattatttcactaaatggacagaagtcgagccattagtgataattacatctaagaaagtgttagactttgtggtgaagaacataatatgtcggttcggactcccatacaagatagtctcgaacaatggtacacagtttgacagccaattgttcaccgatttctgtgcaaaccatggaatcatgaagaggatctctacagtggcacacctttaaccaaatggtcaagtcaaagcagtcaataagacacttaaagatactttgaaaaaatgacttgaggaagcaaaggggaactggccggagaaactactagaagtactatggccttaccgcacaacttaaaaaacagttatcggataaactccattcgctatggcctatggttatgaagctatgctacccgtagaattagaacctctgtcctacagaagattgacctatgatcaagagtagggttgttcatccaatctaatccgcacttttttggtnnnacaacatccaatctgcactaagtgcggatcctaaattttagatccaatccaatccgca

SEQ ID NO: 145742 - DNA, 653 bp, Cannabis sativa
ataatatgctttcttttctttccttaaatgatgatctcgctgacgaattgcatcaggatgaagatcaccagagcaaagtgaagcacccctacaaccaaacaatccagttccattgaatcttacaacgcaggaaagacctgggactcaagcacccctttcctccctcaatatttcttattcgttaaatttcttataaaaataataaaataataataataaaaaaaacacttccttaaattaagaaaaaattcatctaatctcctcttaaaattcaaaattacaatgtagccccctcataagaaattctatctcgtgttagtatggacgtcagtcaactaagaaagaaatccttttcaactaccaatagtactcgtggctccaataaaactcaaagcaataagaatcacaatagacttcagaatagtagtaactatttaccatcgatccagtctctgtattgtagcttgaccagagaacgtagcagtaatttcccaataaaaaatttagtcatttcgcttgattattaaactttattagaaatcaacacttatacaattttgaactttgtactcttctggaggagaaaagaaaacacttgctaaaatctcaaaattagcaagctacattagaattaggtttaaaaaaatttacaa

SEQ ID NO: 145743 - DNA, 616 bp, Cannabis sativa
gtgctttcattgagagaaggatcgcaaatcgctcttttcgacattcaacacgatggtgcaaactcttagaggcctgtctgacccagcaaactcgtagacactggattcgagattgcaggacccagggagttcaagggttccacctgctatcaatcctggacagacaggaagcgtggtgaatggtgaaagagctcctgttactgaaactgcgcctggtgtgcaagacactgggaataacagttccgcacacagctagggcattcataacacgaatgttctgcctggaaccaacgcctagacgaccatcagggacgcaaccaaattgtaaaatctccgtgctgcgctcgaactcatgcagagtcatagcaacactctgcatcatgatcaggatgaactgcgtgctgtagtgaatctcgtgggccaagaggtaggcgggcagaccttctccgggaattcatcaggaggagccatacctgacggatccaaccagaataaatggagttattatgcctgtcaaccaagtgaatcaaccgcaaaggcaaccaggctcttctgtgtttagataggctgggagcgacccaggacctaagggacgatctaaaaagaagaaggggaa

SEQ ID NO: 145744 - DNA, 848 bp, Cannabis sativa
ttaaaataatttaaatttatttttggtatgtaattacacagtgtaattacacccaattctcatggggtatgagaattggagagagtaattgaggcctcccaatgacctctaattatatagttaccatgtaattacgtggccacacaaacacgtcaaactatgtaattacctccaattacatctaattctaattcccaggtggctttccaaacgcgcccttaaatatgattaaggaaagaaaaacctgaccagcaatattgccaagcaatgacaacaaatcttgccttctttggtaaaaaaagctaggtgagaatttatgtaggagtaggcttatccattttaatatataatgttgtgaattcttctattagtgatgcccttatataccaaagttttagaagaagctctttattgttgtcaatttttttcaagttttttcattatatatatcataaaagttaatttgttcattttttttagttgtttcaaacaaaattcatcaatatatatatataagaattaatatgtttagactagggacattaattttgttcatatggtagtgatttttttaaagtcatagatatttatctaataatgagtatatgtataataatattttacatttaggtgcattagattattttttattatttaataatatttttgaaatacatacatctttacaaatcaattaaatattaatattctcactcctctctcctctttatttatctataccttttttttttcatcttctccatttattttttattcaggtttcttcttctttctcctctttatctttcttttcatctcctctcatgattcttttttcaaatgaaatg

SEQ ID NO: 145745 - DNA, 561 bp, Cannabis sativa
  modified_base (38)..(38): a, c, t, g, unknown or other
  modified_base (68)..(68): a, c, t, g, unknown or other
ctttattgtcaacgcccgaggaatcgaagccaatccanaggaatcgaagccaatccagagaagattcnagccctcctggatatgaaattgccaacaagaatgaagatagtgcaaagcttaactggtcggatcgccgcactcaacagatttgtttcaaaatccacaaacaagtgtgttccattcttcagcatcctgcgatgaaataagcaatttgagtggacagaggaatgtgaaaaatcttttcaagagctaaaaacgcaactcgcgaaacctcctgtactctcgaaacctgtagacagagaagaatttaagatatactttactgtaacggagcatgtcgtgagtgttatatcgatcagagaggaaaacaacacacaacatctggtctattacattagtaaaagactcattgaggccgaaggccgatacccattgatagagaaactcacctactacttgattcaagcaataagaaagttaaggccctattttcaatctcatcctatttgggtgtacactgaccaaccgttacgccaaaaattgcaaaagtcggacgcctct

SEQ ID NO: 145746 - DNA, 745 bp, Cannabis sativa
ataaaatcacacacgtggcgtccctatagattaaggcgttacaaaaacattgaaacataaattaaaaataaaactagttccataacaaaatacttcataccacataatgcctaataaaactaattataattttttttaaaaaaaatagggatcaattatatatgagacaaaaaaattagttccgtaaagcaactaagataaaaactcacgcacaaaaatcaattaaataaaataactcaaacaaaaatatttattcaacatgctccaacctaccaaattattacactcataccatatccaccccgaaaatattcatttattatgttatataaccaattctactttagttataatcggtttgagttatttcctattatttgtttttattcattataacactgttatagaaccgattttatttcaattataactggtttaagttattttgtgttatttatttttattcgttatgttacagaaccggctatatttcaattataactggtttgagttattttgtattatttatttttattcattatattttagaaccggttctatttttgtttatttctgagacatctaacttttcggcaacgtctctggcgacgttttggcgacactaacttttccggtgactttttcggcaccgatatctttttcggtgtcggtgactttttcagtgacttttattattgttttaaaaatatgggatttcatctttcttttacaaaaatatggcata

SEQ ID NO: 145747 - DNA, 565 bp, Cannabis sativa
  modified_base (259)..(266): a, c, t, g, unknown or other
attgagtggtgttcatgcaagaatcgagaggatctttcatgagttggatgagttctacaatcaactcattgatgaacatcttaaaagaacaccagaagaaggaaaggaagacattgttgattggctgctatgcatagagagaagtgaaaatgaggatgaacatttccaattcactagagactgtacgaaggctgttctcaaggtaagatcataccccttctgatttagaaacattaaaattagggtaaatactattttnnnnnnnntgttttgtaaaagttactaattgaacattttattttgttaaatgacaaaatgaaccatgtattttctaaaatggtacaaataggaccctggattgattttttgtcaaaatacaatttaattataatccgatctaaacgtaccatgataaaattgtttacattttctgtgtgttcgtattaagaattgtgttcaagttggttatattacaaaaaagttgtccaaaattaagttcaaggtcctatttttattattttgaaaaatacaggatctattttgtcatttaacaaaacacagggtc

SEQ ID NO: 145748 - DNA, 905 bp, Cannabis sativa
  modified_base (605)..(616): a, c, t, g, unknown or other
gagagagagagagagagaaccccaggaacggtctgacctgggtgtggtcagagaaccactaaggtggcctgtggtggctgcctaagggttttgaaaatcctagatcggaactaagagaaagagaggagattgagagagagagaaaggagatgaacagactagaaagaaaaaggaaaaaaaagaaaaaaaaatttatggaaaagaaaaaataatcatattttgtattttattttttttaaataaaaaaactaaaataataaaaaaagagaaattttttatttttatttaaaatatttttttaatttttttaaaataactttttacgtgaccaataaaattgtatcatgtgtacatcatgtccacataaatgtacacgtggacaatctaacatgacacttaatacctaaaataaatagaattttaaattactaatataacacgagtatttgaagttttgatgctaaaatttaagttttaaaaaattaagtgcaaacaaaatgaaactattggaaattttactgcaattaattcttctgtataatatatatagaacacttcttaatgagtattagacattgatggttactaaacaaatttaactatannnnnnnnnnnnaaaaatattaaactattaaattttcatcagataatgaataacaaaacagaaatttgaatttatatgtttaatttaactacttaattaaagaaaacatcaaaaattactttttatttacattatattaaaaatatgttcatataaaaatatttaagtcaaactcaatttttttttattatttttttgccaaaattatttttttatttttatttttcaattgatagaataatctcagtttatataatgtgaaaataaaatttttttctaattaaatagaaaaattaagtat

SEQ ID NO: 145749 - DNA, 652 bp, Cannabis sativa
  modified_base (291)..(291): a, c, t, g, unknown or other
tgagtagatctaagatcctgggaaaataattcccaacaaagtgtccggtacccaatcggaccgtaggatcgttcttatataccccatagttatgttaggtgtacatgatttacaacttattgcaacgatcgacctagacccataactccattgtcaacatgaccgaataattacttagtgcactatagctttcgcagtgaacgattttgtcgatagtgttcggtacccaatcagaccgtaggatcgttcccaaataccccataattatgtgaggtgtacatgatttacaanttattgcgacgatggacctagatcaataactccttagtcggtttgaccgaatagttactttgtccactatagcttttgcagtgatcgactttgtctgatgtgtccggtacccaatcaggctgtaggatcgttcccaagtaccccataattgtgccggcgaaaaggttcgcgccaatcctcagattggcgccaaaagttttaccggcgctatagatgcgccggaaaaactatttgcgccaatctaaggattgacgcgaacattttttgagccaccttttgccggcgcattactgtgcggcaaaactttttttaaaaaaaaaaattaattaaatggttaagttgcagctatttcaaccatttg

SEQ ID NO: 145750 - DNA, 529 bp, Cannabis sativa
  modified_base (49)..(50): a, c, t, g, unknown or other
tctttagcatacttttgctgacaaagaaataaaccttccttagttcggnnaacttctaatccaaggaagtgtttcaattctctaagatccttcatttaaaagcgtactgataggttcacctttgtttgaaatatttctgcgtcatcatctctaatgagaatgagatcatcgacatatacctaaacaattgcgatttttacttccatttctttgacgaatagcttgaatctgcatgtgccatggaatatctgctatatactaagaacttggcaatctttccataccatgctcgtggagcttgctttaatccatagagcaccttttcagtttgaaaacatagttgggatgtgctctatcctcaaatcctcttaattacaacatgtatatctctcgatctagttctatgtagaaaggcgttccttacatctatttgccatagtctccagtctttactagttgcaagtgctaacagaacccgtattgttataatcttagagactgggctaaatgtctcgtcataatctagccc

SEQ ID NO: 145751 - DNA, 1023 bp, Cannabis sativa
  modified_base (394)..(407): a, c, t, g, unknown or other
ataacaatcacaacactataagtgatgcgctaaatcacttctcggggacttaaactaaaaactaaaagtttccctatcgataaaaagcatgtccatgccccaaatagcataaaaacgagaaaatctagggttcctgaaaattacccaaccggcagaccggttgcccaaccggaagtccggttttggaaatttcagaaccccatccggaattctgaatgcacaaccggaattctggttcctcgcaagaaactttcaaaaattcatactttgctcaaatcaattccaaatcatacaaaaacttctagacctgttctaaataccctaaagaacaagtctaaagcaacaaaaccatccagaaatctcagataacaaaaatgccatgtgagctccaagnnnnnnnnnnnnnnctcaaacttggctaaagctcacaaacaaccatttatacttgatttaaactacataaacatccatttagaaactgcaaaaaaacatacacaaactcatgcaacaatcacagcaactaatttcaaaatttctctttgaaaacttaagcttttgaatagaaaattcataactttaaacaacaacactaattatgcattaccagcagttcaattcaactcaaataacctagaataaccttagaaattaaccagaacatacagcagcaagaaaactccaaaatcaagcatgcaaaccattcaattcttccaaaattccaagaaaaaccaagaacaagttaaaggacttaccaacaacttgaattacacctagattgattgaaaaagcttgaaaacttaagaagaactccctgccctagccaccacaccagctgagagagagagagagagagaggaaaagagcctttgaattttctaatttttctaagtttagaaatctttgaataatgagagaaagcatgcaaatataacacttcatttagccaacaattaacataataaaacacatattttccaattactaagtccactaaaggacaaaaataacaatggggcaaaatga

SEQ ID NO: 145752 - DNA, 822 bp, Cannabis sativa
aagtctgctataaataggagagagacactcaacccagtagattatcacagtctaagcaagattgagctccaagagagctagagggaaaagtattttgtaacgctttatcctgtaggaacgccacgtgtgtggttttataaactagtttattactaataaagtaattaattattaaaatctatgataatattaagtgcggacatcataacgatatgaaactgtgtttcagagatccctgttgtaaaagttttacaaaaaggctaaatacgacaacaagttaaaatactaaattaaaatacatggtagatacagctcaaaaacaactcctgacaactcgacatactgatcggtaggatacatgtacatttgaggagaagaatgtcacatcatggctgatctatcatttctttaccttaacctgcatcatagaggactcgtgagtcacaaggacttagcaagaaaaataataaaagatactacatgaaataaccaataattcctttcactattataaaatgattaagcaataatattcaagcatgaataacataaccagccatatgcatggaaataaaagcaatcatatattgcattacctaattaggcaagtctgtttcataatctggcatcatacataatgttgttgtatcatccaatcagatgagcttgtgccacgatctggcaccaatgtatcgtatcatctaacaagaagagctcgtacctcaacatgcactactacaatctaagcctttagcttcccttttttcaatctaatttataaaaagggaagctaaagggggtgaaaatatctgcattgacatt

SEQ ID NO: 145753 - DNA, 1145 bp, Cannabis sativa
aaagaaagttcaagacttttttgggaagaacataatctgccggttcagattgtcgtacaaaatagtttcggacaatggcaaacagtttgacagctagtgcttcactgattttttgtgcgagctatggtatcatcaaaattttctccgtagtggcgcatcctcaagcgaatggtcaagttgaagaagtcaacaagaccctgaaggattcactaaagaaaatacttgaggatgctaaagaaactggtcggaggaacttcttgaagttctatggtcgtaccgaacagccgagaaaatggcaactggatagactccatttgccatggcatatggatatgaagctatgctgcctgtagagctcgaaccaccatcccatagaagattgacgtacaaccaagaagaaaatcacgtactgttggccaaatcacttgatgaaatcgaagaaaagagaaccacaaaaaacttaaagttgataacccatcaacaaaaggttgctcgatatttatataaacaactgaaggcttggaaattctttgtgggtgatatggtcctaagatgagtatttttaaacaccaaagatagcacggttgctgtactcggacctaactgggaaggaccatatcaggtggtcgaagttctcacattaggagcatacaagttgggtaagtatgatgaaaaatttcaacttgttctagtaccacagtattggaatggggaacaattaagaaaatactaccaataaagtacaaggtcgaatgaccacattaagtactaaatgaacatttacttttaagtgaatggcctgctcgacggatcacgcccaaaggttcggtgaaaattgaaaagtactcaggtcggatgaccatcatctaaagtacaatttctaatttctgcaatttttttttatttcaagttaagctaaaagatcggattagatcaaatagctcatgtgtaagttactatggtaacaaacacattttcgatcaataaatgaataaagatgtttatttcaaaattccaaattagtcgaaattactaacatgttcttaaataaccatccagttcgtacaaaaggtttggtcaaacccaaaaccccgaacagataaaaaagtatacttgcaaaaaataagtgaccaagagtcaaaagt

SEQ ID NO: 145754 - DNA, 731 bp, Cannabis sativa
  modified_base (92)..(112): a, c, t, g, unknown or other
  modified_base (321)..(321): a, c, t, g, unknown or other
  modified_base (420)..(433): a, c, t, g, unknown or other
aaggataaaatatattgaagggtggaatggtaaatttgtccctactcgatttagatcatctatagaagatcattgattattaggattataannnnnnnnnnnnnnnnnnnnntctatatcgtgaaacatatagaaaattttatatgattaagagtacaattttgaatctatagtggcacaaggaggaattaataagttagaaaatgtacttggtaaattctagagctacttattagaagcttgattatataggctcatggtccccacactagttaagacaatactgcttgtaagacccagttaattggttttaattaatcnattataattctaaaattagactcttatttatgaatttttactaagcaatggcttcattgtgaagaaaaaaggttttatggtttatttgttaattaagannnnnnnnnnnnnntaattaataaataagttaaatgaagattttattttattggaaaatgtggcattagtgaaatcaaagataaatggttgaaaaaatagtaaaattataactagtggggcccatctatatggccgaccattatagggttaattttgttattattttatcatttttctattccatataatttaaatcctacccctatgtgaagtagtataaaaggaataggatggtctcattctcatccaactcttataacctagtttacattctgtcagacaactagggtttttgagagcctccattcctt

SEQ ID NO: 145755 - DNA, 580 bp, Cannabis sativa
attataattagtttattttttttattttttaatatgtattaaataagtaaatatgattttagtataaaaaaatttattatagtcttttaataaaaacaactatttctaaatgttgggttggagcaacttcagtttttagctgtagcttctccaaaaattattttttgactgtttaccatatacatagttatcacagttttttcaaaagagcagttaaaagctgtgtcaaacgggcccttaaagtaatcaaatgctaagtaaagtagggagcatgattgaagcaaaaataataataatagctctttgatatgaaatattatatatatgaatgtccaaatcatccaaatcaatgtattaattatcaccataaatgtttaattatatatctctttatttcattaatttagtttctcattattctactcatatttttgtataaatagaggttcgcctcattggaataaattactaagaaattctcattctgtttctctttctcttttatcatctattttatattattcgtaattattttataacacgttatcagcacaaatctctgcccaagccccaagataaa

SEQ ID NO: 145756 - DNA, 880 bp, Cannabis sativa
aggctggaagaagacgggagaatcgtttcccgtctggtgataaaaaaggatccgtaccttgaaactgcagctgctgtggcagttcaggccacaacagagcaacatgcaaagcccgcatttgaggcgtagtatacttattagttgtaataacatattttgtatttcttattcaaaactgctttaaaataaggttgaggttgataattttttgttgtgaatcaaagacaatgttaaatatttttacaagactaagaataagtatgttaaatttactatgaagaactgagacaacgttagactttacaagactaaataccaaaaaaatatttttaagtaaacagaatatataactgtatttttaattacaaaaaatatacaatgtcaccataattacacatataatcagtcaacattctagtaaaacaaatcaacacaccaccgttcacgaaacaacttgatccggccttgtgtgatatcagttaatccacgtcgcatcatgagatgctccacatactcaatgcaataaacgctacaatcaccactaaatgcaacataaaatataaagttagtacaatgtaaagcatattttaataatatagtacgtttttatcgctatgtacctgattgctgccttcggaactaagtcgtgagtggctcgactcgcatgcatattcggaagcacgttgatctccttatttgctaacgccatgatctggttattaagtgaaaaatccctggttgcatggattagtgagggcaatagttcttcccaactcttcaagatgggtgccatggtggtccaatgacaaatgctagaatcacagtcgtacacattaattttccacagctctatgtcaacttcaactgtgacccagtgcct

SEQ ID NO: 145757 - DNA, 528 bp, Cannabis sativa
  modified_base (282)..(288): a, c, t, g, unknown or other
gggctgaacctctataaaattctcatgtatttatttacttcattatattacatatacatcatactacttctcgcttacaatctagactcactgtcgttggacaaaagcgaggtcaacaaaatccaaggcatatagttattcatgattatagtgttatcaacacattggaatacaattatgattacatgtttcaatgtttatatcttgtgatttgttagtacattggatttacactgacatgataatcaacgataaagcctacttacaccttggataagtgtnnnnnnntttccaggacattggtaaagtatgctaggatcggatgtatgaagtatacattgaactggatcgatattaaacttggataagatatcataaacttactgttaaatctatccaaatcaatatcggttagttgatcttaggtcaatagatcttaatcttgatatggttagatttgatctcaactatgttatttatgttattggagttgttcgttaaagttgaccaatagattggcccaatact

SEQ ID NO: 145758 - DNA, 1106 bp, Cannabis sativa
  modified_base (402)..(414): a, c, t, g, unknown or other
ttagagtacatttaatgacatttatgcgctcaattaaaaattttggcggcacttatatatctctaaattctaatcataactttctccatatttttattttaaaaaacacaaaaatatgattagctctttagagttgactgttgaggtcttaaattttaaattttgatggcaaataataattcctttttctttaagaaattattaattctataatataacattattttatgggaaatttacggcaaacgtcctcaaaaaatttacgttgatgcagattagttcccaatctctaaaaatatcggcaatagtcctcaaggtcacactttttatttgtccgttaatcctaattttaactgaaccgttttcttgccacatgtcaaaatattattggtccaaattatnnnnnnnnnnnnnaaaaataaaaataaaaataaatcaataaatacattatttaaaaatgatttttttttctttttctttcttttcttcttcttcgtctgtcttcttcatcttcactgtaaaaccgattcacccccaacctgctcccatcttgtcatcttcttcttcgtctgtcttcttcatctttacggtatataattttgaatgggtgtataattttttttatcaatggcagcagtggaaccaaacagacacccgacagtggaggaggacccaaagagggacggagtagacccaggcacgaaggatgggttcccaaagagaggtgctgaagagggagaagaagatacgaagccaaacggagacagagcgggggcgctagggtttgatgaagagagaggagaagatccgaaagaagaggcagtgggagcagaggatccaactgaaaatggagagtttgatgagaatgaggaagaagaggaagaagaagaagggtttgagaatgagaaacccgaagaagattgtgtagcggcggcaggggcggaggagccgaaagagaagcctgacatttgtggattcgtggatacgtttgtggttttgaaaggagatttcagggtttttgtttacatgcttcctgttggatacatttgtggcttttgtgttcgctgtggatgcttggattgccatagttgattcgaggaagagtg

SEQ ID NO: 145759 - DNA, 1069 bp, Cannabis sativa
  modified_base (799)..(802): a, c, t, g, unknown or other
tagccatattattactattttgtaatttttaagttaaagaactcgtttttgcgaagtgaacccgaggttgaagatgaatcacagggggctcgactattaatggttgagatcgactatgtcagttgagatggtgattttagtagagctcgactatgttagttgagattacagttttagtagagctcgactgttgtcagtcgagatgacagacgttacggtagagctcaactagatttgatcgtgatttatatttttaattgttaaactttcatcattgatgtttgctaaaagagtgacattcaataaacatgatagttctaatagagctcaactagctcgaccaaacatggtcaagatagtgttaatactcaattattgttaaactctttgatggacacattgataacacttgattgaaattagttgaaaattgaatttgttaattataattttaacatcaatatattttagctattttttaatatcaaccatatatttttcatacataaatgactcgaatagtaatctatgttcagtatgatggggagtggaaggatgaacggggatcgtataagtgatcgccaaaaaataaggaagttatatatatagttatcgataatttgagcactacatttgagatgttattggataaattgtataagaagattggagccaatcaaatttataattattaattaaattttcaaaaaatagctcaactgagagtagttgagctcgactatatatggttgagattagtaaaaattataattatatgactcgactgtaattagtagannnngaccattcatggttgagattcataattattaatcaaattttgtaaaggttagaagtcacaatagatattatacaattttgtaaatagattaaaattatcaagattattatagaatgtaaagaatgtagcaatacaaattataacatttataaaatatatagttttgtctaaattaaatataaaatatcaatattttagaaacacaatttttcctaaaatagattaaatcatcaacattattatcaattttctttattagtagagaat

SEQ ID NO: 145760 - DNA, 520 bp, Cannabis sativa
tttaaattttttatttcaaatttatagttttggtttttaaagtggttgtagcgttagttgcaataggggtttctatacgattttttgtttcaatttaggttgcagcgctagttgtaataggagtttctatataaaattccgtaaaaatgcaaaaaaaactattttaaactgtaaaaataaaaatgtccctaaaatttattagttgtcaagcaatatagtactttacaaattacataaatagagtagcgagagacaaagagactcattaacactcaattttgtgataactcgtttattacattcttataataagttttcttttttttttattaatttttgtgaagaaaaatactcaatgacgtcttcttctgtgagaggttcaagagtagttgtttgagagttgttcggttcggctcaatgacatcctctattttagatttttattttcatttattaatttactattattagtttaattccaattaatatttttatggggttagaattataaggagttcat

SEQ ID NO: 145761 - DNA, 544 bp, Cannabis sativa
  modified_base (339)..(339): a, c, t, g, unknown or other
attaaagaataagaatattagacgaaaagtcaaaactcagaagtttgaaattttcgtgagttagggcaaaaatattcatgaagcttagaataagcatgatgaatgacaggcgttgtgcagttcaagaaacaagcattatgaacgatgaaatcgcatgaatcattacaaaggaagatcgctgagtttctaaacttagggtttcttacatatcttctacagcgatgccaaagttgcattcaaaaaataaatgtggaaagtaaacataaaggaaatcgagaacttactcaaggatcgaacgtctggcttcaagttatgccaagctaaacgagcagtttttgngaaaacacttcagcaaacttgaagctaaaaatctctcttttcgctctgaacttacttagcaaagaaggttagtgaaaatgagtttgtgaacaaatgctcactggtatttataggcaaacaacgaaaaggagtaatcatttcaaaaagaaccttagatgcctcggttcccccaaaagcgaatatgggaaatcaaaagcaatcaagt

SEQ ID NO: 145762 - DNA, 616 bp, Cannabis sativa
  modified_base (561)..(565): a, c, t, g, unknown or other
ttctttatttctttcacatatctcttctgagcgttattgctttcccctgcaatatgcggccctcccgaaataaccaggatgtcctctccttccataagaagggattgtaacccctggttgtttggattattaggctaacggggctggttgtatccctggccctatcttctcacatagtacttaaaatggcctcgagcaatgagactatctatctcatctttcaactggcaacattctttggtcgtatgcccgatatctttatgaaatttacagtatttgtttggatctcttttgcttcgcaaattcctcatacgctcgggtttaccaaaggctaccttctactcatgtgcgaggtaaatattttcccgagtttcattaagctcggtataaatagtatacaatggcacatatttgtcatgctttttttgtttctttctatctttcgacggttccctacctccgtcctttcttttcggaccaaaaacccacgagttatcaattcttgtggaaacagtccctgctgaaacattgctgggcttacctcccgagcttgttttcaannnnntcatttcctttcgggcttcttccttccggatgaacacttgagctctctcat

SEQ ID NO: 145763 - DNA, 744 bp, Cannabis sativa
  modified_base (54)..(60): a, c, t, g, unknown or other
gaaatatggatttaaaacaatgaatattatttgtgtgttgatttggatgtgttnnnnnnngtttatgtgattatttgatgattgtatgtgaattatgaaatttatgtatgcaaataattttatttctgttctgcaaatattttatttggatttcttgtgaaaagttaagtaattttgatttttacataactcgattccgaaaaaaattaaaaaagttaaggtggtttgaaatttcgggttgaaactttgtcgaattggtgcatgacgcacgaactaggcctcggacaaggtgatgtgcatgcgcgctagggacaaaaagtgtctaaagctaatgccttctcgtgttcgaagcatccatgtccgaagctgaggctgtaatgcagcccctgcgcgcgcggaagaggctgccagcagcctcctgcgcgcgcggatgaggctacatgcagccttggcactgggacagggtgcatctcaacccaaaaatccgattcttttgggatttttcacccaatttcaaatttttcaattttcaaaccctaaaatcaaaataaaatattaattttaatatatttaaacttaaataataattttaagttaataatatttaatttttaatagattattattaattctttgatattttgaggtataaatttaaaagttgattattttactttttaaattattgttatattttaaaaatttgttactttctttaatatttatatgttatttaattataag

SEQ ID NO: 145764 - DNA, 839 bp, Cannabis sativa
  modified_base (454)..(460): a, c, t, g, unknown or other
aacgataaatttgtccctactcgatgtaaattatttatagatgatctttgattatttagattataacaatagataattaataacgtatctacattttgaaacatatagagcattctatataattaagagtgcatttctgaatctatagtggagtcaggaggaattaatcagttaggaagtttactcgataaatcttagatctacttattagaagtttgattttataggttcatggtctctgcactagttgagataatattgacttgtacactcagttaattagttttaattaattaatttgaattctaaattagactatatcttatttatgaattttcactaaagaaggacttaattgagaagaaaagaagttttagggtttatttattaattaagagactttgtgaggtctaattaataaataagttatatgataattttatttgataattannnnnnnttattaaataaatagatttgacatttaagagtttaaaattaaaatatgacatttatgaaagaaaaagatgaattattaagtaaatggcaaaattaaaatttagtggggtctgctaagtggccgacaacttaagtgaattttaagccattttatcttttttttttttaattccatataatttaaacctaaccctaaataaaagcctataaatagaacatggcagactcataacataagataactcttcataagttaaatttaaatcctggtaaaataacttccaacactaagctcccttaatgttttgctcattgatggtaatttatcttaacactaaaaattcagtcttaagttcaataggtaataacaagtcaataga

SEQ ID NO: 145765 - DNA, 1316 bp, Cannabis sativa
  modified_base (66)..(66): a, c, t, g, unknown or other
agacacaggacccgaccttagacttggaacccaggacctcactaccaggacacaaccccaaactcngacccaaactaaaacttaggactcggccagggacctggggcccaaactagaacaaaactgagatccgaatctgaacttgaggcttaaacaagacccatgatcaatgtttgaatccaagacccaaacccatacccgaactaggatccagacccaattttggacccataatcggaatcgaaccaggaatgggacgagaacccaaacctgggactataacaggacccacacctaaacccaaactcaacctgaacccataccgaaacttggacccagactgggacctgtgacctgggacctaaaccaagaccaggaccgggacctagaccaagacccaagaactggggctggacctaggaataaataaccaaactcggacccgagattcaggacctgaccccagacccaaaccttgacctaggacccaccccgagacttatgatccaagactcgatgcttggactcgacccgtaccccatgacttgaaagtagaaccaaaacgagaagcggatcgagacccaagaacaggaccaggataggacctggacctaaacccaaaattataactggaccagggcgcggactcggacatagacccacaatcggattctgtgtctaggttcgggtttgggtctgggtctgggtcgaggtttgagtccttgtgcgagtctaggtccaagtgtggatcccgatctgggtctgggttcggtccaggtctgagttcaggtccctggtgcgggtccaagtttggatttgggtctggatctaggtcctgatctaggtcccaggtttcgatcttggtctgggtctaggtctgagtccaagttcgtaccttgatccctatctaggtccgagtctgtgtttgggattaggtcccagatttaggtctaatccaattctcggttctgatctaagttcacgaccatgtctaagcttgatttttggtcttagtttgggtcttgggcttggtccgagttcagttctaggtctgggtctaggtcctggtcagggtcctagtcttgttacacggtcatggtctggcagttcttgtttaggtgctagtttcgggtcctgggtctaggtctgggttcgggtttgggtcctagtctaggttcgggtcctagtttgagtcgcagattcaaacaccgaccacgggtctgttccaagccccatttactggattccgagtcaagatctggatcactatcacgggtctaggtctggttctagtcctgggttccaggtccaagttt

SEQ ID NO: 145766 - DNA, 581 bp, Cannabis sativa
tcacgtcatccatttggtgagtgattaattactatccatccaatcgccaataaaaggataaagagggtgttgatagataatgggagttcaatgaacaacctttatatggaaacaatgaagaagatggagctcgaaaaggccaaattgaggccttgcatggtaaatctatgcagattcactggcgacagtatcgctagtcaaggtataatcgagctcgcattaaccttgggtgaggcacctctatcctccacaattacgcaagactttctagttgttagcctaccatccgcttacaatatattactgggtcatccagcattgatcggactaggggcagctagttcgatcaagcacttatccctcaagtttcaaacaccggagggtatgggtgtagtgcgaggcaatccccaaaatttggctatcattttggaggaggacacgtgtcaaatttggaagaatatgaatctaggaatggaacggtaagtatatttgaaaatagaataactcattaatgcggaattgacagagtatatttacaacttgctgactggaagatcttatgcaagataaagatatgccaa

SEQ ID NO: 145767 - DNA, 682 bp, Cannabis sativa
tttgtcttgagagatcttgatcttttttggtaagtctccaaatttagctctatgccaagattgcaagttggtggcacaatctgcaatattttgcagcaattgtgaagtcaggtttgccaaagaattatgccagttatttgcaataatggtagaacaatcatcttcatggagccatagcctttcaaatctaaatctagatttgaatttttgtgcagtaatagacgaaagaggctgagcagtaaccatgagggccctgtgatctgactgaaaaaagtcaagatgggaaacaattggaaccttaaagtcatgtatccaagaagagttaatgaattcataatccaatcgtttcttcacattggaaccacaagtattgttgttgtgtcaagtaaatctctcaccctcaaagatcaattcttgtaatccacttgcatcaatggtgtttcggaaatcatcaatttgggaatcattttttatggggcctcctaccttatctgtgtgggaaataatctcattaaaatctcccatgataagccaaggcagtaaaggggccgagtctttaagcttctttaaaagtccccaagtgaatttcctttgtgcaacaacaggagatccgtaaaaaccggagaagtgacaagtaggcccatcaagaagagctatgtaacaatcaacaaagtgccttcca

SEQ ID NO: 145768 - DNA, 774 bp, Cannabis sativa
  modified_base (393)..(412): a, c, t, g, unknown or other
gtctgtaaaaacctaaattcattaatttttcatctactttccagtaaaaatatttccagatcgaaataagaaatagttttacaacatatactacgatttgcaaacaatcatcatataagcaaataaaccatcatgaaaccatccaaatcagtacaaaatatcattttagttcatatttcatgaaagtaaattattaccatggatctaaggccagttgttggattatgttttaccaagatctagtttactacaatgtatattatttaacatcctaaatatgaatatttaaaacaatgtaaataaatacatataaagttttagaaaaccttacagtgggtgcaacagaatattaatggctccttccacacaaatctctaacccttgtatcctgtnnnnnnnnnnnnnnnnnnnngatctgagcccgaatgtccttctcttgattctggattcttcactgccttacacactatgatttagataccacttgatgtgtgtgggcactcactatatcactcaaggtatgaaaatatgaagagaggatggtgattcgaaaatagaagggaaaatggcttgggaaaaatttaactgaaggtgaattttcatcatctttaactgtgagccatcactatctacttataggcaaccacctaggtttaggttaggattttattagtcattaaaataatgaagaaattaaatggaaattcctttccctagtggttggccataggatgtttgggccacacttggaatttttccaattctaaccactta

SEQ ID NO: 145769 - DNA, 636 bp, Cannabis sativa
ggagagaaaggtaattatcacatatatatatgtatttatataactaaaattgtgtttttttattattttttatttaataaaataataagtaaattatttccatcaatggaaataattttaaattttttttgtataaaataaaatacttttaagttattttgtagaaagataaattattattcattaattaaatgtgggatataaaaagatttcaaaaataattttttttttaaaaaaaaagattacaatatgtaaggttgtttgacttagattttttttttgagttataaaagaacaatttaatatttaataaaagttaattaagtaatttacttagtggaatccaaaaacttttttttttttttttataaaagttatagatagaaaaaaaaggagaattttgtaatttatttttgggaagcccaaaaccacattctcctttttatatagttatagattatatatacatgtgtgcataaatatgatgaatataataatatatctaaaggaaattttatgttaatttttacaaaaaaatactttcacacgaacaagttttcaaaaatactgtatttttataaaatatcagtagaacacaaaacagaacaactcaaaacaacaatataacaactaaaa

SEQ ID NO: 145770 - DNA, 594 bp, Cannabis sativa
tttattttggagatagcaccatggccgttggttgaagttcaaatgtgttttttttttcttaccaacaaattatgataattgctatttacgataaagtgtcattttataattagttaataattttttaaaatatttattaaaattaaataagtggaacacgctattaaattgtatcaatgacaagattacacatcacaaaagtattaaacaccatacatgtcttttactatttgtctatttaatgattatattatatacacatcaaattataatgtaacatttgaaatgggtacaatgatatattatactcttatctgtttcggtatctagaaaataaatttagtctgattttttttttatgatatatacgttgcagttatttaagacatcctgttaaattttaaaaaattcgacaaaatttaacacgttgaaaatatggttcaaagaatctattttacgggtgacttttttattttatacgcgtgtgaaatagacggtttgaacatttaattctatattgtaacaaaattataaaaaattaccccctatactattttttattttattttttaaatttatcgtttgagttgttct

SEQ ID NO: 145771 - DNA, 1080 bp, Cannabis sativa
acatttaattgaaacaaacacaattaacaccataatttttacaagactcaaatgatagcttcctaactagaaattaaactaaaactactccaaattaagcaactcaacacatttttactactcccctcacaatattttcagcttaaaagcataaaaataaatgtataccatagagttatcacaccccaaacttagagtattgctcgtcctcgagtaataaaaaaaacagaaagaacaaaataataagaacaaaagaaaacatgacagcaacaataacacttgcaacagagaagatattgttcattcaagcttggtttagcgatgaaattgctctcagaattagatggaatggaagtgaattggtggtagtgcatatgctttgaacttgtgtgtttcaatcgagttttacatgctatctatgtccttaatacttgtcaagagtaattcaatcaataaagtgtacaaatgcttcccaccaacaccttgaatttctataacaactacccttgatcctcaagtttaaaaagtttgcttccataagttgaattagcgtaaccctctccactaatgtagcttagctttacatcctagatctaaaggactttcatagccttgtaatgtgaggcctaggtttaggtttggtaaagatgattcttttaggctcatgacctaattacctcaatctattaaggacttttcttttcctctcaaatgctcacccaaaatttcattctcaacccacaatgattgctcaatctaattccacttctcttgctatatgtatatactatatatatatatatttcgaattaactagataaagagagaaaaagcaacaacattttttctttgattaggggtggtacaccccaaacttagctttaaacttgcttttttttttctctcttattttatttaatactatgattgtacatatgtatatatatattttttgtttttcttttctgttttttttttcgtttttgtttttttttttgtttttttttaacatatctacatatagcaagagaaggattctattgttatgtgaatcaaaactctcaccaccccgaactcaca

SEQ ID NO: 145772 - DNA, 695 bp, Cannabis sativa
aacttagaattgcactctcacttagaatttatagccaaactgtaggtcagcaacctccgaatgtcattcccctgggtgagacggacgaagatccaacgatgaatacttcccagactgcaaatggttagccgcccaatccctggccatgagttccactcgtgggcctagcggtaggcgggcagaccttgtctagtaattcatcaagagaagtcatacctaatggttccaaccagatcaatggtgccattccacccgtcaaccaagcgaatcaatcgctgaggcagccaggcacttctatatttgaaagctgggggcgacccatgactgaacgaatgacctgaacagaatgaggggagtagatgatcagaatgttacgacaattgtgcagcccgaaacccgttctaaaatccttgctcaaaagatgctgacgtaattcaaattgaccaaaatgccgggtaggttagcccatccgtacaggcacagctagatgaactgaagaatatttttcatggcatggctgcacaaagaaacaatgatcttgagctggatcgagcacgcggaactcctttctcacatgagatcaatctcttgttgttgccccacaagtttaaaatgccaacgtggaagatgtacaccgggagagaagatcccctttcccatctcaagtacttcgaaatgcaaatggatttgcaagg

SEQ ID NO: 145773 - DNA, 722 bp, Cannabis sativa
gagtgaccggtctgaaaaaaaaaaaaaagtggtgagggattgaatccatggcctcatcaaatatatatatatgtacaagttgtcatcaatattaaatatgtaacgtttatatactatatcagtgtgtaaagttaaatggttatatattatatattgtaccccatatatataatccacatagtaattggattataaaaaagtaaatatcttagatattatcttaaattttagctgtctaacttaaatttaaatctgaaatagtatctgatcaaagataaattattattttccaaattttgaaaaatgataattaaaatatctgtcaaataatctttttattttttaaataataataaagagattccaagactcaaatttgtcataaaaactggtaaaattctaaatccatacaaaatggtacagaactctaaatgagctcatcaaaattaatatcaaagaggtcattcacctcacaaaatttcaaggaggtcattaacctcataaaaaatcttaaaaagagtaattttacctaaacaaatttgaaagtgcactaaacttcaaaggcataacaaattaaatggcattaaaaaaaaaagagaggtcattcacatcataattaggggtgtttatccaatccaatccacactattttgctcatagtgcattcgatccgcactaagtgcggatttcatttttttgatccaatccaatccgcacaatag

SEQ ID NO: 145774 - DNA, 654 bp, Cannabis sativa
cctgcgtaccaaacgggtcctaattatatgagaatctatatagatatcctagcggtgaataattaaaaaaaattaacattattagttttcatataatttttctttcaatagtatgagaaattaggtgtacaaacggactcacctgacatgtatttacaaaatctcttttttataatggttcatataacattcttccgtatatctcgatcattcaaaattgttcccataattgtatatcacccgttgtcatcaccgtatctcactaactatctatcattttgtctcaccaaaattataatattgtattaatagtttggagaggttttcaataattttcaaataataatcgtattggagtaaactaagaatgaaaccctaaccataaaattgatgacataaaaaagtgttattttatttaaagaatattaataaaagaatatgctcgataaatggagaggaagtttagagatagtaattctactaacaaaaagattagaacgcaacaaaatacaaatattattgataattgaaaacaatgggtaagaaattattacaaacatcaataatctaataaataatattaaattaatatatcaatagcagtagtggcggacccagaatttaaagtgagagggggcgtaaataaatttaaaa

SEQ ID NO: 145775 - DNA, 663 bp, Cannabis sativa
atctaacatcctaagtattaaaaaaatgatatataaacacattagggattaagaaatccttacattgatggtagttgaataatataactccttccataaagatttcaagtccttgattcctgtttgtagcaaagcattttcaagatatgaacctgcaccttctcctccttcgattgtgttcatcatagtcttccacaaaggcctaagtatcaccttaaatagtgtgggctgatactcaaatcacctttggaacaaaattttgagagagaatactatgtaaatttgaaaatcaagaaaagagaaagaagtgacattagctttttcaattctcttctctttttttatatagtattcacgtagggttaggtttagatgagatgggcttggaataaagactttgactgaatcttactcttaggactgaatatacatatgggctttagtgttaattttttgccactttatttcatttaaatgaaaaaatatatcatttcctattttaccacttatctcttctaattatttaaataccaattttatttaaataaacccctatttttcttttcttctaagaaatgtccaaacttggtaaaaattctcaaacaagacatatattttttttaattttaattaacatactaaatcaattagttgagtctacaa

SEQ ID NO: 145776 - DNA, 559 bp, Cannabis sativa
ccacgagcttcagaaaatagctcacgaatttttatctgaaggtatgactattgatgaacaatttcaagttgttattataattgataaattactcccttctggaaagattttaaaaatactctcgggcacaaaataaaaaaaaatcataagaaagtttgatcagtcgccttcgcatggaggaggaagctcaaaagcaagaccagaaagaagaggtgcttgttgttggaaataacaacaacactaacatatgatacactactgttctgaaacccaatggaaaagattttaagaatcaaaatcgcaaagcaattcctactgcaatagtcaacctctgactaataataacaatgaaaattagaaccatcaaaggtttcaaaataataggcaacaagtaccccctctggtttgttcatgtgttacaactgtaacaagccaattcatgtgggacaaaagtgtaagaataggtttagttctgctccgcaggctaacttgatagaatagcttccatttacagctatgatttcagcagccggacgcaaattactacgtgtccgatcta

SEQ ID NO: 145777 - DNA, 696 bp, Cannabis sativa
ctctaatattactcatgtttaattgttataacaagataataaaagtaagaatgtaacaagacaaagtttaggttagagttttcctttttatcaatttctcgatagtttcagatttggcttcttcaatgttttgatgatctttcttgtttcttgacgttatttccaggtgttgttgaatcttcttgcttccccgagctctgataccactgtaggaaacagctggcagttcgaaaatgccccctacacacaacaccaacgttcaaaaaaataagggtactgttgtcttttgctgtgatgcggatccaaagggaatattccctattcaaaaaactgatacccctttcttttacctactgccattaaaggcagtatatattcatcttttcttttgcatagaaaaccctagcaacataatattcttattccaaaaacctagcagccgaacccttcaacttcttctccttcctttcttttctttgaactgatacacaaccctagcagcaagcctttcttccttccttctttctctcttgctgaaaaacgcagcaagcttttctttctccttcaagctttgaaaaacgcagcaaccttctacctttcttcttccctccttcttcaagctacagcagtagcttcaatggccgaaaccatgtaccccttcaaaacctgcaacacatataaaaccgagagagagag

SEQ ID NO: 145778 - DNA, 703 bp, Cannabis sativa
tatatgtggtaccgtgggacatattgctgcactccgagaggtatattcagtagtagatgcaggagtagaaaatccaccgtgggttgaaggagataacttatcaattggaatttctttagaacaagatgaagaagcctggtccttaatagagagccttttgggagattgagaagatacaccagtgagttgcaaagagtgcaaattcatgttattggattttatgatatttgtggcatccaatacttgtttgcctttctcagaagaagtaacattggtaggggcagcaggaagatgtcgcgggtgctcaagaatcagattgattgtattgcgagccaggcgagtgagaaaaggccaaggaccctccttagaaaagtcttgtctgtagcgatcgtaactagatcttggaagggaagatccttccatccatggaccatatggcagatttggttcaacaccttcatccaaattttctaaaaacagagaacatttgtcaaaaacatgaccaatgattccgcactcgtagcaaaagtcaggaagtctttcataacggtaatcgatccatagttcatcattcatccaaggaaaggtaaccaattgaccacgtaaaagaggttttgagacatcaatttcaacacgcattcgaagaaaaggcccccacccttcatttagagaatcttcaaatacttcaaggaacttcccgatc

SEQ ID NO: 145779 - DNA, 677 bp, Cannabis sativa
atcaataataacatagataaatgatacgctaaatcactttccagggacttaaacttgaaactaaaagtttccctattgatgaatagcattgcaataccctgaacatcgcaaaaataggaaaaactagggttccaaaaattggcccaactggtagaccggttcccaacccgaattccggttctgcggggtttcctggggaccaacaggaattctggttccttcaggtccccctgaaccggaattcaaatttagtgcaggaaagattcaaataattcatatctcacttaaaacaaccccaaatcataccaaactttccagacctgttccatatatccagtgaacatattcaaggcaataaaacacaactacatgcactgaaacaaaacttgccattaaagagccaagcttgagttctaaaactcaaatctttctcaaacctaataacagcccacaattcaagcttaattcaacatactctagcataatcaaacctctgaaaaaaaaaaatactaaataactacagcaaccacagcagcaaaaacaataattcatccaaaatttcaatcttaaaactcaatgaactaaggaggaagttgcaaagaggtttaccttggcttgcattaaacttagagctgctggaaacttgcaagatttgaagaacaaaatcaaaccctagc

SEQ ID NO: 145780 - DNA, 625 bp, Cannabis sativa
acctctagaactcatccatactgacctatggggtccatcacacattaaatccaaagatggctactgttattacattctttttcttgatgactttagtcgatttgtttggatatatccccttacccttaagtcacaagctctagatgtgtttctaaagttcaaaagcatggtggaaaaacaattcaacctacctattaagagtccaagctgactggggggggagagtataggccgttttctaagtttctcagtgaccaaggtatatcattcactcatccatgtcctaaaactagtgaacaaaatgggagggttgagcgtaaacacagacatgttactgagatggggttaacactattagctcaatctagtttagacttcacctattggtggcatgctttccacactgctgcctttctcataaatagattacctaccccgattctccaacataagtctccatctgagtgtctttttggtcacactcctgactacaccatcttgaagccatttggctgttcttgttatccccaccttcggtcttacaacaaccacaaaatggactttagatctcaagaatgtgtctttctcgggtattcttcagtgcacaaaggatatctttgtgaaa

SEQ ID NO: 145781 - DNA, 930 bp, Cannabis sativa
atgaattatttatacattacaccggttgttcaataattaaaagaatagggttttacatgttaaaataaaaacttatcttatctcttatatattgacatgaaaaatagtaagagaacacatattatgttaattttgaatcaagtgggacaatgatagaaaaagattgtaaatataaaaaaaatttacttatatttagtaataacattgtttgttatttaatttatagttgttttaaagctgtaaacatttattacttttaaacatgttcaattgttactttttaaacatgttattttcatgttgtttgtacgttgatcgatttcagtagttatttatagatttcttaaattatatatacaattatttttatgtttatattgttgtttaatagttgttaacagttaaaaaatctattaacaattattgtcttttttctaaaaaaaaggaatataaatatactaatactccatgtagaaattaaaaatataataaaagttgtttcttcctgtactaaaagatataaacaaatttaaaagaaattataatgttcaatatctcatgcaatatacattagaagttaaatagaaaaaaatttacaaaaatataaaagcaacattttttaaaaatatgttgctcttcagtgcatacaaccaaaaccaaacacatttttcaatcattaatccatgcatagtagcttcaaccttgtcagaagacttttgaacatttttctttgacactttcaatgtatgcaactcacttcattttaccaaagaaatagaaatgaactacaagcttattcttatcaaatttgaagtttattatcacaagaaatcaagtcctgcaacagttaaaacaacatcaaaacaacattaaacaaactataaaataactttcttttatgatttcttttcttcaaataaatgaaataca

SEQ ID NO: 145782 - DNA, 677 bp, Cannabis sativa
aaaaaaaagcgtgtcacactaaatttgtaaataaaaaaagtttttagttactaagtgtaaatttctcattatttaagtacctatggttttatttgtcatttttgaataaataaaaattgcaaatttggttgagatttcaatattatgtgtttgtccgtgtatttgtatatggatggatttcaatattatctttaagtattttttttttttaaattacaattcaaatttaaactcattacacatattttttttaaaaaaaaattaatgtgtcatttatgttttactcaatccacatatctatttaaaaaaaaataataaaatagaaatttcttaaaaatttctattgtgatgctattatttattgtagttacaaaaaaaaaatattattattattattatttttgtaaaaaaaaaaaatgtgtaagatatttttaaaaaaattaaaaattattataaaattaaaactattacgattaaactaaaattataattaaaaactaattataaataatattatgttttttttttataaatagtacttaaattaaatatttttaataaaaaatgatactgttcattaaataacattagaaaaatataattatataactaaaaatatatataattaaaataaaaataaaaattataattaaatatatgtgtattacatataatat

SEQ ID NO: 145783 - DNA, 1011 bp, Cannabis sativa
  modified_base (114)..(116): a, c, t, g, unknown or other
  modified_base (957)..(960): a, c, t, g, unknown or other
cttgaaaaagccaaactaaaaccttgcatggtaaatctgtgtggatttacaggcgatagtgtcgcccgtaaatcgagctcccattaacattgggcaaagcacctttatccaccnnnatcatgcaagactttttggttgtcgaactgccatcaacctacaacatactgttgggtcgaccagcgctaattagactcgggttagttagttcatttaagcacttatcccggaattttagacaccaatgggagtgggagtagtgtgaggtgaccaaatactagctcgtgaatgctactgcatagagttgcagaacataaaggtcggtcaccagctaatggcagtcttggctgaagaaggcgagaagaaggatgaagatcttgatccttggattcaagatgaaagaaatttattgaaaccaattgaggagttggaagtggtttttctagatctaggaaatcccacaaagtttgtatatattgggaagaacctggatgaacaattgaaatagcagctaataagctttttgagggtgaaccaggatcagttcgcctggagccatggagatatgatagggatcaaccctaagattatctacaaccacttaaatgttgatccgaattacccaaccaaaagacagaagaggggacccttggattacgagagacaaggggcactcaagcaggaagtggataagttgttagttaacgactttatatgcgaggcattttgcccagatacaatttggccctaaaaattgctaaaaccaaatgagataacgaagatgctgactaagaaattggtaattaaacccagaaatacaacataacaagcatgtaagaaaattaagagaaaagtcacttactgtttggagttggtttttgggcaatggacggctctgcaatctgcaaatcaacgaacggcctgaagatccctccaaatgcttgaagtcaaaaattaaannnnatgaaactcgtaggaaaaatgttaatgacaatgatggcatgcaaggttttg

SEQ ID NO: 145784 - DNA, 658 bp, Cannabis sativa
ttggtcgcctccatcatgaatctgctgatgtatgcgcggagaggttcacctggtctttgcttgacttcaaccaggtctcccaagcgcaatggaagttggtgagaggaggagaactgtgcatggaattttgaagagaaggctttccatgaactgaactttccaggggccaacttgaaatatcattgttgggcggcctctaacagggtagcaggaaagattctacagcacacatcccctcgtaccacttgtaaatccatttgcatttcgaaatacttgaggtgggaaagaggatcttctcttcctgtgtacattttccgtgtaggcattttaaacttgtgaggcaatgccaaaagattgatctcgggagaaaaaggagttccgcgtgctcggtccagctcgagatcattgtttctttgtccaggcatgccttagaacatatttttcagttcgtctagttatgcctgtacggctgggctaacctgctcggcattctagtctgtttgaatcacgtctgcatctttctgagcaagaatttgagcacgggctcaaggctgcacgatcgtcgtgacattctgatcgtctactcatgtccttctattcagatcattccttaggtcatgagttgtccccaacctttcgaatacagaagtgcctggct

SEQ ID NO: 145785 - DNA, 901 bp, Cannabis sativa
  modified_base (627)..(628): a, c, t, g, unknown or other
acgaactcagtttgatgctaggatgctagtggatgaggatggtagcgttgaggaagaaagtcgttattagtttagtattattcaactctttaatctttctatgtaactgattttgtatttaaattggaaaggatagtctggatgacttaaattggataagtgtcagttagaaatgaggaataatggatgttagatattattttggtgttttattaacttattaaatctatctattcagtgactacataactgtggggatattattgttcttttatattgatgagtggtcatgatgttgttactaatattttcttataaatatatggtaattaatccattatttttaaattagtattttttgaaattaattaaaggatcatttataagttttatcttcctacaagggtcaaagtgtgatctttgaccacccaagttatggatattacatatctgccacgacctagggttggggtcgtcacagaaaaatggtatcagagcactgggtttaattacctcagagtgtgtcactaaatagcttagatttattttaaataataatagtaataagtatcttgatatttatatgtataatacatatttatattattagcatccaatcctcactanntgattagcttttggttctcagacctaagaaaattcctctaaaaggaaggaagacaagcagaacggttggagaagacgtccctcaagctaatggccaacctccacaagttgaattccctatgaacacccttctcgaagccttaagagcagttctcactcaacagatggatcctaccactcgacagagtcatcattttcagatctttcatcggatccaagtgcttgagtttgagggtggacaagatcacaaggtagctgaaaggtggttgaggaa

SEQ ID NO: 145786 - DNA, 1039 bp, Cannabis sativa
tgatatacaggccttcccagtttatattgaacactcttgctgttggatctcgtgatttgggtaagtttttatagtgtttcggtgagtgcaaaaattgagattttcatgttttatagtttttagaaattcattaaagattagaaatcatatttttgtcataacttttcattcaggtgtctgttttggaaattctatataccgtttcgaagcttccgacaagctctatgatatgatgtatgttaaatataagttttattttagtgtatttaaaccgcaaggtttgatagaaaatcctaaattatcttacgcgagtgttaagtagtattttgggataaacacttattaatttattattgttatgacatagggctcaggattaccaattgttctccaagaaggtcaaccaacatacctgaaccgaaacttgaggtaataaaagtataatgtaccccatggcatgatagattctgaaattatcgattgtttgattaggcaatggtaatgtaatgatactatggacataatatatgagctcacctgattaggtgatgcgatatacctggcgacgtaccaggcataggtacgggcgtaagtgacatatgatgagtaccgattgtaggtacgggctcacctgattaggtgatgtaatattcttggagacgtatcggtcgtaggtacaggcgttagtgatatgaaattgcctggttatggcatagattaaaaccattgttagttttcttcctgacaatatcaggcgtaggtacgggcatcagtgacatatgacaagtaccgggcataggcacgggctcgtctgattagacgatgcgatatattagtgccaagttgtggcaagggctcacctgattaggtggtacaatgatattatatatgatattgcattatgatacgggcttacctgattagacaatgcaaatattgttggaattattttaccaggatcttagatctacttacaagtatgttgattaacatcctaaatatgaacttttaaaacaattataagtaaacacatataaag

SEQ ID NO: 145787 - DNA, 771 bp, Cannabis sativa
  modified_base (357)..(359): a, c, t, g, unknown or other
tttgagtgatttaggttcaaattaagggctgtgtgtgtgttcagtttggggtcattttttgaagttaatttatgattatctttactgttttgagcttaattagagggttgttaggctatttgagttaattgaaattcaagagctcaagatggagctctaatggtgatttcttggtttaagttgtttgttatacttttgatgcttgaatgagtttgttgggacacgaataggtatcctgaaaagttttggaaagtttggcattgaattgagttaaggggatcggttttagggttcccagcacagaaccggtcgaccggttctgggggaccataagaaccggtcgaccggttggtaccnnngaactagggttccggttgggaaccggtctgccggttgggactttttcccgaactctagtttttccttttttgtgttgtttagggttcgagtatcctatttatcgatagggttatccttagttttaattttaaatcctcgctatgggttttaacgtgtctctcattaaactttgaacgttatggtctagggccctgtaaagcgtcgagctgcgttagtatagtgttgtatatcagggtggttacggtgttaccaacacgagtaccagggggtacgtcgtgcatgtggtacaacacttagaaattcccgagagtacacttatggctctaccaacatgagtacagggttggtactttagtgcatttggtacagtggtcgtacttcccttaagaacgttcttatccatttggtgag

SEQ ID NO: 145788 - DNA, 556 bp, Cannabis sativa
gttagactcggccagacgttgccatagttggtgatttttcgagtcaactaacagtacatgcctagtgggatcatatgcatcctcacccctaagtacataatcacaagtattagtattggtttccgcattcccagtttctaggttttgatcatgaccacattggctttttcttgaacgtgttgttcttgaagtgggtggtctttgtgaacccattggttcttccctaggacgactatcattgttttgattatcatcagccatggataaacttctggttggttaggagggacttttctgagctattatcacgtaggctctcaatgaaagcaccaaactgttaacgtagatttttgttaactaattaataaaccttttttgtaatgaattaagcacagaaattataagagatttaagaagaatagtaataataatgatggcaccaggttttttctgtagttttgcaattcactctacatagtccacgagtctatcttattgaagatatttttggatatagaattatggttttacaatcaatgatctttttctctcaaag

SEQ ID NO: 145789 - DNA, 790 bp, Cannabis sativa
attgatgatctgtttgatcaactgaaggggaaaacgatcttgtccaagatcgatcttcgctcaggttatcatcagctaagaattcgagaggaagatatctcgaaaactgcattccgtacttagtatggacattatgaattccttgtgatgtctttgggactcactaatgccccggcggcattcatggatcttatgaatcgggtgttcaaggattacctggatagatggtgattgtgtttattgatgacatcttggtgtactctgaatcagaagaagagcatgaattgcatcttagagcagttttgcaacgattatgggatcacaagctatatgataaattcaaaaagtgtgaattttggtcatctcgtgtgtctttcttgggcacatagtagaaaaagatgggatcatggtggatctgacaaaaattgaagttgttcgggattggccaacaccaaaattagctactgaggttagaagctttctaggattagctaggtattattgtcggttcgtttagggtttttcaaagattgttgtacccttaacgcagccgacccgaaagaacctgaagtttgtttggacagatcggtgtgagaaatgtttcctatagttaaagcagcacttgattaccactccagtattaacccttcctttagataaggaacagtttatggtttattctgatgccttgagatagggtcttagttgtgtgcttatgcaagctagaaaggtaatagcctatgcttctcggtagtaaaaggagtacgagcagagttaccctactcacgat

SEQ ID NO: 145790 - DNA, 732 bp, Cannabis sativa
agaaacaaagagtgaaaactaaccgaaaatacgacccgaaacttagaaaaattttagcctaacataattccacatatttaatacaaataatattacagcaattgtattttatctgttcaggtcgcgtatttgataatttcgagccctatttttataatattatgatattgtagtagaaaaattattattcaactaacgtgcaacttaattgcaactagaaatattaaatgtgaatgtgtatctataagaaactatttgtctgtatttttttatcactgatctataattacttgtaccttaatagtaatatatggagaaacaattgttagcaaaatatttatgcaactgttatgaaacattaaaaattagaacagtattttcacgtacgtaactctatctacatgtctatttgtgatttaatatgaacaaatttaccattggaaatcttgaaaataacgaaaaatacactgagataaacatttaactatagtattgatgtaattttttttttttggattatacttgagttggattatttgggaactccattttaactttttgagatatgtatttcatgaatctgaaaattaaagtcaggacattagttttatgtgaattcaatcggatttctagttgaattttagttttgtagtagtttttctgcacttttttttatgaattcgaaatagcacatgttttgattgattttagtcgtcttctcaagtgaagtca

SEQ ID NO: 145791 - DNA, 742 bp, Cannabis sativa
gattgggcgggttgtaattatttcgggttatttcagtttgtaatttttatcggttgtttcggttcggtttgggcggtttacaattttttttgtacagcctacaaaaaggataaacattagccttggaaaaatcactctgataacgagcatacccagaatttgggagtttatccccaatcatttcaagaccataaggaaggtcggtattaattccattgtcaatctcttcaaggaaggaagtgttgggattttatgccctaaataaaacctattttaatataattagatttattaattaataaaagattagaaattattttatgttgcatggttcacatgattactttcacgattatatgcttaatgtataaattctattaaattcagaacatacatttattcatgatttaagcattgtcaacacagtggaatataatcatgattatatgtttcaaagtttaagtctcatgatttgtcagtacactgaatttatactaacatgataatcagcgataaagtttacttacaacttggataagtgttatgtcttttccaagacattagcaaagtatgctaggatcggatgtatggagtatacattggattggaccgatattgacagaaataagatatcataaacttaccattatatctatctaagtatcacttagttgatcttaggtcaatagatcttaatcctgagatagttaggttctgccttaaatgtattatttgtgttctt

SEQ ID NO: 145792 - DNA, 812 bp, Cannabis sativa
cttttccataactaacataattcaaataataaacaggcaataattaacaacaaatataatctaacaattagcacttactaaaccatgagtcgaatgagtcttcacaaacaatgtacatattatgccagtcttcaggatctttaaaccttggtagctctgataccatgttgtaacgctctgactttcagggaagccacatgtgtgcttttacaaacttattatcactaatctattagtttaggaaaaaggtgtggttaggttttaaacttttggttaaatttaaactaaaaacttccattataaaaatagttgtaatatggggatcccctgctaataaagttcttttaaacctaatatacaaaacagctattacaaaataaagattacatttccaaatataaaaaaaaaagtcaatcctgcttctaggaagcaaagacaccacagctgatatgtacactgctggatgacctcctgctcatggctgaatacatttgctattcttcttacctgtaccacaaaacactcatgagtcacagtgactcagcaagaaaagctattacataaaaaaaaatcaaggaaagtgatagcaggtttcattacaacagattatacctaccaatacgtcataccctttcaacatacatatacatctcaatatctatacgaacaaacttattacaaaattaaaagtgtttgtagccatatataatcaccaacctctgtgttcataaaacaccataatcaacaaccttagcgtctcataaaataccctaatcaacaaccttagtgtttcataaaacaccctaatcata

SEQ ID NO: 145793 - DNA, 621 bp, Cannabis sativa
gaagctaaagactttagcacaatgaaagtggaatgggttccttgcgtacttttgaattgaatcaacaaattaaacaaaatgacaaacccaaatccgttgctcataaaggtaaaagtatcgctttaaaagttgctgataatgaaatttctgatactaaatgtgatgatgaaatttctttattaaccaagaatttgcataaatatatgaaaaatatgggtaataaaaagaataactcaaaattttcgaagggaaatgcttctattaaaccatctgtgtctaagaaaaagggaagtcagtgcagggaatgtgaaggttttgggcatattcaatctgagtgtgcaaatactttgaaaaagagtaagaaaagtttcaatgtcacttggagtgatgatgagattgagagtgatgaaggaaattctgagaatgttgccttaacttctgttttgactaatgtgttgtgtgattcacaactgaaagaaataataccactaaacaagaagaatcagattctgatgattcggaagtctgtgaagaatctcttgctgaatcatacaaagtcatgtatgaaaagtggattcaggttactactgaaactagagagttgattaaaatgaataaaaa

SEQ ID NO: 145794 - DNA, 1529 bp, Cannabis sativa
  modified_base (603)..(611): a, c, t, g, unknown or other
tttgtgaaaacggtacacgatgtcaccggaaagttgccggaaaggggcggagccacaaaaatgtcaccagaaaaagtagcgaaccgggaaaaatgttgtaggttgttctccttgaggagctgagtttagtggtgaaaacctctcgtcaaatggacgccggaggtgactggaaaatccgttcaaagtttgaaaccccaaactttgacttgcgatcctaagctaacggcagcgagagaagcggcgccgcttggggggtgaggtcgccgacactaggaggtctgagtggtccggcgcgtgaggtcggacgatggccggaggtgggtcgctggagtggtggtggttatggtggtttgtgggctatcttttttgcattttgaagagagagtagaagagaaagatagatagatagatagataaagagagagagacgattaatgggggtgtctgctactgtttcttttgttttgaagttttttttttaaaatacatatatatcatgtaattatttattatatataatatatatacactcggtttgactcggtcaaaccgagtcttcacaacttgtattgattttcttgatctgaataaggcgtgcccaannnnnnnnnttccactacccaggatcgaccagttaggtgaagcaactgctgggcacgagcttatgtcatttatgggtgcatattctggatataaccagataaaaatgaatgtcccagatcaagagcatacaagcttcgtaaccaacatgggactttattgttataaagtcgtgccgtttaggctgaagaatgctagggcaacatatcagcgattggtgaacgaaatgtttgcgaaccagatcgggcggatgatgatggtttacgtcgatgatatattggtaaaatcaatagaaagcggggatcataccacagacctcgcggaatgcttcaaaatattaaagaagtataacatgatgttaaacccgaaaaaatgttcctttggagtcttctcaggctagtttttgggattcattgtcaatgcgaggggtatcgaagcgaatcccgagaaaatgaaagccttaatatacatgccatcaccgataaagcctaaggaagtacaagccttgttaggaagcagggctgcacttaacaggttcatttaaaaatcaactgataagtgtgtgctgttcttcaatgtattgccaggcaacaagaagttcgagtggacaaaagagtgtgaagtggcctttcagagcataaaaaggcatctagtgatgcctccagttttggcaaaaccaataactggagagacgctacttctctatttggctatctcggaagatgcaattagtgcaactatagtatgagaagagggtaagcaccaacaacctatttactacgtgagtaaaaggttatgaggggtagaatctagatatccccctctagaaaaactccctctgtgcgtagtccacacgtcccgtaagctacggtcgtacttccaggcacaccccacaaaagtgttaaccgatcaacccttgagacaagttt

SEQ ID NO: 145795 - DNA, 646 bp, Cannabis sativa
tagtcttctccagcgccggcgagctccaactcctcatacagttgcttttcacgcattattttgattggtgaagcttcctacagtgcttagaacctcaagccaaccataactcaccaaataataaggtccaaagtcgttgtcttcctcgtcgccggtgtaccattaaaaatagattccaacaagggagattttcatttagggccttaaagctttcattctttacgtccaaacgtcttctaggagtcccttaagcttaaacacaatcttattttaacccagaaatgactcaaacccgagattgctcaagaacgtgcttgaacgtgcatgagaatggtggattttgaaacctgctgtcttagcgcatttcgtcatgaccattagcttccttagattgtgcaaaagctattcaaagcgatcaaacaaacccagaaactctctaagtgtttcgatatcaaaatctctctttctctctctaagtttcacatgaaactctatcagtctctctctctgcgcacagcctcctcccttcaacttctttatgcgttctcaattctaaaattatctcataagcatcctatacatatattcccaaactctaatcttaaccctagattaataacttaaaatttttaaaaaataataaata

SEQ ID NO: 145796 - DNA, 588 bp, Cannabis sativa
attagttttaataatttattcaagcagccctcacctcagccaaatttctggcttcgtcactgttagggggtgcaccgtacaagcttcttatgatatatactactattaaatcagtaataatttcaaataaaataaaattaaaataaaaacttttttcaaatttgtttttaatcaatgtaattttataatgttgtggggtaaaagtggcatacgtacaaatatcacatgataggaatttcctatcaattatttaagaaagaacattaagagcaatagagtccaaataaaaaaaaacatagagaaaatattttgtattggataccttggagttggagagttaggtttccactttaggttgcaactcttaccaatttcttcacgccattttcacacactcctatcccacataatctacacctaattactacactcaaatccctccccttactaaccaactaacttggcatatacttatcacattaattagcacatttttataatgagaaatgttaaagggtaccagtgtgtctaacaccctcttatgtgtcaatatcgctattagtccaactaagtatcgagtctcatata

SEQ ID NO: 145797 - DNA, 515 bp, Cannabis sativa
gagttgtttttataccggtgccaacctcacctctcaatgcaatggttatttgttttcgaaatacaaagcaaactctctctaataagataaaatacaatatgaaatcctagagagatttacaagcacactagaaaataagaacaagtttggctcaagtttgtgagattggtgtgtttatgaaaagatgataattctttagcttagaacacttagaatgatattatatgatgaatagaagctcaaccaaccttaatttttaagtgaaaaataagtttatatagtgtaggaacaaaaactagtagtttataaccgttagcacatttttcaaaaagaatcttgggaaaaacggactacctattttaaaatggactacctatactgtgaaaaatggactacctattgaaaaagggtaggccaaaaattatgcaggttcaaaacatgtattttttggctctaaaacacgcataactctttactcgattatccgtttacaaaaattctaattttattctctt

SEQ ID NO: 145798 - DNA, 546 bp, Cannabis sativa
tttttccacgaaaataattttattttcattctgaaaatattttatttggattccttgtaaaaaattaagcaattttggtttttacgaaactcaatttaggtaaaatttgaaaaagttatcaaggtttgaagtttcgggtgcacaaggtccaatcgcacgaacgccagtcactcggacaaggtgacgtacccgcgcgcatggttagggtaggtcctgtctgaacttgtatacaccgccgacgtgacactgcccctcgcccaccagatgcttgaccatgcgcggaatggaggctgcaggcgccgagttttctcggcttaacaccttgcaaatgtcccatccgcgagcgcattgtggctgtttataacctctcgagggctgcacatgcagcctgggcagccaacaccccataaccgaaattttatgggatttttccccaatatcaaatttttcaaatttcaaaccctaaaattcaaaataaaaattatttttaataaatttaaacttaaatatcaattttaaataaatagtatttaatttttaatagat

SEQ ID NO: 145799 - DNA, 578 bp, Cannabis sativa
ggagatccggatcctaaccgaagagttgattcttggaagctgttgaatagggttgggaagatgtactcgggtccttgggtgattagcggagacttcaatgaaattttgcggaaaaaggagaaattgggaggccaaccgaaaagctttagatgaatgttgccttagggaagttgattttgaaggtagcaagtatacttggtgcaatggaagacaaaacaatctcatatttgagagattagatagggtttgtggcaatccggattggtttgatctttttctagcagctaaagtaacacacctggaccgtataaatttggatcattgccctcttctcctccaaagtctaaaaggaaatcaaggagagactcttagggccaaatggcactctcagtttcacttcgagagtgcttgggctagggatggagactgtgcggagataataactgagaaatgggggggaaaagcatatgtgccacggctagggagttaaaacttaagttggccaattgtggagttgctcttcaacaatggaataagattaagaagaaggagatgcatatgcagctgaaagaatgtga

SEQ ID NO: 145800 - DNA, 807 bp, Cannabis sativa
  modified_base (256)..(263): a, c, t, g, unknown or other
  modified_base (753)..(763): a, c, t, g, unknown or other
aaaaaaaaaaaaaaaatctgtatgtacattgtacagacgttttttctgactctacctaagcattatccaaaattattatattcttgtatatataataaaaatcaatcatatatatttatctatatatataaaggagatataagacggtgacgtgtcactctaaaatttctttaattctcttattttttttttaattttttattggctttataaatattatgttttgcaaaagttattaattggaccctctgttttnnnnnnnnataaaatggaccctgtattttccaaaatggtaaaaataggaccctgagtttaatttttgataactttttttttaatataaccaacttaaagacaatttctaacacaaacagatacagaaatataaacagttttatcataacaccgttagattggattattattaaattttattttaacaaaaactcagttcagggttctatttgtactattttggaaaatacatggtctattttgtcatttaacaaagcagatggtctaattggtaatttttgtaaaacacagggtccaaaatggtatttacccttatcattactgattttatcatctccaaagctttatattaattaatgggtgggcaatttagtaaaatcgtgacttttgtgtaggatccaaaatgtaaatttaatataactcaattatttagtaaatttagattttcagaaactaacttgtatacatagagagcaatatatgttgggttttatgccnnnnnnnnnnntccatttcaatgtaatctttatcttttaaatatcaataaagaaa

SEQ ID NO: 145801 - DNA, 589 bp, Cannabis sativa
  modified_base (561)..(563): a, c, t, g, unknown or other
atgtaggagctttcatttttattttctcgttttagtatacggtttctctacttaatgtagtacttctatttatagctgaattcatcccaatgttattcacgatggtgtcgtttcgtaaaacttttaaaaaaaattaaaagttaattttaaaagttgtcataaaaaagtatttagtaaaccgtcaaaaaataaatttttgaagaatttatgaataaactactgctaaaagttaaagttggtgcaactccaacctttagaaaaaaataatttaattaaaaaactatactaaatttattagtactaaaactatatttacttatttattatatattaaaaatataaaactatttaaaataaattaattataataaaataaataataattaaatttcttattttttcttaaaaattatattttattttaatattaacaaaactacatgaatttacaaattttcttatagtttctaattttttaaacatttgataaaatataatataaaatctctataaattatcattatcaaatgtatataaatttatattttgaaaaaaaaaatnnnaaatatatatataaaaaatattatat

SEQ ID NO: 145802 - DNA, 692 bp, Cannabis sativa
  modified_base (244)..(248): a, c, t, g, unknown or other
ttttaagtttcttgcaacttatttattaggaaattattttttaatttttagaatagataaatcgtggatgaatgatagaagagaaacaccacgatttcaagaagaatacaaaaatcttttagagttttgcctaagaagccacccccatttatcaatattggaacgataagtttagagcttattagattactatgtactaacttacattcctcttgttaaatgctattatgattattttatcttnnnnnccaattcgttgtgttgtttttgttgtattgttaacttatgaaattgggaaatgtcatagaaagagaaaaaactttgcccaatttttttataattttttaaatgtttcaacatttaaatcctattgaagtcataaaaaaaaataaatatatactcatcttttttataaatacaaacatataaaaatactttccttttaattagtttaaaatttttaatttgacagcttggcgacctatcccaatgttgtgagaagaatctctcgtagcgcttcgacaacagtggttaaatcaattacttccttatttataaatattgatcagtagtattttattgtattttttttttatacactagctagcaatttattatgtgtagtattttagagagatttttatacaatgtaaaatattatttattaattcaagttactaattatcattgtt

SEQ ID NO: 145803 - DNA, 597 bp, Cannabis sativa
ccccaggataaaacacaatccagtcgcgctctgtatcggaaatcccactgcactgtagagcaccgtcgaatacacccaaagatatttggtactgcagatggaattttagtatttatgaaaactgtatttttttttctgataagaaaagatgtattcttcccatcagttcaattgcattatatagacgaatggattgaaaaataataacaagaagaagaacattttctgaattgtggagtgagttggtttgaacgtgtcccattaattgatacgactaagtaatcagttttaattaaacacgtttcttaattaaattaaaaaataaaaaataattattttattaaataatttttctgtaaaaataatagagtgtcacaccacaccaaccaacccggcccagttcggatcggacggcgcgcgcgtgtgctcacccattcgcacaaaactgggtgccccttggggcccaaacccaaatgccaaagttgcattctatataccctttcaaataagggttcatatcccatgtgggactctttctacttcacacactctagaacactcctatattttgttaaaagattcatcaaagttccaaca

SEQ ID NO: 145804 - DNA, 2937 bp, Cannabis sativa
  modified_base (2710)..(2713): a, c, t, g, unknown or other
tcgagtaaataattaataataggtgtcatcaggtgtcatccatgttggagagctatctatcatctcgacgttttcagtttcacatatactcggatcgctcagcatctctaccggaactagattcaattcatccaggtcattctgcaaggccagttttgctaaggcatcagcattggagttttgttctcttggaatttgttcgattttaagcctttggcatggtattccccgaggacctggttcacgatcaactgcgaatcactatgacaaatgagatttttgactttcaatgcctctgctatctttaagtcggtgatcaaggcttcatattcagcctcgttattggatgcgtcaaattggaatctcaaagcatagtgaaacttaagccttttggcgatattaatattacccctacacccgaaccctattcgttggatgcgccatccacatataacttccaggtttccgcgtctcgctgatcaagtggaatttcaattgcagttataccttctatcaagaagtcagctaaagcttggcccttgatggatgttcgaggatggtatgttatgtcaaactgccccagttcaatcgaccatttatcaatcatcgagaagcgtctagttttgataaaacttgtctcaagggctgatcggttaaacttttatggggtgagcctagaagtatggtcgtggcttacgagatgcatggactaggcataacacaagtttttccagagggggatatcgagattctgcccctagtaaccttttacttacatagtatatagattgttggtgcttgccctcttctcgcactatagctgcactaatcgcatcttgcgagatggctaaatagagaaacaacatctctccatttattggttttgccaaaactggaggcgttgctagatgccctttttttctctgaaaggcgtcttcgcactcttttgtcaactcgaactttttgttgccttggaatatgttgaagaatggcacacacttatcagttgactttgaaatgaatctgttaagtgcatccattcttcctgttagggcttgtacttccttaggctttgtcagtgatggcatgcctattaatgccttgattttttcaggattcgcctcaatacccctcgcgttaactatgaatcccaaaaaatttcctgaggaaactccaaaggaacatttttctgggtttaggttcatgttatacttctttaatatcttaaagcatttggcgaggtctgaggtatgatccttgctttttattgattttaccaacatatcattgacgtaaacctccatgttttgccctatttggtttgcgaacattttgtttaccaatcgctgatacgttgcctcagcgttcttcagtccaaatgaaagtactttataaaaatagtcccatgttggttacgaagcttgtgtgttcttaatctggaacgtacattcttatctagttatatccagaatatgcgaccataaatgacataagctcgtgcccagcaattgcatccactaactggtcgatcttgggaagtgggaaacaatcttttggacactccttatttagatcagagaagtcgatacgagttctccaagttttgttaggctttgggacgagaataggattggctatccacgggggataaaatacttcgcgtataaaatcgttgactaacaacttgtcaacttcctattttagtgccacttgcctctcgaatccaggggcctcctttttggtctctttgctgggtagtttggatcaacatttaagtgatggtacataatattagggttcatccctatcatatccccatgactctaggagaattgatcctggttcgccttcaaaaagattattagttgctatgtgagctgctcgtccaggttcttcccaatgtatacacattttgcaggatttcctgggtcgagaataacctcttaaaattcccaaattggtttcaataggttaatcttgtcttgaacttgagggtcaagatcttcgtctttcttctcgctttcttttgccaagatcgtcatcaattgatgaccaaattttctatgctgcagctctatgcgataataatcgcgagccagcatctggtcgccacgcaccactcccacgccatctggagtctggaatttcaaagataggtgcttgatcaaactgactgcccctagtccgatcagtgctggacgacccaacaatatgttgtaattcgagggcaggtcaacgactaagaaatcttgcataacagtagtagataaaagtgcctcgtctaaagttattgcaagctcgattatgccaaggctagcaatgctctctccggtgaatccgtaaaggttcaccatgcaaggccttaatttggcctttctgagccccattttctttagagtctccttataaaggatatttaccgagctctcattgtcaattaatactctcttcagccttttattggcgagttgaatggttatcaccaatggatcgaagtgaggatatctcacgtttttctcatcttcctccgtgaatgtaatgggaggttcctcaattttcaccttcttggaaggttctggggcaaaggtcgacttctagttctttatctctttcacacatctattctgggcattattactttcccctgttatatgtggccctcctgaaataactaggatgtcctcaccttccacaggaataggttgtaacnnnnggttgtttgggttattgggcagatcgggctggttctatccctggccctgtcttttcacgtactgtttaaaatgacctcgagtgatgaggatttctatttcatctttcaattggcatcttttgtcggttgtatgccgaatatccttatggaatttacaatatttgtttggatctcttttgttcctcgaattcctcataggctcgggtttgccgaaggctaccttc

SEQ ID NO: 145805 - DNA, 774 bp, Cannabis sativa
  modified_base (683)..(689): a, c, t, g, unknown or other
aaaccgtatttttgtaatttctttttgttgtttttatgttttggtgaaataatctctaatattaattgcactacatatatatatgaacaaattttcattttagggcctgccttgaactaggtcatgattgtctcacctttcagtcggccatgtattacaattatgaatacttacctggtatgcagaagctctaatttgcaaaagtggtagcttgtaagagcccgcaacaagaagaaactgagaataattcatattaagtatgtcctgtaactgtggtcaaataaaagtattaaaagtttaagatgaaaaacaaaagaatatttaaatttatgaatagatgtaatcttgagaattagtaatgattatcatctcttttgctacaaacaaactgaaattatctcttaatttcacttctacatggtaagattttatcttaaataacaccaacaaccatgggttacattgatttgaaactccataaatctacctcaaagtttatgagccaaaacttccaaaaaataagaacaacatatcacccataagcttaatttttgataattttattttttaatataaccaacttgatggcaatttctaacacagacagatacataaaatgtaatcagttttgtcataacatgtctagatcgaattattgctaagttttattttgacaaaaaatnnnnnnngggtcctatttgtatcattttgaaaaatacaaggtctattttgtcatttaacaaaatagatggtttaattgataacttttgcaaa

SEQ ID NO: 145806 - DNA, 914 bp, Cannabis sativa
aatgtagttctataattataattttttttcttttaaattttagtatttttttgtttaatttttaatttaaatagttaattgtttatgttatttaaatttttaacttaaaaaattaaattaaattaattagtatatatattatgttatttaaaagtttatttttttctttttaggtttaactaaatatcatagtttttcttaaagactcattgtagagaggaatatgtatattgatatctcatatttttatgtatttatcttttatcttaaaagagatatttgaattcatctttatataaaataataaataataaaattttcttaaatattatattataccctacattctttaaaaaatgtattagtgtatattttctcctttattataaaagtataatttatgatgttataaaagtcccacatagcttataaatatgattagtgttagatttgtaacctataaatatatcactcattctttcttttactgtatgggtgattgattaatttaatcttacctcattaagtatacttttctatgatgaaacaacatctttgatatttggttaaatgaataaaaaaaacaactatttttttttggacatttatgttcacctttaattttttttttttttatatttctatataatacgattattcattatagagtttttatttttattttttttttaaatctcacatagcttaaaaatgtaattaatgttagacttgtatcttataaatatatcgctcattcttctttccagtgattaactaaatcttacccaattaaatacttggtaaaataaaccactaagaaaaacaaccaaaatttaattttaaatatcattatagtttagtcattctttggattcttttgttttttttttaaaaaaaataaattaaaatccatg

SEQ ID NO: 145807 - DNA, 680 bp, Cannabis sativa
tgataaataatgcattttacaaggatttagatctgttgataattgctacactctcacatctgtttttacttgtcattctgcatgtgaaaataccaatgctgtatatatttcgaaaaattttgttcaacattctcgtacaaaacacatgatataagacatcattttattagggaacttgttgtcaaccaaacattgcagttggaatatgttgatactgaaaagcaattggctgatattttcactaaggccctagattcaagtcagtttgactcccacagaaaatctttgggggttcgcattgtctaactcttttctttttgttctctattttgtacaaaattttgagtagttcttatcttggatctatccttctttcattcttggttgacaaaatatgtttatgcttttggatgataattagcttagtgtcttgtactcttcatacttttgaggttgggttaaaagattcaagttacttacatatgtgtgatcaggataaactaaagtatacatgtataaagttgagcagtttttgttttagtttcttgtcaggccccttgctggatcagagctacccatactgaggtgtgaaagtcgtcttttgagtaagctggaactttgtaattaagagttatgaagaggatgcactaccataaaaaatggctaccttcagtatggtg

SEQ ID NO: 145808 - DNA, 1011 bp, Cannabis sativa
aaaaccaacaaaaattgaaaataaccaaataattgccacggagcactaaagtcagacgctcttcattttaactattctttaatttataccaaaatttataggtcatatccccaatatgttcattagtaactctaattttaataaattatgtgaggttataattgatatttaattataaaaaaaaggtatttaccaattaaaattattttgaaattatatttagttaatatataataaaacaaggataattttcaacttatcccaaaaaaactctcataggaccaatactcttaggacctaacatcgtgagatcttacttaccccacaatatttatttttttgagattttacaaaaatactgtaaaatggagaaaagtttaaaaaatactataatatggaattatttacatttttactgtactaattttacaaaaaatattttgtttaaagtttcaaaattacaaacaaattgtgttttagtaaaataaaaaaaaaaaaactaaaaaaacaacaaaaacaaccctagaacaacttaacaaacaactatagaacaacaaaaatataactacaaaataaataacaaaataacaaaacagtgacctaattgcaataaacaaaatgatatcaactcatcattatgtttttatgttaagatttcttttacttacttttgacaacataatttatctttttgtactattacattattttttctcatgaaatttgttgttacaactttatttttgaactttctttttattgggttgtgtggcctaaataaaacccatttcaatatgatcagatttactaattaataaaagatcaaaaatcattttatgttacatgcttcacatgatttatttcataattatgttaatgtataaattctattatgtcctaaatatacatgtatatatatttgttcatgattatagtgtcttcagcacagtggaatataatcataattatatgttcaaaaatttaattctcatgatttgtcagttcactgga

SEQ ID NO: 145809 - DNA, 558 bp, Cannabis sativa
taactgataatacatatttccgtctagactcattgataaagattcttgtttaagacaattatatagtttgtactaacgaaattggagaaaaattacaattttataaacattgagtactacttatgccgctaaaaattaataataaatttatgtcacttacaaatttaaaactttaagtacttagaccatcctcaagatgtaaaatctgtgctaaatgagtttatgctatatttgactcactatttcaattgtactccaatatgcaaaatgtaaaataagtacaaaaatattagttattattgatcattattttttattttattgaaaatatgcattttttttttaaatttttcattgtttaaataatgaaaatatattaaataaagaagttaaaagttatgtaaaagtgaatgaatcataataatttgtgatactataataaataagtaaaatttattgtgggtcaaattcggcacgatgctactgtatatcttttattaaatttaacataatttttagtatgtgctaaatttaacacactttataaaatactatttg

SEQ ID NO: 145810 - DNA, 584 bp, Cannabis sativa
  modified_base (60)..(63): a, c, t, g, unknown or other
ttgttttatctggagagcaaagagttcattttgttctcaacagcttatcacctgagtttnnnnaattcgttgttaacaattggaactcgtccgaaatagaaaagctggacgttgaattacgtgcttatgaacggacattgtcacttgcatggagatccttctccagtaatgcagataaggacaaaaggaaagctgaaggtattgagaataattccttcgacaatcctactactttgggctcagttgaaaaggatagagaaagtgattccacttcaggcccggccctaatggtgtgcaggcagacctactgcacagggcccagtgcccacgcaagaaaagggcctaattttgttaattttttttttcttttataaaaaaaaaactaacttggtcagcattccaatttccaattcgttggtcttatctctctctctatcttctccctcccaacaaaacctcattaacttttaacatttttaaatatttttttattttttttataaaccaagtattagtcaattaattaccaaatttcttagtttctagtaaactaacggtattaaatttattaataccatttaatt

SEQ ID NO: 145811 - DNA, 708 bp, Cannabis sativa
  modified_base (223)..(223): a, c, t, g, unknown or other
agaacgtattaaagctgctcagctaactaatccaaagttagtaaagatcagagaagaggtttcagctggtcaagccagagactttacagtgtaagatagtgggaagctgttattcaagaccaaggtttgtgttccaaatagcatggaacttagaaataaaattctcgaagaggctcataccactacatattccctgtatcgcgacaccaccaagatgtatcangatcttaaaccctacttctggttgagtagaatgaagaagaatgtggtagaattcgtatcaaaatgcctaacctgtcagcagatcaaggctgaacatcaaagaccggtagggttgtttcagcctttaaccctacaataatagaagtgggaagatatcacgatggactttgtggttgggttacctagaaccacgggtttgtttgattcgatttgggttgtggtagatcgattcacaaagtctgtgcattttctaacagttaagacaaccttttcagtggatcaatatgcagatttgtatgttaaagaaatagtaagactgcatggtgtgccaaagtctatagtttcggatagagatgcgaatttcatttcaaaattttggcacagtttacaacgggctatgggtaccaaactaaaattcagtataactttccatcctcagactgatggacagtccgaaaggacaattcagatactggaggatatgtt

SEQ ID NO: 145812 - DNA, 979 bp, Cannabis sativa
  modified_base (210)..(221): a, c, t, g, unknown or other
gttaggtctagagcgtacgatctttgggacatgagggcttatgctgtttgatcgctaagcgacaaatattttgtatatgaatagtaaacttttttaactgtattttgttaacgtgatctcagaattttataaatgtaatatattatgttttaaataattaagcaaaattattattattcacgatttccaataatctcgttgattagcaannnnnnnnnnnntacgttaaaaatcacgctaacacgcctacaatagttagggtgttacaatttggtatcagagccgctagtttgtctttctaagatcgtcacgacatttacaatcatcattagtagtcagctcgttcaacggttgaataagcttttattgattagtagtttatttaatagcatgatttatgaaaagcctgttagggagcatgttagtagcctgattaatagaataggcgcatgtttttaatttccaaataagtggcatttgtaagtttttctttgatcacgatctgacaagactagctcttggttatgtaggttgttcagattagtatggacgtcaggcgaaacaccaggagccacgacaattcagttggatcaagttgtggtcagggagctctgattccccttaatatttgtggccgaggtacgggtctcaggagtagggcgcatggtcagggtgatgctaacccgccataagctgcccaagaatgggaaaacaggtttgcagaaatgcaagctagaataatgaacaagaggaagtgattcggcagttaagacaccagggtgctcccgtagtcctttctctagaaataccagtagctcctgcccctcctatgcaagccgaagctgttgttgcaatgaaccagatggaaccccagtatgaaaggtttcgcaagcaggcacctccagttttccttggaggtctcgatgttatgaaagtcgagcaatggctaactattatcaccaggatcttgaactttatg

SEQ ID NO: 145813 - DNA, 546 bp, Cannabis sativa
tgaaagatatcaacacacatgtccaaccttttaatgaagtaccatctacgcccagggagtcaataattcattcccatatcacttcaaaaacagaaagaattttatccaaacctaacgtctttcagattacatttgtaatatcactgctactccatccttaccctattaataaatatttgtcttataataggttaacacaacacttttgtacaacgatcctcgctgcccactccattgctgaatccaccagctacaaaatggcagctaaagacccaaaatggcaaaaagccatggacactgaaactaatgctctcgaagccaacgacacatggattgttgtcactattcttaacgaacatcatgccattgattacaaatgggtatacaaaatcaaattcaatactaatggcactgttgaaagactcaaagatcgtttagtagctaaatgctacaaccaaaaagaaggtattgattactttcacacctttgcccccattggaaagtttaatacattaaaattattgcttgctattgcagtcattaaca

SEQ ID NO: 145814 - DNA, 506 bp, Cannabis sativa
ataaactgggttttaggtgagaaaattttttgagtgttgggatgtctctattaagaacatgatgaagatttagatttttttattaatattattattttattttatttttgtagatttagatttataattaggtttaattttaatttttttttcaatttaaaaccaatttttaaatattttaatgaatttttaaataaaagataataattaaatgatgtggaccaatgtgaaaatgacacatgtacactgacctagcacttaacggccaaatacatacggaagttccaggaccctaacataaggtatttttattgccaaaatttttatttaggtattaatctgcaactgggaaataaacttaggtatttatgccacaaactactctaaatgttatccgtatttttggatggaggacacgtttagttacaagatagtttcaactctgcatttccaggaccaattgcaggtccaaccaagataatggactgttggaatttattttacca

SEQ ID NO: 145815 - DNA, 538 bp, Cannabis sativa
tttgggatttggccagattcacatatagccctatttggttacaaaagtcatcgagagcatttttgagatgattgactgctgcccgagtacctttgctaaataataagagatcatctgcaaaactcaaattgacaagattcagctttttacaaagagggtgatacctgaaagtctccatttcagtttgtttatgaagcctccttgttagaaactccataaccaaaacaaataacaaaggagacataggatccccttgtctcaagcccttcatcccttcaaagcttccttacaatctcccattcaacattagattataggaagtacccctgatgcacaccataatccatttgacaaaacgagaaggaaagcacaggaagttcagccagttttcaagaaagttccaattgaccgtgtcatacgccttagatcgatttttatagcaaacctagccgaagtgattttcctcccatagttctttattaagtcttgaaagatgaggatattatgagcaatcgacctgttctgaatgaaagctcct

SEQ ID NO: 145816 - DNA, 604 bp, Cannabis sativa
ccctctccctctctttctaacctagttctttccacttaaatcacttaagaatttttcagaaaattgcttgaagattgagtagctttataccttgaattgaaggaattaaggattaccggcacttggtcaggagcacccagggatttggaatctctgctattacaggacatcaggtaagacaatagtacgcacaaagagttaagcgcagtggcgctcatattgtatattgtgattgtgattaattaagaaccagaattagggttattaccctgaaatgagcggttatttgatctagggttatcaccctaatagttaaaagaagttgaatgttatgccatgataaatatattagaataaagagttatgcgtctagggcataattaagctacactcggtaaattagtaccttgaatttaattttaatgtggtctagggttattaccctagaatattatggaggtaagaaagcattaatatatggtaatattattaatgcagtgaaaacatgagttagtgttattaccctaagattttatatgatgtggtaaatattgaatacacgcatatatgttaagagttatgtgtataagacataactgggtta

SEQ ID NO: 145817 - DNA, 900 bp, Cannabis sativa
  modified_base (49)..(57): a, c, t, g, unknown or other
ttgtcatttaacaaaacacagggtccaatttgtaacttttgcaaaacannnnnnnnnaaatagtatttacccaatttaaaattctcaacactcatattatgaaactgaggaagctaagcttgtgaaggcatttaagaatatttagtgttgacattgttagcattgagaagattaacctgcttaagctcctgttcattgcttcagaaatgtaatcaatgtgtgtttcgagaaatatattacctgaaacatacatttaatggttgatgaattccccaaggactatacataaaacaattaggtgcctcgacaaccgtatgttacaagatacaaagaccaagttaaacaaagaccaagttaaaaaggacaattatcttatttatttatttatttatttatttttgtaattaaactttcagatattttatttaggcatgtcaaaaagatccatttaggtagagcgggttggagttccgatctgacggatcacctctgatctgaaacattcagatacttattggatcttagattagatccgctccgtctcgcctaattttttttcgatcagatccgctccgccccgcctaattttttttggatcggatttgatccgattcaatttcaatttcaatttattttgaaaaaaacttaattcaagactcggccccgaacctggaccagacctaggaccgaagaccaggactgaaccctggacccgagacaaggatcgggacctgggacccagacccagactcagacccttacccgagacccagaccgagaccttgacccggaacccagacccaaatccgaacccggaccgagaccctgacccgaaccgagacccaggaacatgactaggactggtaccgagacctagacccgaacccgggacccagaccc

SEQ ID NO: 145818 - DNA, 1211 bp, Cannabis sativa
tccatttctctcttcgattgcatagatatggtctcggggcactgcgagttcagtataattgacgaaacgaggttcactcttcctcttcagcgacgattccttcttgggaggagacttggccaacttcggacttcgctgtctccgtgggctgcgtcttcttgggcttcggcccctggagttcttccctcggggactgcgagatcgtgatcgcggtagtggtgatttgcgcttatccttgcccttctccaactctgccagagaattctcgattctcttatgaggttcggccctagcgaagaattcgactaacgattctggtctccgagcttctaattccttccaaaagtcggtccttggcaaaatacctgttatcaacatacaaacaagcgaagactcgggagccttctcgaattttgttacctctgcattaaaccgtttaaaatagtcttgtaaagactcaccgggttctttcttgatgttggccaaagtcgtataaggtggcctgtaggtcatcgtggcctggaaatgcgtgaggaataagtcgacgaaggtttcccgtgtcgatattgatgcctctagcaattgggtaaaccaatcgtggacgttttcctcgagcgttgccgcaagaatgcggcattttgcgagctgtggtacctgatctacctccattatagtattaaatttttcaagataatctataggattagaagtacctttatactttagggattcagatagacgaagtcccttgggaagttgagcttgtcgcacttcagtagtgaagggtgaggtcccatgcaacttgtatatgggctttcgttgctgctcgggcattttcaaagcttggagaagcatgctttggtcaatccctccagttgcaggagtcgggactgctgtgactgcgaaagtcgtaactactgcggcgaggttcgctgggacggtgatcccagtagtcgcaatcggtgcgataggcgggttattgtgagtgttgacacgctgatcgcccacatggggatcacggagtgtttcctcgttatgaggggcgcgagaacgcgctctaaaaactgcgttgaggtaatcacgcagatcacctcaatgtgcctaatagcgtcctccctgctgcgtttctacagagccggaccttgtatatctacttggtgtacgaccatgcgatgacgaagaggcttattctgcgtcgttgtctcttgatg

SEQ ID NO: 145819 - DNA, 998 bp, Cannabis sativa
cttcgattggtggctgttctttgtcatttctagagtcatcttgcggttcatttcttggctggtgttgctatgatattgtagaaatttcttgttcaacagaaggtggttgtgactgattccttggcagatctagaacatcaaattcatgcccattttcaaatgattgagtggctggtaactcaccaaaaatacgcccacatttaggagcactttgcacattacaatgaggcccagtttgagacaattgagtggctggtgactcacccaaaacagccccaattttaggaacattaagcccaatgtgatccacttgtccttcacccaaataagatccacttgcataacccactaaacctttctcaatacttaaagtagaactttttttttttgtgtaatctaaattacaaaaatagctctcaaggacatgactatttttaataaattgactaatcttctcaaccaagactttatcactatcaacacactccaatgtttcattatcccacttaaaataaaagctcatttcaataggatttgtgtgaccaatatccctagctatcccatgtagctcaaacatagacatggtatcaatatgacaataatgaacataatcaatcttcccaccaaagtaagtaggtatattaccatgtctttgcagctatccgttcaacacattctaaactacatttatactccgatggtctccattcatacatattcataaatttatctccacttttataagaataagatgaaggagacattgaaaaattgaagagggaaaaatacaggcatgaagatcgtgaagatcccaaccgtgtgtgaagtgtagattttatttacccagatttaaaaaaaaaaaatcacccaagcgtgaagaacaccaaccgtgcgtgaaaaatagagaggaaagaggaaagggcagctagggttctgagtgtttatagttctcttttttataatgattttatttaatttgttgttttaattcattaatg

SEQ ID NO: 145820 - DNA, 876 bp, Cannabis sativa
tgggtccaggtcccagtcttggttgaggtcctaggtcacaagtgctagtctgtttcaagtcccggtatgggttcgggtttgagtttgggtttaggtttgggtcctgttacagtcccaatcctggttcgatttcagttctaggtctgggtcgggtatcgggtcggacctgaaccatggacctgatcctagacctagactcggacctagacatggatctaaatacaaacgtggactcgaaccaagactcggatccatacccagaacgggattaacacgtgggacctggatccggaccgagacccagacccaaaccttgacccgtaactaagacttggactagcacatagacccaaacccaaaccgagacagggatctggacttggacccagacccaactctagactcagaccaggactcaaacccctacccaaacctggacctgaacccgaacatgaacacggaatcgaaatcaaatctgggactaggacccgaacccaaacatggacccggactaggacctaggacccagacctggatgggggacctagacccgggacccgggcccggaccaagttctggactcgaacttggaactcaaacccagatctggaccatgactgggatttgaaacccgaacccgaactcggactaggacttgaagctcgaccgggtcccagactaggaccgggacctaggacccagacataaatgggggaactggacccgggacctggtcttcggaatttgcagtaagacccaagacctgaccccggaccgagaccctgaacttggacccagaccaggtcttgggactcgaagtggaactaggctaggactcgagaccgtgatcctgatctggacccggggcttggacct

SEQ ID NO: 145821 - DNA, 647 bp, Cannabis sativa
agaatcatttacattaagtaattataaagtttattctttaaaaattacttaaggggtatttatgtatgattaaccggaattcatctggaaatacattgtataatgcaaaccaatcatttcaatttttttaaaaaaattcaaaggttctcgactaaacctctttgacgaaagtggagtcaaactattataactccctgaccaaacctttttgacgagagaggggtcgaatcgttataacacctcgattagacctttgtgacgaagaagggatcaaacaactatagtttttgatttaaaacctatccgacgggaaaggaaaatcaaaagttataactcacgtataaaactaaatactaacggttctcgcgagctaggaaagtactaaacgaggcaacacgatgccttgataaaagtacttaaacctagaaactgaatagataatacaactattcatacaagccaattgaaaacatacaaagtgatagaatcattaaggtatatttaagtttgcttaaggcagattattactgttatagccaggcagaattgacaactgcttgaaaatcaaaaagtttggtagattactaactacttaaacaggaagattacgagcaatggaaaaacccaaaagtattgtacatttgatc

SEQ ID NO: 145822 - DNA, 1321 bp, Cannabis sativa
  modified_base (59)..(63): a, c, t, g, unknown or other
ccctatagcgtcacctggaacagcgtcggtagcgaatttcgccaaaaccgacgccaaannnnnttaaaaaccgcctctaaagcccaattttgtagtagtgattcttattatcacttttacatctttcttatttagaaaattctagtattaaccacacaaagctaaaaaaaattaaagaaaactagaattacttagaaactatatttgtaaactaagaaacttagataattctaaaatatcttagaaagttaaattgtaattcaaaataagaaaaatctaaaaagttacagtatcaaccttagctccctataattaccaagtttgggttgaggagtcagtgtataccaaaaagtcaaaagttctaaactattaacaaaagtttactactttctcatacaaccctctcttctaagccaaactaatttcatatactaaatcaaaaactactcatcaacatcactacttcactacattaccacaacaaaccattaaccattgtgaagtccttttttggtaatttagaagccaaaatattttttattttatggtgagatttgtttgcactcttaaccgattttctcacctttaatattcagttttattgctcttttctatgttaggaaagatgtattttcagctagatttttcttgtatggaaacttcttgtaagagaagcaattctcttacggaatagtttgttttcaaaggaaactttgactcttgctatttttcttatgaaattcgattgtgtcttgatacaatcagattatacacactgttttttgaaaggtatcaagacccaatacaagatcggatttgtttatggaaagtttccttttctggtctgatttgctgcgtcagaatctatttccgatgctacaaatcaaggttatcttaggaaagttttgtacaactgtagattcgactttgtggctgtctctagggtttctatgttctataaataaaacctagagagcatccactcgaatcggctcttctagtttttcattttgtgcatttttcttatttgtgagaagagtgttatttttgtgagaacttagttgttcatctaggttctagtatttttcatatctgttcttactatgtcttagagtttgttagaacaacttgactgaataagagagttgtcttcgggagaagacttgttcaagccttactttaggagaaagtaagcactcacattttaaagacgaatggagttcgctttttgaaggtgtttcagaagtcagattcataaagtgcattacaaaggattgcgacaataatttagagggagtctaaacttatataagtcaattgt

SEQ ID NO: 145823 - DNA, 515 bp, Cannabis sativa
ttgtaattttgccgctcacaatgtggctagatgggcatttgctcatcaaatgtttggaactatcctggtctctgtcttaccggagaaccttttatgtaacaaccatgaggtctaactttatttgatgcaaggatatcacgcttatttcaaaaaaaaaaaaagtaaaagtagtaagaattgggccacaaattactatcttaaataaatataacatacacactacaaaaaaaaaaaattgataatttttttttcctgaccatctaaagtgatgagactataacttcccattttaaaagctcaatggagaatttttcctaatctacagaaagtaatcaattctatatctttattatttattttgttggataataattgttgtttatgctggtttatttatttgcaatgggtgtaggaaattttttttttcgggataaatatcattttggatcctgtattttacaaaagttaccaattggaccctctgttttattaaatgataaaatggactctgtatt

SEQ ID NO: 145824 - DNA, 1735 bp, Cannabis sativa
tcattgaaacaaaattcaaatttttgtagaattttgtgtagaatctaaatttttaaataaaaatctaatcatccaaataaaaataatttttttaattaattaaaactaattttagatattagtagactttgagtttgaaatctgatttttccacaaaaaaagccttattgttatttttgaaatttttgattattttatttattttgtttattttaattataatatcaaatattactcagtaattattaatatttgaaatgatcttattttgatattaaaatattaataaaattaagaaataatctagtttaaatttcaaattagctaagcaaataagtttttgaaaatttgttatttttaaaatgtattttattaaattaaattataagattagaaaaatattattttttactttttatactatttagatatttattttaattaaaattaattttcggcaaaataacatgaaattttgaaaagtttgttaatttagttttgaataaaaaaatttaggattttcaaaccatcaaattttaaaacttagaatattttgttttatttaattattaaataaaattgataatatcctaaccataaaatatcttatttttcaaattgttgattttttttatatatgtaattcattaaattttaagattaagaatttaaaattagaaatatctaaattttaaattaaaatattatattataatatcttattagatatttaattaatgtaaattatttaaataaattgaaaatttgaaaattggttagatatttgaattttagttagaatttaggacattgctctcgcttttagccaacgacaacgagtctaatttaataagcgattagtgatttatagcaatcgatatataataaagtaatataaagacacgaaaattttatagaggttcagtcccgaggagttcggtaatagcctaatcctcgttacttgtattgaattaagaataaggagaaagattccttttcttatagctcttacaccagtatctctgaatatataattcttagataatatctttagggtatattctcaacttatctatttctgaccctttgcccagtgaacatgcatcactatttataggactaataagcttggagaggaagagtttcccctctcgttacaatgtgtataaacaaaaagatcgtgggatcaatgctgagtacaaagatcgtgggattgatgctgaatatactgatagtgggatcctatgtatgccatatccatgtagtctgctccctaagttatagggattacattcatgactcacgatgcgaaagcttaattcgctaagtgttggttgctctgtgcggattgatgacaacttctctcttggtaagctagcgagacatcctgctcggactatgcttcccaagcagatgctccaagtggattccacgtgtcaccattcatgtgacgccacgtcagagtgcaagaattgggataccgtttgccccccaagtctgtacgggacttccgacgttgcgtgcagacttcatccgagctgcttctaccattagatggggacacgtgtcaagcatgactgtctgagactcgatgtgagtctgattgggcatcccttcagcttttggttaataagtgctttgacaattaatatttcaaaatccgattttctctctccacggctggcggctgcacttgattacttttgatttcccatattcgcttttaaggagggaa

SEQ ID NO: 145825 - DNA, 759 bp, Cannabis sativa
aaaaattcctatagccaagtgaagagcagtgaatgtgataatgagaggtatgtatgaatgagagctattgaggaatatttatagtattttcttagggttagaattagaattaaatggaattaaaaagaaataaaatgaccttttattactccatagcccaattctatatagtagaagcccatggatttcaaaattgtcattttagttaaacttatcttttttctcaataatactatttttctattctaaccatttaaatgttaatttttgtctatttaataattataaataattatcaaataaaattaccatctatcttatttattaattggacttaccaaagtctcttaattaacaaataaactctttatttcctttttcttctcaaatttgtctttgcttagtgaaaatcataaataagacatagtctcatttagaattctaattgattaactaaaacgaattaattgagtctacaagggaatactctcttaggtagtgtcgggaccatgtgcatatataatcaaactcccaataagtagttctagaatttactaagtaaatttattatcttattaattcctacggactccactatagattcagaattgctctcttgattacatagaacactctattctccaagaatacatacgctattagttgcccattattttaatctaaatactcaattatcctctataaatgatctacattgaatagggactaaattatcgttttacccttcaatgtatttta

SEQ ID NO: 145826 - DNA, 990 bp, Cannabis sativa
gaggtacatcgctagtcggatatgtgtgccaaactcgcaggttgtggttggttagattcctcgaaacggtgggtgtttcccaggtacttcacggtcatgttcgaaaacgcatgccccttgggttactgggatacacccagccattttttgtgagattcttctattcgcacacctgcgatcttgtgcgttagtgggctgattggatctttgcgagggtccaaatcagccttctaagtagattttcaattttgcatgcaggtgaggtcacctatattattttcgcacattcaccacgctgaaaagatcttctatctttcagatgagcgatctgtcggacagccaaatgcttggctctggaggtgatgcattcaatggcgatcaagaccatcaggaggatagctttatcccaacttcgatctcagaagaggagatccccactgctggagacacggagctgggcccgctgtcctctgcagacatcgagacgatggtgcaagagctcgctgaaccatgaaatattgagattcgagacagcgagtctacggtgtaagcccgtgaataccttattcactccaggtgcgctcctgacatcgaagtcgaggagatggaggaagactggatggctctagaccgcgagtcagatgaggaagagggcgctgagggaagtgggactgattcggtggataatactcaattggatgagcccttttcatgcgatgacttggtttcgcgagtcaccaaatctgatctccccactttttcaagattaaatttgctgcgactttcctccatgcgtcctcgtcctacccagatagcacacctttcctttactaaccctgcgatcatacccacagaggatgtggttgtttcgatacccatacttcgttgtggagtttcagtccctttccatccattcatctccgctattcttaagcggtatgacgtgtcccctttccaactaaccccaaatagctatcgcatagctttagg

SEQ ID NO: 145827 - DNA, 547 bp, Cannabis sativa
ttgttagagatctacattatatgaatctgaatttcgatattaggaggagttgttttgatcaaataaaattgaaaatcagtgtttaatttcaatttcgtcccagtttttcagatctgtttttcctcaatttccgtttagattgttccatgtcttcttttccagtaaaattcgtcggaattaatggtggtcttccttttgatttggtttcatttcggttgtgttgctggtttgaacgatcgagattgttgttcttcatcgttctatttcatgcggctaaaggtttagagaattcggtatttttgtaaatatttatttgtgagctgtataatagtttaaatggccgacccaatatttttttttctttttttttattttcctgttttttttccaaaatttaattgtatgatttatgttttgtaagtatatgaattgttcatatttaaaaaaaataaattatagtataaaagactataataattttttgaaaaagttgtgataaaaacgtgtttggtaagtggtcaaaaaacagcttttggaaaagctaaaa

SEQ ID NO: 145828 - DNA, 697 bp, Cannabis sativa
gttattttagttaaaatttggctaaaattaaaaagtgtggttggagatgcttttataagttaagcttaagactactaaaggtgtaccaccacaaaatttcatactgctattggtgtaattaagtatggaaagtattgctattaaacactaatagttgcaccaatgtgaaataatattttgtgaatggatgatgatattccataatagttattcaattaaatcatgtaaaattaaataattaatttcaccaataacaatattaaatattagatagtgtcaaacactattaacgcctattagggcatcgatgcttctattgggatacaatatttttgatttttttaaagcaataaataaattcattgaaaatataataatgcttacaagctagttacataaattatatataatataaaaaatgggccttgtcaggcaacattgttctagatgactttaatatttctcggtcgtacatattttaatttaataattattataaaaaattactaattattaacaacaactacttgatcatagtatatgtaccattggagaaacaacaatgatacattaaggtccatatcactactataaggttaaacactataattggttagcagcttttttataatttttattaaaataaaataagtgagactcgatattaaattgcattaatagtaatattataccttac

SEQ ID NO: 145829 - DNA, 1146 bp, Cannabis sativa
  modified_base (26)..(26): a, c, t, g, unknown or other
  modified_base (800)..(802): a, c, t, g, unknown or other
ttcataagtattttgggtagcgtgcntaattatttagggcgttacacccagggttgaggagctttcaaccaatccaaaccaggggaaccccgtgacctgccatggtcgatcctaacaagtgatcccagagggtacaaatcttgtgagagatctcaaagatcctccccgggctggtgaagaattccagaggaagattggcatggtttgaggtgggaaggaagttggcgtggtttgcatcagagaatccagccaactcaagaccctaaactgtgccaggagatctttgcgtcaacctctttgcagtgtcaagaaatttcctgaagctgggaagtagatctcggcttcaggaaatggaatcttccgatgatgaggggaatgaggcatgtgtagagatcaaggctctctacgtgtagtcggtctttctcaagctatgtgtagtcagtcttttttcgagctacgcgtagacggtctattccaagctatatgaagacggtctttctcgagttcatcaacttcccctctcatcctttgcttaggagaatgacttaatggtttggccctagtggcatttttgtaaagacaagtttgtaaccagtcttaggtttttcttatcttaaatgccttgtattgtttttattcgaacttaatacaattgtgtttgcttgcgttattattcacaatgtaaacaactatattttgatcgaatatcgagcacttttgggtatctcctttacttgtaatcctcttgtttaagtagttaataatttacaaaactttatgattttcgagcggttgtcaannntgcctcgcaattgcagttataatctgccttgagcaaacttaaatatactttaaggattttatcactttgtatactttaattttctcccatgaataattatattatctatctattttctaggttcaagtactttacataggcgtcgtgatacctcatttcgtactttcctagctcgcgagaaccgtaaacattcagttttgtacgcgagttataatttttgattttccactcccgtcagatagattataaataaaaaataatagttgtttgtgttggaaatattttaccaggatctagatttacttgttggaatttattttgccaggatcttagatctactcaca

SEQ ID NO: 145830 - DNA, 879 bp, Cannabis sativa
tacacacaatgatgtgtaattaatattatatataagatgaaagagatacttcttacattgtcaattagttttgagaaaataattgagacacacttcatacacacaatgatgtgtaattaatctcaactaaacaattaaaaagtgatacggtctcacttaaaaatataaatggctaatatttattacacatcactgtgtgtaataagtgtgtgcaatttaagtgtgtatctaacattacttttagatagtgtttagttggaagtaataaaataaatggaatagaatagaagaaaaaaatacaatttttattttatttatttatttggttgtattttaaagtacttgaatttattctattttgaaataaaaagaattaccattctaatgcaaaatgagaaaaattttaataatttttttatacattttaaattcaatttcattacattcctattcttattctcattctcatttttatttttaaatttttattcatcccaaacaaacaccaccttaatattaaaatgaaaaaccatacaccttaccatccacacttccaaattctaatatttaagaagaaagtattaactctcactaggatcattcaagatcaaatgggcctcagaaacaatagcaatgactcgttacttgtacactagagtatatgttctttgctttgctcaattatttcaattggatgtgaccgatcacaattcaactaggtcttttatgctccaacaatcaactaggtcttatgatatggaaacaaaagggaaatttgattttctatacttaaaaaattttaatattttattcttaaaccaatacatttcaaactaagaaaaatatgacacttttatctaaaacccaaaaatacccctc

SEQ ID NO: 145831 - DNA, 845 bp, Cannabis sativa
aaactaattagttacttttacgtaaaaaaaacttcatttttaaattatataatttaagatacaatttggttacctctaaaacttatttgtaaacattttaataagcaattagcaatttttaagttatattatgctatcttattatttcaaatacatttggtaaccttaaagtttattttcgaaagtaatgagttgtcatataatataatgagctactatttttatttaccaattattttatatacatttttataattttgaaatgtgtttatttttaaattatattaaattaatttgttattttaaatacttttacattaccattttagtttatttttgtaaaaatatatatgttactttcaagtttatttaatacagagtaaactataatcaaacataataatatacgataaatctattagtctatttttcgtatattggaataacaattcatttttttgtttcaaaaacaatgtgtgcctataaaataacaaactaattagtctacttttttttttttttcagatcgagatatcaaatttgattgtatacaaagtacgtgattgtaacatatcttacagacttatatagtaaacttgaataacaagatatgcacttgtcaaagatttgaatatgataaaatgtcttactcataaaattatttggcatatatggctatactatgcctatactcatacatgcaaaataaaaagattagtttatataaaataaactaataagtttattttggcataatgaaacaaattttcattctttttttacatagtagcctttttgtatagcctatactatagtatatgctaataaatatattagtttatttt

SEQ ID NO: 145832 - DNA, 605 bp, Cannabis sativa
  modified_base (28)..(60): a, c, t, g, unknown or other
ttgtttttcaaaaataaattttttaaannnnnnnnnnnnnnnnnnnnnnnnnnnnnnnnnaattaaaaaataaaaatgttaccaaacgacacccaaataactaaatcacattgtcaattataattataaataataataaagttacataatagagcaacctatgaaaattcaatacatatacactcaaggtaaagacataaaaggattaaaaaaaatcattaatgaatactcaaattacacatttagattgtcaaatatccaaaccatgaagatgattctttttttttcaataaaatctcatagtcgaaccaccatctctcagagccattgtcgaaaaaaggattgttgcaacccatcattttcttcaccaattgatgttcatagttgtttgtcgctgcatctctttgaccgtcgtcactaaatcataaattttgagaaagaaaaaatatattgagtatggagaagaagaataatatgtattgatagaatatttaaaattaattaaaaaaaaaagcatattgaatatatatcacattaggattactcttatatatatagatttaggtttaataaaaatattatattgtctagctctcctagggtat

SEQ ID NO: 145833 - DNA, 527 bp, Cannabis sativa
aaagcgactgagacaagcaaggctcttgaaggagtctggaagacattctagatcatcaatgtctattagaaacagcctttctaatttggagagaggtgagaaaggagttgttgggaatacagattcaacgttactgctcatcatcaaccccattcttagtgtctcttctaatggcttccaactagtcttcctcagttccaattctccttccaaacgtgggtaaagtggcatgcaagtcaacttaggacaatcatctatagttaattttgaaagagaagggagatagtaaggcaaggaagtgtgattatcttcatttgcatttgcatttgcatcaaaacaagaatgatcaacttcaatctctctccaccatccttttagattaggcaaatccaacaactcaagtgtctctagagatggtagcaatgttgttgttgaaccaaccaagtcttcactgacattattagtgttggatatgtactctaaacatatcaacctcacaagtgtcaaatgcttgagacacttgaatt

SEQ ID NO: 145834 - DNA, 645 bp, Cannabis sativa
taaattcttattacattgctattcatgattattgtgttatctatatagtagaaaataatcaagattatgtgattaaactaattagtcccatgatttatccgtacacaggatttatactgatatgataattaacaatttaatttacttacacttgtatagtggaatgacttttccaaggcattagcaaagtaagcttatattggatgtatagttatacatcagactcgaacgatatttacagtgaaaaagatatcataaacttaccataattgtgttctttgacttgttcattaaatctaaccaattggattggcctaatatttacatcttgggaacacggtagtgcaattgagtgggagcactgatcgtggatacaaaatctataacttctataaatacatagaagtgaaacgatagtttcctttgagcttagctaaatgaacttaaatggtggagtgctcatttgcctaattttattagtttactggaatatcatttacaagtagctaagtgttttaaggataaaatatatggtagaacaaaaaaattttccctactcgatgtagatcttcaatagaggatcattaattatttagattgaaataatggataatttattgcgcatctatacttggtatagagcgc

SEQ ID NO: 145835 - DNA, 626 bp, Cannabis sativa
tttctacataacatatttcatgtcagtattaagaatttaaaagtattaaatgtgtacaaattgaagaaatattatgatacattccattcttcattagagaaacagtttttactcatccattcccagtcttcgtctatttgcaccaacttcttaggtcgattttctaatggatttttaccttcctcgatatataagatatttgtatttactatggcatttattacggtagcctctatatcgctcttgacaatagtgattgtaaatagtttcaaggtatagatcttttttaaaatctatatcaaagatgttctaaaaaaagataattattaaatgaatcataaaattataactttatgaatataaaaattgtattataaatatgtataccatgatgcgagcatatacatctttcttatcttctagaggaattttggcccaaccactacactgaagtggagcatgatgacgtacttttacaccgacaatatttccaaatatagtggcagttggcccatgaactctaagttcacatttcctatatgaaatctttttcttacttgtatcattttttgatgaacgtcttgttggaatatattttactaggctctagatttactaacaagtat

SEQ ID NO: 145836 - DNA, 653 bp, Cannabis sativa
atgtcaactagccaagtgggtacaccaatcaaggagcgcatcaaggagaacctggagaaggacccagttgcaaagaacatcatggctcttccaagaaaaggaaagacaactcagtttttggcagaagatgacctcttgtgggccaaaggtgggcgtttgtttgttccgaatgtaggcgatttgaggaggacgctgctgagtgagtgtcatgacacgtgggcgggtcattaagggtggcataggatacatgccctgttgaagcatgggtactgttggctgcagatgcgggaggatgttgtggactacacaaagacttgtctcgtctgccaacaggataaattggtgagacacaagacgccagggttgttagaacctttgtcagtcccaagcagaccatgggagagtatctcgcttgatttcatttcaagtttgccgaagactggagacttgaatgcaatcttggtgatcgtggacagattttttaagtatgcaaccttcatcccggtgtcgaagcagtgtttgacaaaagagacagctcaacttttcttcaagcatatagtaaagtaattgggagtaccccaaaatatagtgagtgaccgagatcgaagattcacagggaccttctggtccgaattatttaagcttcttgggtc

SEQ ID NO: 145837 - DNA, 1635 bp, Cannabis sativa
tttatctatccgatctcatggtatcggagatgtcttttgggtacaaattgctgaaggcgaaaagctttatgactgcggaaccaagatatgttcatggaaagtcgtatccaggtgggattggaccacttctcctttgctaagggtcccactgataggtatgcggtgctgacgtggagtccacgtgtccaatactaaaaatgtgaataacagttacaatttggtttgcacatcatcaatgccaaaatttgggataacaattatattgtgaattgttacattttattgtatacaaaaattataaaattttaaaaaaataaagtgtataagagtttcccataataataagtttaattaatatactatcataaaaatttaaaatagtttacttctctgtacaatcttaatgtatcgatgaagtataattttatgatgacttgtcctgctccatgttacaattttgattgcatgtcatacaacccaaaatttgggataataattatattgtgcaattgttgatcttaaaatataatggtagcaatttgatcattctgcacatatgaaaaatctcatagttattcaaagttatcacatactattaaatttgaatgagatcaacagtaatcgagatcatttagattttttttagtgtaaaactttttatctatttattatgcataattttctttgacaaagagtcataacttttcaattgaatattatttattaatggatgtattattttattgttcactattataattacaaccttaaaatttttatagtatattccatacattattgtttaaaataaaaattttaaattattaaattaatttaaaagttaaattaataataaataataaaaaaaatcatgtctttacaagggtagtaattcgatcttttatagtacgtttaaagaatcttataattaaagttgtcataaactataaaatttggatgagatcgacagtaaatcgaaatcgttcatatatttttttagtacaaagtttttcatctatttatctactactacaaagaaaggccttttatcccgatttttaagcctttttatcgtagtttttgctaaaataaaaatcgggatatatgccattgggataaaaggtatttaaaaaactggaatgacgggtactttttatccccgtttttatgaaaaaactggtataaaaagtacttttttatcccgcttttaatgaaaaactgggatataaagtacccctttatcccactttttagagagaagtgggataaaagggtaccttttatcccacttttcatgaaaaaattgggataaaatgtaccattttatctcactttttatgaaaaaactgggtcaaaagggtacattttatcctactttttctaaaaaagtgggataaaaagtcaccttaattttgatcccattttgaaaatgtataggtttttaatttttcttcttttaattttattatatttcatttcattcattttttttcaataataataaatgtaatttttatttttataattgtatggagtatgtataaaaaaacttaattaaaaatgaatgattaatatcatttttaataacaacaataataatttgtaagttcaattctaaataacactttacatatt

SEQ ID NO: 145838 - DNA, 606 bp, Cannabis sativa
ttactattatcatattcatagagaaccacactaaaaattacaaggtaaaagccttcaatctgagtagtattatctctcgaatcaatacaactaaaaagggagtatatcattacccgttaaccaaggtggtcgaacctctataaattactttgttattttctttactcgcttttattatttagacgtggtgatctcaatcataaataaggctccgctgttagttgactaaatttgaggtcaacatttagtcatactcgaaagttagatcaaccaaagccaaagatagggtaccaagtgtgcagaatttgtaaataaagagtatcaagtaattatttttaaaaacataagatactaaacttatatcttggtaaaatacaagataccaaatatgtatttattattttgttgtaaataaaataataaattaaaaatattaaaacaataaaaaaaattagttaattaaaaaacaaataaatataaatattaaaacaataaaaaaatatttttcatttgaatttttttaaaaaaagaataagatcaagactttttcaacttaaaataaataacaaattcaatatttatatttgtaaggaccgtcggacacta

SEQ ID NO: 145839 - DNA, 651 bp, Cannabis sativa
aaaagttgtcttcaagttggttaaattttttttttttttttttaaaaaaaaagggataaaaactaagctcgatgttttatttatatcagtttagaaaatgcaggatttattttagagaaatttacaaaaaatattagattttggacaaatatttataattttactgctacactgcaaaaattatttttatattgccttggatttttttttcttttatattgacaccgaatatcaagaacaatgcctctatcttctacacccatgcacagaaccaccacgacaatacgaaaacacctgaaaataaccattaattctggcaagattgagcgaaaacagtgaaatcaatgttaaataaataataatagcaaaaaaactgtaaaacaacactaaaataaatcaaacaaaacaaaaagaaaaaagattgaaaaaactaactattttttgcacagccttaacactaaatgcaatagtggctatatttgtaagcctagatctgaaaaatcacaataaaaaactactaaaacaaccatagagaaggaagaaaaaacgtatttataacctccatcttctacactcacggatagaaccaccattaattccggagagatggagcaaaaacagtaaaatcgacgtcaaataaataaactatgg

SEQ ID NO: 145840 - DNA, 872 bp, Cannabis sativa
agtgtcagtggctgcaataatcctaccggtctctaatgttcagccttgatctactaacaaattaagcactaggatacggctgagcatcagttggtttggtcggtttttttctatataaaaatccaaaattaagttttcggtttggatcggtgcaatccgaaaaccaactgaccaatccaaaacatatcttaaaaccgaccgttttgaacctcggtttggtcggtttaaaccacccaaaccgaactttgttttttttttaaaaaaataatccaatatattctataaatacattattttacattttacaactacgaacatataaattaattttttaaaaactaattatcttattcttttaactttaatatcaataagaaaataatatattatttgtatatattattagtaactataatacatgaaaaaaaaacttaataaattaatatatatatatgtatcacggttggattctgttttttcggtatgtttattaccaaaaaaaaaaaaccgaccattcaatggcagtttaaatcgttagcgttagcgggcggtttttttttttcagttttcggtttcgtcggtttcggtttcggttccaacagttttggtaggtcagtttgaacggttttttcggttttccagattttatgctcacccctacactgggatacaaattctaccacatctttcttcatcccacaccaccaatagtagggtcttaaatcttggtacatcttggtagttccaagatgcagtgagtttggagtggtatgagcttcctcgagaatcttatttctaagtttcgcactacctggaacacaaactctggtcttgtataacagcatcccgttatctgacaccgtaaaatcttt

SEQ ID NO: 145841 - DNA, 541 bp, Cannabis sativa
ctttgtgaatcgatccaccacaacacaaattgaatcatacatacccgtggttctaggtaatccaaccacaaattccatagtgatatcctcccacttccactcaggaagtgtcaaaagcttcaataaacctgccagtctctgatgttcaaccttgatctattgacaagttagacaccgggatacaaattctaccacattcttcatctcgctccaccagaagtagggtttaaggtcttggtccatcatggtagtgccgagatgcaatgaatatggagttgtatgagcttcttcaagaatctcatttctaagttttatactacttggaacacaaaccatggttttaaatagcagcatcccactatttgacactataaactctttagctagtccagacgaaacctcttctctgatcttcactaattttggatcaactaactaagcaactttaattagctctaacagatcagattgcagcgtcaagttatgaagttttcctacaacaaactcgatgcttgatctgaccatgtcttctgctaactga

SEQ ID NO: 145842 - DNA, 870 bp, Cannabis sativa
  modified_base (64)..(64): a, c, t, g, unknown or other
  modified_base (201)..(207): a, c, t, g, unknown or other
aaccctaaatcttacatattcatacatatatcatggcatagcattcatacaacatatatcactngggtaataaccctaggcaattaaaccgctcatgttagggtaataaccctaatcacagttattgattactcacatatatcatttccaatataagcgccaccgcgcataactcaacgtgctaactactatcttacctgnnnnnnngcaatagtagagattccaaatccctgggtgctcctgaccaggtgccagtaatcctagtcacaatatcgggattttacacaataagggttaacccctaatttaacattcataaaatattcacatggcatttaaaatatagataatcacatagagctcaaaacgagctttccaacagtataaagagcgccccaaacagagtcccgagtcaaaagttatggaaaaaacaaaaactcaaaaaaattaataaactaccattatcatggtcgcgaccagacctatgatagtcgcgaccactaggtttaaaaacccagaaaactctgttttgagctacgaaaattatgcccaaaacacatcaaaacccaaaccaaaacttagaaccatcacatagattttcaatcattaaacagagagtctaaaacaccatttcatgcattaaacatcaacataaaactctcaatttcagattgcacactcaactcaaaatcatgctcaaactcacaactcttcaagctctaaaacttgagctttatatccttcaatctcatatatttttccagcatcatatcactaattaaaacaccagaaagcttctaacttctgtagctgactttcgtgttggccaatcccgaacagcttcaattttggccggatccaccatgatcc

SEQ ID NO: 145843 - DNA, 959 bp, Cannabis sativa
gtgtctattgattttttgttttttagtgtgtaatcttttatttttagtacaataatttacattaaacatcacaccaaatatttactaaataaatatattttatttaaaaatttcacattttatattatttacaataataatttaaaataacaatttatggttatatcatgattactattaaaaatttaaaatcttaaaataatttaataaaatatttattaaattaattaaatattacacattaaaaattttaaataaaatcacacctaatttttttaaattattaatttacttaatacttatttttatttatgttgttctttttagtattataatttagattatgttatttttattttatttattattagtatttttgttatccttattttgtattttttttcaatttgtctgtatcttaaattaactattatttttgtgatgaattttaatttgaggactaaattgtgagattaattttcaaaataaataaaaataaatgttagaatgcaaaaaaaaaaaaaaaaaaagttttacaccaaattggtgtaaacacaaaatttggatgcacatcattttggtgtgtcattggagtgaaatagtgtgaagattccacactaattttgtgaaatggtgcactattagagatgctctacgaccatctcgaatggttacaccaatttaatgtgaaatctacaccaatttggtgtagaatattttactttttgtgcaacaactccaatagttcacactaaatattacacctaatatatattccactaaataaatatatttaacttaaaagatctcaaattttatattatatatttatattaataatccaaaataactaatttataatagggaaattaccttatatattatttttttaattatttttttttaaatttaaggtttgagtttctaaagtggttgcagcgttagttgtaataggggtt

SEQ ID NO: 145844 - DNA, 765 bp, Cannabis sativa
  modified_base (216)..(226): a, c, t, g, unknown or other
tatgttgctaataaatttttaattagattactaatataattagcctaatataattatttaaataaggtaaatggaccttcacagttggggtggttcatgtgagggagggctgggtttagtaagtcgtaccctctactatggtctcctaaatctcacacaagtcccaaaagagaagaatttaacctttaatcaaataattattattcattgaataannnnnnnnnnnattgggcctaaattaaaattatcaaggtgaatagcctaggaaaatttacatggtacactgacttttgccatctttttacaaaaatactgccaggcggtattgtttttacttaattactgtttatttttataagctttatactgcagtatactgtgtttattctctagtttttttatttgttttacggttgttttctataatttattttgttaacgtcgatttcactggtcttgctccatcttgctggaattaatgattgtggttcttttacgtttttctaagtggttatatttgcttactgttttacatttatttttctgttgttttagtagtttttttattctgattttttaagattgagcttgcaaatataattgctattgcattgggtattgaggttgtgcagaacatttttgtagttttttaaatcatcttttctttgttttgtttgattttttttagtgttgttttaaagttgttttgctatgattatttatttgacgtcaatttcactattttttctcaatctcaccgaaatt

SEQ ID NO: 145845 - DNA, 555 bp, Cannabis sativa
tcgatttatgcacacccctagcgatatcctacgcatgcgacatcaatatgagattcattcttctattcaaatgcgacttccaactatcgatgagtgtcacgatagggatactggcgattgggtttatatgtatgaattttcttttaggattggctttcgattccctttccctccatttgtacaagaagtgttggactattatggggtacctcctagtcaactcatgccaaatgcttggaggttattgttgggcatagaagtcatagttagagtgaagaggaaaatggttgaccttgtggatttcaagtcaagttattatcttaaacaacacgatacagataaaggttgatatctattcactcttagggcatacaaaacagcttgggtaatggaattggttgctagcaacaagaggggttggaagaagaaatactgttttgtcaaaggtgacctatttggagcgagtgattatgtgattcctacttcatggagaaccttaagtgagtgaggagtggtgatctctttgtcatcttttatttgatacttgatttgtct

SEQ ID NO: 145846 - DNA, 712 bp, Cannabis sativa
agcaaaatacacgatctgctcgcacaattcaaaagctacggtctcaaacaaattccaagagaagaaaatacaattggaaacgcgttagctcgattgccaagcaacaatgtaagtgacaaggcaaacttggttcctatccagtttctcgaagaccctagcatcactgacacggaagaaatcgaaatgattgatacatccccaaactggaggacaccaatagcagcctacctcaactctgaggaactcccagataacagaaatgaatctcggaaaatgagaaggaaggcagcacgatatatcatagtagatggagtcatgtacagaagaggattctcgatgccattgctcagatgtgtcactcaagacgaagctgcaccactcctatctaaagttcacgacagattctgtggaaatcacgccgccggacagagcttatccaagaaaattctaaggcaagattacttctggccaacgatgactgaagattcaaaagcctatgttaagaagtgtgataaatgccagagattttcaaagatacgaagagcttcgcccaacgagttaacacagatgcaaagtctgtggccctttcccatttggggaattgacctgatcagacaactaccttaaggtaaaggtgggctgcagtacgcagtggtagcggttgattacttcactaagtggacggaagctgaaccacttgcaaccattacat

SEQ ID NO: 145847 - DNA, 623 bp, Cannabis sativa
atttataatcgcacaatataattcgtgattgttttttgcaactatataagattattttactaataaaaatatttaaaaagtcaatttactaataaaaattttcataaaaattatttaactggtgactcatggtacaagtaagagttatagattctgcttgaataattcaaaaacaactcattaatagcttagagagactttatatgttgtttttcgtatttggtctcaaattttaaattttaaaaattgaatcattgatttttaatttattttttaattaaagtcaagatcttcacgtaatcaataggagaaaattatagattaaaaaaaatccaaaagaacttccttgaaatatattatacacatttttcattggatgacttaaatatggagattttagtggaatatcccttttagtttatgtacttgctggtttactaattactaattaggcaacttctacttttaattaaaaaaataataaataaataattaggtaacttctactttttgttaattaaagaattttatgagggctaattataatattttagttaacttttatgtttaaaattacatgtcgaaatatttttttcaaattttttcatagtggtatttgttat

SEQ ID NO: 145848 - DNA, 725 bp, Cannabis sativa
  modified_base (466)..(473): a, c, t, g, unknown or other
ctaaaattggataatctatgttttatgtgaaacgagagtatttgcgtaacctatgcgacacttagattattgcttaaggctgattacatgtgattcttattaagagtttaattataaaacatgtgatttagaacctaaaagatcttaaaagagtcaggttaaattgtataatctgtcactcacatcaagaaaatgataacaaataggcattaacaattgggtaaacaaaacaacaggattctcttccctattttctcatcctgattaatctttatttgtctacttaagtttcatgaatttacattctgtttataatcttaaaaactattggtttgccaaatagaatcataatctagtctagcggtattcaatcaaattccctcttgttcgacctcacctttgtgattttactacttgattacgtgcacttgcgtactattcaataattttcgtaacaagtttttgnnnnnnnngccggggaattgtttaaagattgatattgcataagattatattaaattctattttggtttatttttcttgctcattgctaacctgtttctttcaatattctctttgtccatttcagggagtgaaggtgtatgcgacttcacgaagaaggtgtcatattgccagttgatcttgaaatcgagaagacttgtaggagaaacagaagaaataagaggcaagaaagggtttcagcaattgctgaaacacaagaaatc

SEQ ID NO: 145849 - DNA, 647 bp, Cannabis sativa
tgtaatacctatttacgaataacttaagacttttcggttcaaactcatgtcttctctatttcccacatctccttcaccactgatgtagcttcaatgacttagtcttaacaataaaaattttatatttattaatgtatacaattttatttttattttaagttcacataaattaaaaatagattttttttacttttacactttaaaattaggggtgttcaaaaattttaaactgcccaacctgaataaaccgtccaaactaaactgaataaactgacaaaaaaatacaatctgaaataatataatgataatccaaacctcttaatgaatatattgagtggtttacaaattattctaggccgcccaattaacttgaataaactgaattaaaccgatttatatatattttaataaaagtgtatataatatattacataaattacattcattaattaaactattttgtatttaaagtttgaagtttatagtgtttaacttgaaatttaaattttatagttaatactttttattgtatttgtatattgaaattaaaatttaaaatctacaccatatatttattactttttatttatttttatttttatgaatatttttttttaattattttatgttcactcaattatatttat

SEQ ID NO: 145850 - DNA, 918 bp, Cannabis sativa
atcaggctttgggtgtgggttcgcgtcctgggtcttggtcacggtcctactctttttctagggtcctggttcggcgattcttgttcgggttctaatgtttggtcccaagtctagacatcgactatggtctgttctaggccccattacctgaatcccgagtcaagatcaggatcactgtcacggatcttggtctggttctggtttaggtccttggtcccatttctgtgtttgggttggggatcgagtttggggtgcggttctaggtccaaacccttgttctatgtccctactctggttccatgtttaggtctgagttcaggttcgggttcgggtcccgaatccaggtttgggttgggatccaggtcccgctcccaattcgggtctaggtctaatttggagtccgcgtcttggtccggttacagtattggatctaggccaatttcagttatgattccaagtccaagtcctagttcaagtcccggtcaacttcccattttggttcaaatttcggctgacagggtacgggttcgggtccactttttggtttcagactgggttcaggtccgtgtgtgtgttcggatccttgacagggttccggtccagggctgggtcccaaatccagacaccgactacgagttcggtccaacccctgggtctagatccggatcccaatctcgggtcccagtttggttccatttctagagccgggtcacgagctgggtcctacgttgaagttcaagtttgggtcggtaactaggtctcggtcctagttctgttttcgtggtccctatcctgattctgggtacaggccccggttattttgttggtttgggtcctggtctaggttcgggttcgagtcctagtctcggttcgaatttaggtctctgtttgtgttttggtctgggttcaggtttgggt

SEQ ID NO: 145851 - DNA, 500 bp, Cannabis sativa
  modified_base (390)..(402): a, c, t, g, unknown or other
taagggcccatttggcacagcttttggaaaagctataagctactttttgaaaaagctgtgataaaaatctgtttgctaaacagttaaaaaacagctttttgaaaaaaatttggagaaactaaagctaaaagtgctccaacccaacttttaaaaaaaaaattattttgattaaaaggctataatattttttgtactaaaatcatatttacttatttattatgtattaaaaaataaaaaaaaattaaaataaataattattaaatctcttattttttttaaaaaaataatttatatgttcttttaatattaacaaaagatttttcttatatatttgagtttttaatatttttttaataattacctcagatattatttttttaactttttttnnnnnnnnnnnnnttacggtttgggtttctaaagtgcttgcagcgttagttgcagtaggggtttcaatatcattttttgttgcaatttatgttgcagcactagttgcaata

SEQ ID NO: 145852 - DNA, 703 bp, Cannabis sativa
attatatgttttggaatagatagtgggttccaaatgagtttttggataagaaagacataaaattaagtttgtaaccttctttaattaagtaagctcggtttgcatcagtaggaaagacctgtaaatccttgaacttgttctttactctaactacatgtttccaatactaactacttagtgtatataattttgttaacatgatatatatatattaaatatttatttagtattgttataatttgtttgtgatatttaattttattactaaagtacattaatttttaatgatataatatatcaaatactgctatatatatttaatgatctaatacatttatttatttttgttacaatataataatatgcaatacaaaaaaaaaattatataacttaatttaatgattatatatattttttttaaaaaataacatataataaatgtatttttataattttcattagttaatttattatatttgacataatttccaaattgaaagattataataaatggtcccaaatcattggactatgttagtaaatgtcctcaatttaaaatttatagagaaataaccattttagactatttattatttatattatcttttgcaacataaaaaaaaaattcacatattttttagaattagaagcaaattacttaaaaattatgatatatctacattagttttgttaattttttttt

SEQ ID NO: 145853 - DNA, 745 bp, Cannabis sativa
ccggcagtctccgcaggaacgctgaacgaaggagttccggctgagctagccatactgcgcaaggacattgcccgagtcttctggagacaaaagggggataactcagactctggctgtgaggattgggagccatacgccagacacattctagaggcggagctccccaaaaactttaagttgcccgaaatggcagcttacaccggggactcggaccccagcgatcatttgtctcggtttaaccgagtaatgacggtcatgagagtcaataatgacgccaagtgcttatgctttccactaacgttaagtgggtccacagaggaatggttcaaaaagttggaaccaggatctgtggactgctggaacaagttgcaagtcatcttctggagacagttcgtcactgcgaggaagattaatctcgaagttagtgccctgactaacatcaagcaactacccacagagacattgaaaaatttcataaagaggttcaaggaagaggcctcgaaaactaagaaagttgatgacggacaacagcttgcacttctcccagctgggatccgtaccggaacgaattacaacaagaaggagccgcgaacctccaagatttccagaagagggtccaaaaatacatcaacttggaagaggcccaaatagtggtgtacagaggatactatccaaccggaatggcgggatatgtacccggagttcaactcccgggaaccctaccttcggttactccacaaatgag

SEQ ID NO: 145854 - DNA, 503 bp, Cannabis sativa
cttgaccaaggctcaaggacctttgtcctaaaagtcatttcctccctcatattgacacttagggaaactctagaaatactcttcaggatttatcaagccttatatactcagcctagtgtctaaggatgagcatatcctcacaaggttctaaccacaacaaatagtttcaaccacttctttaacaagtgaacaatatgacctctatttatagagtttttcactcccatatgaacatgaatgaccaccataaagcccttggatgtcacaaattataaattgggcattgattgtattaaatgggtgattttgaggagttttggaatgttagaaagactcacaaacgtttgtgcttgtatgctgaaaaacagtaactagttactagtcaccatttcttttagctttagccaattcttctccctagtgttccaaatcacttccacttgattttgaatcatttatacaccttataaatgaataaatcaagtctccaacatctatatttt

SEQ ID NO: 145855 - DNA, 515 bp, Cannabis sativa
gagggcatgatagataacctggggctcgatcctaatcatgtctacatgcgactaggcaaaaatatcgtgatttctcttaaggcaagccataagcatctcgcttaagacctccatcaagttttttccaatcttgacaaccttggtcgggtctgctgtgttgaggggaagttctttgagttccttggtcagacaaactcccgagtcgatttccccgaaatgggggtcaatgtcaaccccatctagggtgcaccttcaagtagttttaggtgttatctctttcttttcaatagtttgaactctaaaggtcttcatcgtccctacaacttttgcgggagaggtcttgtttgtcccccctagtggtgccatagcagtagaggaggtcttgatcatcccctctaaagtcgtagcaacagaaggtcttcttggcaagtgataacaaagtgttatgcactcatgggaagttccttgattgccatggagacataatatcagctgtcagtaggaacttgacggac

SEQ ID NO: 145856 - DNA, 816 bp, Cannabis sativa
  modified_base (584)..(585): a, c, t, g, unknown or other
tttattgtgtaattactaactatcatgccaaacatgatattaggaattcacatgtaattaccacttgacatccaaacacacattgtattttaaaatacaatgtacttactatacattgtaattactacactgcatagtaattacacagttatttccaaatagatccttagtattttttggatttcaaatttttatattttgtttcaatgtttatctatattaacaaagggagaagatatagtatttcacaagatacacttatggtaaagaagagcaacatagcttcaaaacttatctagatctatttattttaaggtaatgactctatctccaaactttaataatttttttactgttttttaggttccaactattatcttttacttcaatgtttatatgtgaaaaagagggattagataaatgacatattaacaagttataattattattttttatttattttaataagagatatggatttaaattttggtttggatcatacctttctaccaaaagaggcctgttgtttgacaacttgtctcctgagtaactgacactcaaattcatcgagcacatccactgcnncatggaacacatccttaaggtgattgagccagtttttgagctggggattgttttcttgctaaatttcagcatccaaaagcacatcttggagggaaaatgtgattagcttaagcttgtcaagattttgtttcattccccataccaagttaacccttgataagcaagagaacccagtttgtccaagacatttccagctatggtgtaagctagatctgccatgagagatgagaa

SEQ ID NO: 145857 - DNA, 847 bp, Cannabis sativa
  modified_base (787)..(792): a, c, t, g, unknown or other
attgaatgctcaataaaatgcacattaattaaattatattttgacaactaaattgccaaaaaaaggacctaacagaatggatgcactgcttggtatgcccataaagcatctgaaatgaaccataaaatggtccactatatttgggtaatcatcctctaaatgaccatgagagttaacatactatgctatacgattcatctctattcttttcttgatgcatgcatgagattaggacgagttctcatccccaaatctaagccacactactttactcttctgcttcaagaaactttcaataacttcttgcaatgtgtagcatgttccctggctcttttttcaaatcttgaaaaaaaggagaatggggtccttttgtagttcaatattagcttggtcataaacatctctagccaggtcatagcttatcttaacatcacccacttgaagcttcttaaattgtttcaaagtattttgaagtcgtctcaacttgaaagttataaggaaaaggtcatttcctctagcctccttattccaacaatctaacataatttatttgaacttctcatgttcacactacatgttgaagaacttgaaaggatgagttcctaactttcccagactaacatttttaaccaagcattaacaatggtcagattcctgtttccaatgaaaaaaggcctctgagttgggatttagatcctgttgaccgaggttttcggcaaccaatataataataataattaagagagctgtaaggaattaacagagaggtttttacgtggttggggcnnnnnngagccttagtccacgagtctgtatatttatgataatatttattacagagaatgtt

SEQ ID NO: 145858 - DNA, 628 bp, Cannabis sativa
  modified_base (164)..(165): a, c, t, g, unknown or other
gatttgctgcgacaaaatctggttctgatgctgcaaatcaagtttttcttaggaaagttttatacagttgtagattcgactttgtggttgtctctagggtttctatgttctataaatagaacctagagagcgacttgattgaacaagagagtagtctttgggannagacttgttcaagccttacttcgggaggaagtaagcctgcacacttcaaagacgaagggagttcgctgtttgaaggtgtttctgaagtcagattcgtaaagtgcattacaaaggattgcaacaataatttagagagagtctaaacttgtttaagtcatttgtctttgtaattgttggtactttattaattgatttgattctctgggtgtggccccgtggactaggagtgttcgaaagaacactgataccacgtacaaatctcttgtgtcaagtgatttaatttttttgtaattatttttatattctgtgtgttctgtttgtcactacaaaactagtttttgcagtaacagaattacattatgtttttgcatacgtatacagttttatatttttcgtatttattattgacatttgcaagaactcaatttttcaattggtatcagagtgggacactaaactctta

SEQ ID NO: 145859 - DNA, 652 bp, Cannabis sativa
  modified_base (383)..(395): a, c, t, g, unknown or other
atgtatttagaataatacattttcaaaattcattaaaataaaataaaataaaactgaaaaaattatactaatttatgtcggtctaaaattaaataaattaatttccaacataaatgtaattttcctatttaattaaatttctaagaaaaatatcaaatatttaagtgtctaaaataaaatcagtttatatattaattttctaatttaattcaatatatatagaaaaatatcaaaaagtctagtttgaaaatatctatctaaataattcataaactaattacttattttctaagtaaaacaaaatattttagtctatatattttaaataaatcatgaatgaaaattacttgatttaaggtgatctaaaattaattaataaattnnnnnnnnnnnnnaatctaatttttaaaattaaaaaattttaaaatatttacataaatgcatttcgaacttaagtaagaaaataattattaaaataaaataaaatttattctaatttaagttgttctgaaattaaaaaatttcgaacttgaatataattttctatttttaaattcaataaaatagaaataattaagtatctagaataaaatcaacttaattattaattctaatttaatatttaagaagaatattctaatttaagttgatc

SEQ ID NO: 145860 - DNA, 1100 bp, Cannabis sativa
ttcaatgcttcataaagcactccagttcacacattaacatatccactcaatttcagtacttcataaagcactctaatcatgcatcattataatctagtattcttacattcctaggccactgagattacaagaaaagtgattaacttcacaggcaatataaccttcattcaatcacactattacataatgtattcaattacagctcatcatataacaacacacttaatccatctcacaacctcgtaatcacacaatcctggtagttcatgaagtaccattaccactcgttaaccacgagctatatatgtcactatcgttgcccgatacagcaaacgataagtaaaaaacctatccgcggtttcaggagtaattactcataatggtaatgaccgtttcttttactcgatcataatctagttacaatgataagaatcatttcatatcattaccctcgattataatcgagtcataacgatgataatcatttcctattatttttccctcaatcataatcgagtcacaatgataataatcgtttcctatcatttccctcgatcataatcgagtcacaaccaatacatatcgttaatctaaattgagattatgttacaataaacatatatcgagatctcgatcataatcgagtcataattatcataacattagccatatatggtgcttaatgctcttcttacctcaagttctattttaggtatgttgaccgacctacttggagaacgatcgatcatcccgggccctatgtcataacaatgataaaccaataagtgtttatcccaaaacactgattaataacggtaaaggaacacctagggtttcctaccaaacctcgaggtaaaagttcactaaaatgaaaattatattttggctctaaaatatacaccatatcatagagctcgtcacaagcttcgaaatggtatatagaacatccaaaatggacacccgagtgaaaagttatggccaaaatacaaaattcaacttttccgaaaattaaccaaacggaattccggttggtacatccggaattccggttctgaactgccaggaacacgattttcctcaactttaaactctccaaacta

SEQ ID NO: 145861 - DNA, 1058 bp, Cannabis sativa
ccatccacccacgaccccgacccatccctctttttctctttctctctctctctcttggtgggtagcgaaatcgacccgtgcccatcgaaaccaccacaaactaccaccagccaccacgaaccaccacgaaccgtcgccaccaccactacccgtggtcgtcgacaccgaacagaggctattgccaccaccacgaattgcattcaaaggtaagtgttttttttttaaaaaaaatatatatatttttcatagatttggatgccaattattgcatgttgttgagattagtggaatttttgtagattttgtgctctttaggttgtagatgttggtgtttccatggtatatgtgattgttacagggttatcgatgatatgtcgatagaatatcgataggatgtccatggttttggtgtttgtgttgtattgctgttgttgtatgtcgataggatatcgtttgtatgtcgatagaattagtgtatgtttgtattgtattgatgtttttgtatgtcgataggatttcatgtgtatgtccataggatgtcgacagagggttgagtttattttcgcccttaaatgtcgatgatgtgtcgacagtatgttgacatgttatcgaggtaggatgtgaatttttaaatatttgttaatgtcgatcttgtcgatagtatgtggacatgttgtcgacattatgtagatagtgtggattgcttagttcgagtggttacttatttggaatatcgacttcttgtcgatagtatctcgatacattgtcgataattgttgttattgttgttgtatgacagatgtgtgttagtatcgataggttgtcgacaatatgtcgacgggttgtcgatgaaatcatgtcggtgttcactgtttgataatgtcgatatcatgtcgatagcatgtcgatattatgtcgactattttttaaattttttggctgtaatattggtttgttttttgttttttgagatggctcctagactcataattccagcacccgagcattttactagccgcgtgacatatagaggtaccggaatttttgcaaaaatcaaa

SEQ ID NO: 145862 - DNA, 1131 bp, Cannabis sativa
  modified_base (812)..(813): a, c, t, g, unknown or other
tggtgtgttctgccttgttaaacttcaatctgcaagccttccccaaaacacattcatcacataattcaagtctttctgttagcttctctttgaataatccttgactattcatttcctcaagtctcctctgacttacatgccccaatctgaggtgtcatagccttgcttgactgtgtttagttgagttaataataggtgttgcactacctgttattgtctttccatccagaaaatacaatccattactcaaccttactctcatcacagtttcattgccttatgcaattttcatcacaccttcctcaactttgacaacataccccagtttatcaaacatacgaatagagagaagatttcttttgagatctggaacatacctgacctactgcaaggtcttcatgacttcatcatgattctttaataagattgttcccacacctttgatctcacatgctttgttgttcccaagaagaactgtgcccccatgactctctgaaagagtcctaaacagtcctttatttggtgtcatataaaatgaacaccctgattctagaatccaatctccacttgaatctgatctagacatcccaagtgcattatatgacactacaagtgcatcaaatgactcatagtcattagcaatatcaacaactccatgccttttggacttgtgatgattttctctcttcagtttagccgtcaaagccaaacaatcatctctaaagtggccctccttcttacagtaataacattacttacctgcagctccattagagcttggccctcttgtggagtttttagaattggatctnnaatggttatctttgtagccatttgagtttcgattttccttgtattccctattgagaaattttcccttaacaatgattaatccttccccattggtaggggtgaaaatcggtcggttatggtcgaattttacaattttataaccggccggtcggttacagttcttattttacgaaaaatgtaacagaccgtttagaaattataaccgtataaaaccgtccgtacgatttttggtggtttttcgatttggcggttttgggcaattttgggcagtttattgcgattttttggtttaaccatttttttatttcaaaaaccgaa

SEQ ID NO: 145863 - DNA, 586 bp, Cannabis sativa
ctccaagtcctcatcccaggcccgacggttctggccttgcatccgacgattatcccggcgtcgctcagcgcgcaagcgaagggcatggaattcagcgggcacccttgtggtagctgaaatgttacgtcctttgttctcaaagaaattctgtaaccactcctcgtcaaaagatgaagacgcatcgttgcgcctagccctgtaagccctcatcatccttccgacaatagcttcgccactaggccgataataacgagaaaaaatcgaaggactcaggggggatcgatccccgacgtcagaatggaactcatccccgcttgaagactcgggaagaggagaacctggggggtttgacattgctgaagcaggggaaaggaaaataaaaaaaatatgtatacgtataaacagagaaacttagaagctacgataaagagacaccatgaacaaaggagagtgtttgtttaaatagaacacaaaaggtggccaaggaaagataaaaggaacgcgaaaaggtaaatccacccgcatatcaggcattaaatggcaataaatgcacattcccaggtgtcaaaacgcttcgaaaaaatac

SEQ ID NO: 145864 - DNA, 889 bp, Cannabis sativa
gtctatgagtaggacgcgatctgtgagtaagacgaggtctgtcagcaattactcccaactggatctgcgagagcacttgaattggaagaaactttaccttcgccaacagctcggtcaaaagcaagagtatctcatccaattacagataaacgagctggaggagaagttcaagagatatcaagttggggaactagggagacaatctgaatacaactcagacgaggatcttgagccatatcatccagatatcatgagtgccccttttccttcgggattcaaaaactcgcatgtctcgtcgtatgacagaaccactgatatggtctcgcatttaaacaactttaatacaataatgcgagtgagtaatgtgacaatcaatttacgctgtattttgttccccacctcgcttgttggagcagcaagcagctggtttaacaagtttactcaccattcaataacttcctaggagcagctatccaaggatttcaagaaacagttcctggctgctagggatagatgactcgaagcgacctcgctaaccaatataaagcagcagcccggtgagatacttaaggcatacttaagtcgttttagcacggctgcagctagggttaggaatttggatgacagtacacaacttagcgcccctcaggcgaggatctctactaatccatcaactataggggcaagctgtggcacaacttacaaggtcgtccagtaagaaacataactgagttcaacgaaagggctcaagtattcgtttgaaaataagaagctcgaaaggaaattaattttttgaaaataagctcgggaagcaaacccatcaacatttcaacaagtactgtttccacgagaattgataactcatgttcaaagagaaaggacggttcta

SEQ ID NO: 145865 - DNA, 606 bp, Cannabis sativa
gaataaacttaataatttttttaagaacataagtattcaatgtttataaaattgtaattttttttttcaatttcaacagtacaaactctattattgtattaaataagtatatttataatactcaaattctaaagggaaattttgcccctaataaaactttcaatatcaaaatttagaccctccactaatttgtacaaattaattccattgattacatgaacttcccattttatcctttttttaaaaaaaattaaaaaaaaattgttaaaaactaaaaaaaactttcctctctctctctcttccctctcgtgcacctctctctctctagaaaaaattgaaaaaacacccccctctctcttccctgtcgaatgtttatttttcggtgggcggtgatggaaaaccgaagcacaccccaatcactcaagaatcttacaccattataatggataagttgtgttttaagcattttgttagactttatgtagtttgctttcgtgatgtgtgtcgtattttttgaaactggtattttttggtttgaaatggtagagatcttgcagatctagttttctgtcgaaatctgggtttttcagatgttatcgacagttt

SEQ ID NO: 145866 - DNA, 673 bp, Cannabis sativa
gcattgccgaatttcccattgtactttctaaatacgggactcatataacctcttgggtaaggcttcattgcaacttccaaggggtaaggtgggtgaaaatcgataaaagttaccgaggatgatgactttcctctttcagctttaagaagaccgatcaattcatcttttgtaacaaattcaaaggaagatcaggcttcttcaccaaccctttcagcaatctcagaagttctaatccctcgaacattattaggtgttgcttgagttctttgttcaatagtatgtacttgccttatttaagattcattcatcacacgctcttcaggtaaaccgcttctatcaacagatgcttcttggtgtgactgtggcaaaagtgagctcaacagttgcatcatgccatcttgggctttttgaagcttttccaatcttgttaacacaacatcatctgtgtttgtcgcattggtactattattatcatttcgcaaggtttctaatctgatccgattgtcttactctcgtgtaccggagataaacatttggattcaaataagagaacaaacgtgagcgtttttctttatgtatttataggaataaatatatatatatattaaggaaaacactccccagcagagtcgccaaaatgttcaggggttccagccaaacatttaataatata

SEQ ID NO: 145867 - DNA, 1071 bp, Cannabis sativa
catttcaggcatcttaaaatttttggggagctctgcttctaagatgtgcttggcacatggctcctggtcctcacactcagagtcggagtcgtttcctttctgtctccgggagactcgggcgatgtcttttcggagtatggcaagttctgccatgatcccttcatttaacgtttccgtggagaccgcgggtccgtatttcttttgatccaggtgatcccggagatcaccttggttcccattaatctgatttattagatcaatgggagggcatttctggtcccttcttcctctccccccggggtcttggtgcacagaaacgctttttcggtcctatcgatcctgagggccaagactccctttttggagtttgcccctctgcgaacctttcccttttgggaaatctgagcggacccttcgcggatcccacacctttttcttcttcccaagagtggaagtagggtttttcttttggttcccttcggagggataccttatagggctaggttccttagacctctgcttttgggtacttggcgaggattcctctggttcctttccaagtccagcagggatggctttaggatgcaagtggattcctgcggcctccatggctttttgcatggccagcatcaccttttgtattttttggttttgctccttttggtctacgatttcagcctcatgatcggcagccttttgccttaatagtaccaactctgagtagccgccttcttcataggcgtcgtactcgtcgaagtttccttcatactcgtcatcaggggttccttcttcttcctcagaacccacatttgctcttgaggccacgtcctcatcatttggatcttgagaatcttgaagagggcgaggttgacgtgtgcttcgagtctccaccatttttgtttccttcaagctctcaatgaaagcaacaaaatattgaccgaggttttcggcaacgaatataataataataattaggagagctataaagaattaagagagagatttttacgtggttggagcgttaatgagccttagtccgcaagtctgtgtatttatgatagtatttattac

SEQ ID NO: 145868 - DNA, 534 bp, Cannabis sativa
ttctctcacctagaaactcgagaccagactcctgtttgaaggacacgtgtattcagttttccaagaaaagctgagatgtccatgagagcctcctcgggtttaaacctcgcgtgagctggaatcagcgagatgatgcgaatatgaccaaagtctaatcgcattcgtgtgactcgcattgtgtaggagcaaagaacggatttaactcgcatgtaccaggatatgtgcgagtatccctcctgcgagaacatagagatcagctctctataatgcgagttggtcccagcgacccaaaaacctcgataaaccaatatagactcatgcgtccaggttctatcagctcattatacgatgtttgtaaatgcgactatctaagaacgcaagcatcttagacttaactaaatgttaggtatatcctaagcccgcgaccttaaaccagaatatgaacagccaactcgagcaatagaagttgcatacgttgctgtatttagtgaatagaaactgttattcatttattaatgtttacgttttagttta

SEQ ID NO: 145869 - DNA, 527 bp, Cannabis sativa
cgcatccaaccatgcgagtaagcaagctttcagacatcgaggacaagagccaggacatgagaagctggtcttgaacttcccaatcaagataaggtggattgtaattttcagagatctgatctgctaccacgtatgacagctagaacctgttgtttgcacaacagatttgatgtatctttgtaatctgttaccacgtatgacagctagaacctgttgtttgcacaacagaaagttgtgatcatttaaacgaattgaaagattgtgcgtaaaataaacaggagaaaactcatcctgatctcgagttcttgagcgattgagagttggtggtcgattcataggttgagcagaacctcctccattatcgacatcgacaatgttgttcctcgaaccattgagaccagctcttccagaaaccacattcgccattactggcggaaaatgctctgataccatgttgaacctcttagccataacaaaacagaagaaaagaaatcaaagagaaggaaagagagaaaggcagagaaaga

SEQ ID NO: 145870 - DNA, 817 bp, Cannabis sativa
  modified_base (41)..(47): a, c, t, g, unknown or other
  modified_base (569)..(576): a, c, t, g, unknown or other
ctttattgatgttgaataaaatggattacattgaaatggannnnnnnttagggcataaaacccagcatgaacaatatagcctagagaaaaaatccaatccaaagccatcacaatcgcaatacatttcgcttgaaccaccgaaaaattacctttaaaaaaccacaaaaatatactaatattaggttctaataaatattataaaaaaataactaatagaattataatttaagtacacataaatatattgaatgaaaaaataattgtaactcaatacatgaacaagtaatatataatataaaatagaatagttaatattatagaaaagaaaacaaatatattatacaaaattaaatagatataatattatagaattaaatgggtatataaaagggtgaacacccttcggtttataataataggaggtttaagacaattttttcataaatgatagaaagactaatatctatttttgttatatctctattgaatctaataatttataagctaaacccatgcttattcaaattataaatataagggtaaatagtgacataagtacccaaagtttnnnnnnnntaagcggcataaacccaatgtttactattagcagcataagtacccaatgtttgtaaaactttaatttttttttaattttgtcagtgcagactttgatattgtcttaaatagggcacatataaggcttcaattttttatcatcaggtctagatagaaatatatagtatcagttactttcaaatgatctttcaataaattcaaaacagaatctgtactaacaaaactggaaaaaaattacagt

SEQ ID NO: 145871 - DNA, 702 bp, Cannabis sativa
  modified_base (28)..(35): a, c, t, g, unknown or other
tgtacaagcttcttccaaagcatacggnnnnnnnnatgtagatgatgatatctatacatatggatcttctatctatcgtataattcttggggctataatgctagattgagcttagagtaagattttagggttgtttttgcctttgtttgagtttgaatttgttagacatagggactgtttagcttgatttgagctagatgaggtttaatcttcacttgagtatgcaattttagataaatggatgaattattgtaaattggtgcttgagtttcattgtagttttagtattatactgttctgggaagtttgaacaagtttggaggagattttgtgtggtttttgagcaaagaaccattttcccatttttgtctgcttagaaactagttaactggttttacaggtgctgtaaaaccggtcaaccggttttgctagcagggggaaattttggtttaagcctcgaaactggctttttgctcggggtatttttctaaacctagattagggtaatttagcaatatttggattgtccaaatcccatgggagttagatgtacggttatggagattaggatttgattccggagtttggataagttgtctatcagattttgttgttgtggcataggacccgggattgtcaagcgtaattccactcaggtcggcccgcacacctaatttctagattgaggtaagaaaagtgtta

SEQ ID NO: 145872 - DNA, 616 bp, Cannabis sativa
gcctatgctcatgtgaggcaagaaaaattgaagcctagggcagtgaaatgcatgttcttggggtatcctgaaggtgtcaagggatacaagctttgatgtattgaaccaggtttcaagaagtgtatcatcagcagggatgtcacttttagggaagaggaaatgaccatgaaacctataccaaatccaacactgcacacagaagaatcatacaacagagttaatcttgaggtggatcagtcacattgctcagataaaggttcagatgcagatgagaatcaagctcaagagcatgatgatcaacctcatgaaacacaagatggccttgatgactatctcttggccagagatagggtaagaagagacataagaccaccatcaaagattggttatgcagatttctctgcatttgcactagctgctgctagtgaacttgaaaattctgaacccacaacatacaaggaggcactaaaatgcagcaacaaagaacactggctaaggacaatcaacaaagagaaagtgtcattgattaggaacaaaacatggtctgttgtaaacagaccaccagggcagaggttgattgatagcaagtggttgttcagacaaaaggaaggagtta

SEQ ID NO: 145873 - DNA, 687 bp, Cannabis sativa
gtatttttgtaagtttcccattctaatcccttccaccccacttgtaagagccagggtgccaaaattaagcaaggcccaacgtccagattgacactcagggttggtccaatgcccgaattgacacctagggcccagcaccaagattaacattttgtcaaccttgaccgattctgataatatttcctgagaatacttccaagcatctttttcatttttagaaaatattgagattcaactattgtcttcacaattattgtcttgataaattttgtcttaacaacttttgtcttttttcttatttaattaatttgaatattatttatttattataattactattttgccaattaaaaatagatttttccgaacaacattatacaactgtttattcatacccttgacagtgatttaacttttaaggtggcaattcaaaaatcatggaactataattttaagctccaataaactagagatttattgagtctcattaaccaaataatggtatttattaattccatgattacttccctataaatatggagttgaattcttagtaattatagaattatattcattgagttttactgcagtgtttatggatataattaattcgagtgattagccctccttgtgtcggttcgtaattatttttggtcaaattacttttttacccttctaataacttat

SEQ ID NO: 145874 - DNA, 1109 bp, Cannabis sativa
  modified_base (548)..(551): a, c, t, g, unknown or other
ataattagagaggagttacacttaattcactctccaacaacatcaaaatatgcatcaataatcatcaattttcaagctttaactagagcaaaaatcccaaaccaagagcttgcataaccataaacatatcagcatctttacacaaatttattgtcaaaataactcaagcaaatgcctttaaaatcattaggaataattccatatctttgcaacatatacatgccaaaaacaacaagattatccccttaattcaacacacatgcaaagatgaacatattcgcacaaaaagcatgttttccaatccttttcagcagctgaaattaaattacaccaattaaaatagctacctcaacacaagcataaagatcactaaatcaaactttgatccaagcaacaactcacacattcaatcaaagaaagaaatagcttaagagggaaaagggggttcggtttgaagaagaagaaacccagaaattttagcaaaaaaattcaaatagaaggtaagaaaagctacctcaaatccaagcaagaacaaagccccaaatctnnnnaactaagctttcttccacaagcaaaataccacaaaattgaagctagaaaaatgaagtttttgagagagggagaggctggctgctagggctggaataatgcagaaaataaagtcgtattttgcttaatatttccctttcaatgaatcgtaacccaaagtgcacaattaccacattgcccttagggccaaattcacattttcaagcatttaagggaaaaaatacaattcttatcacatttgatacatgaattataaatttcaaattttttatataaaataaaatgccaatcaaacattccaaaattgtatttcagccccgaaacccggttcggcccgaaatacccggttgtgactataccgccccaacttgtcagaacacacctgaaaaaggacaaacacaggcataccatataataatataatccataagcacgtaattagtttaaattcatagttttccccttctcatttcaaaattactaaaatacccctggcttaacaacggggtcttaacatgtcataaatcataataatacacatataattaattatataataa

SEQ ID NO: 145875 - DNA, 1019 bp, Cannabis sativa
tataacaaaaaatatataacttacgatagaaatatatattgttaattctatttttggtatctttaatttgacaaaaatattttattatttatttatttatttcagctgggttgttatttgatttctatatttttgtattgattaggttatatatggaaggaaatatgtctaatttttctatttatgaaaaataaggtataaagggtaagttggatgactcattattttctttctatccacttgtatatatttatctgatgttgtgtaagttttctaatatgtttgatcaaatttcttgtgaagaaaatcgaagcaagacttttcttttctataaaaagaaagtcgtacttactgctcacgattctataggtacagaaacgaaaattcaagggttgattgaatatcttttttagggaattttctagtgagttgttgtcttgctcagaccgtatatgagctgtcaataagatgtatattgattataaatacaccttatagtagctaggtcatgcatctctttcatacactttgaattgtattcatatcttaaaaaaagaatgtctttattttgtagagaagattgtgttcgtctcttactctgtttatgtactttgtattgtcttgagtctgtattcaagtccgtaaaagaagaagaacaacagtgctaccttcgggagaagtttctacaagcttttgggagattgctttttaagtcttgcctcgggaggaagcaaacactcttcaaggagatcgaaaggatttcgagcacttgaagtttcaacaagattcaattaaaatgtggaatacatcaagcatgcgacatacataggagggagtttatttatgcataagtcaattactttatatttttgagatctatctaatgaattttttctgggcgtggccccgtgaactagtaacaatctgtaaggattgttgataccatgtacaaactattgagattttatgccctaaataaaacccattacaatctaatctgatttgttatcaataaaaga

SEQ ID NO: 145876 - DNA, 863 bp, Cannabis sativa
ggcgcatgtttttaatttccaaataagcggcattagtaagttattcttgatcgctatctgacaagactagcttttggttatgtgggctgttctagtagtatggatgctaggcgaaacaccatgagtcagggtgacttggtcggattcaatggcaatcagggagtttgtactcccccaaatgatgtggccaaaacagaggccttagaagtagggcacaaggtcggggtgatgttaacatgccgcaggctgcccaggttgcccaagatggaaaaaaataggtttgcaaaaatgtaatcggatataatgaacaagatgaggagatcatatgtttgaggcaacagtgtgttcctgcaactcctgctccagaaatgcaggtagctcttgccccagctatgcaggcaggaccagtcgctgcagtgaaccgaatgaacccactgtaaggaaagttccacaagcaggcacctccagtctttttgagaggtcctgatgttatgaaagccaagttgtagctaacggttattaccaaaatcttgaatttgatgggcgtcaccggtaatgatagggtggcttgcgctactttccaatttcaagaagacgcactggtttggtgggacatggtctctatgatacatgatgttactacaatgacctaggagaagttccaagaactgttcaatgccaaatattacaatgaggcagtcaaaagtgctaaaagaaaagaattcacccaactgactcagaaagaaaacatgagtgttactggatacacgacttaatttgatcgtttggagaggttggcctcgagaattgtgccaaccggtttcagcaagaaagagaagtacctggatgggttgaatgcgaag

SEQ ID NO: 145877 - DNA, 675 bp, Cannabis sativa
gtttccttcttagcaatactcatgataagaaagtttctaggtttgatttagatgtcattgacagcgatcgatgggatgagtattgttggggtagagagtcatttgagttgactgttgattcttcaaagatagaatagagcatggtattaaaatgaaaaataaaaaagaggaaaagggaggtcagtcctacaatggttggtacagagcgttgggatgtccttggctgttcatagtctggttttatgaatgttgtcctgcgatggtaaatactttttgcaaaagagttgcatccaggattccaagaattctgaattggaccaatgagtttgggactaaaaatccaacttttagagacttgaaaggcaagatttttaatttgccgttgaacaaggtgattctcagtttctttattgttttatctttgttttgtgctagtttattaatctttgttattttttttttgtttcatattttctttttttgtttctgtttttcaattaaagattaagaacattcgttcatctgatgaggagaggcagaagttgcaattggaaggcttattttcagatgaatctattgatgatcatggtacaactaagcaaacattcgagagtggttcatcttctagaaaatctgattcagatgacatagaatgttaaaatctaagttggaatt

SEQ ID NO: 145878 - DNA, 835 bp, Cannabis sativa
atagtagccacatggaaaaatttggagttacgatccccatgtttataccaaagctccctagatttttgtttccaaatttcaagctggcgggattccacctcttcaatttccaacaaaatttcaacttccagaagtaagttttgcttggagggcattcattgttgaacctccaaaagaagtttattcaacagttcaagttttcttttataaaaaccaaagtaaattcagttccatttggtaagatattttctcgtgaaagacagacgagtaccatgatggggccaaagaattaaatagttttatatagtgtgtttttaggtttttttatttgggataagttgagaaatacttcttttttgtatcaattaatcaaaaatacccttaaatttattttattaaaatatacccacttttataagtgagttgtttaatatatcttcactcactacttaagtctatcatataattatattaacttaagaggtttaatggaaacattatttataaaagtggttaatcttcaaaaatatgagaatgaaagtaaaaattaaaacaaataaaataaagtgattatataagagaaatttgatattatatgcttaaaattaatttatccactaaaaatatgctagctacttacaccatttttctcatctaattttacccctaaacaaataaaaaccaaacattcatctctctctctctctctaggatactcacaccacacacacgcacatactctaccagtcggactacccatcaccggagctagtgttgttcggccgccttacatttcaaaaaaacttctctcgttttttgcgtttttttcttctgg

SEQ ID NO: 145879 - DNA, 610 bp, Cannabis sativa
ttcttccccaatattcgagccttcaaaacttttctttgttggtcgattttttttcttcaaacttttgaccctgggttatgtgtttcaacaatggtggtatgatattttttcttgttcatctatgtaagtatgaacaattacatgtaatatttaaaataataagttggactattatagagtattaaatcaactttttaatttaaaaaaaaaaattattagaaacatttaataatattaattacaatatttttaaacattacattagaaatatatagtcaatatattaaaaagagagtttattttaattgggtggaatcaccattttttatggcaaaaaaaaaatctcgaattaaatgtaatacaaaatggaatctttcattatgccacatcaacaatttgactttttaaagttattagaaacctgttatagcaagttacccaccttgccacgtcagtaatataataataatttttaggttccattgatagtgtgggttctattttcaaacgatctatatctttatatattaaaagtgcttatctaacgacaattcttggtttatttagccttacacgattaacttaacagactgttaacgttaaacgttaa

SEQ ID NO: 145880 - DNA, 1076 bp, Cannabis sativa
ttttaaaaaataattttacttacgaactctgttatcaattttttttatatactaatagttaattataacaaaatttattacttaagtactttcgtcaccaatttgtttgcatacatagttctaccatacttatattttaaattaatttgttttaataatttaggaaattatctcatatactatttttcttaattttttttaaaatttacggtttgggtttctaaagtggtttctctggtggttatatttctatgtgagttgctatacggattttaattacaatttaggttgctccgttagttccaatagaagtttctgtgtagaattccgtaaaaataccaaaaaaaaaaattgttttgaaatgtaaaaatgaaaaaggccctaataattttataaaattatgtattaatatttttatttaaaatattttattaatttttttatcaagaaatataatttctatcaatcaaattgagtccattacatccataagggattctccttcaaaagagaaatttacaactctttcatatttttaagaataattttatctatgctagacaactttctttccttacaaataaaatttatttttgaaactctctttaatgcaattatatatactactcggattcataagtttaacacataccaaaaaatactaacaacaaacaaaaatattttcttctttaagttattattgatctgagcaagcccaaaatgagagaacataagggtgagtagaagaactgctgtggtggatatagaaaagtaattctattgtgaaatattaattaaataataaaagttataaactcctccactataactatagtacagctatcttctttaacttattattggtctaatttcttaccctatgctatagaaacaaaatcataagccctactctagatattccctatatatatagggtatgactataataggacagaccaatattatcttataggtgggaaaactttttcagccgttaataatgcatccaatgaggattaaaggcaaaggtaaacagtaaaaaagtgattgtgagtgcattgttgggttttatgccc

SEQ ID NO: 145881 - DNA, 1248 bp, Cannabis sativa
attgagagcagaatcaaggatcgctctttatataaaatctaatcactagcacgatggtggtagagactcgtaagggcgtggttgattcggagaatccacaagagctggatcctacactgtagaacccaagaaacacaagggatctgccaactgtaaatcccacacaaccatcaaatgtgggtcacggtgtgacgactcttgtggatgaaatggcgcctagtgtgcaagaaactaggaatactagttcagcagccaaccagggcattcataacatagtcgttccgcctgctaccaatgttcaaacaaccattagagatgacactgaaatccaaaacctccgtgctgctcttagaatcatgcagggtcatagcaacaccctacatcatgatcaggaggaacgtcgtgctttggtgaaccttgcgtttgaagagcagaggcgcatgttcgccaaatggagagacaaggacatggaaacattaagggctcaacaagcagtcattgacgatcgtagtcggcaagccactgtgttgatacgaaaagcctatcaaactgtcgggcaacagcccataaccgtcatctccttgggcaaaacagacgaagattcagcgatgaatacctctcagactataaatggtcagccgtcaaatccccagtcacaagttccacttgtgggccagatggtaggcggacagaccttgtctagtaattcatcgggagaagtcatacccaataattccaatcaggctaatggtgctgcttagcacattggccataccaatcagtcactgagacaaccaggcattttcgtaattgatacgttggggacgactcatgatctcagaaatgatctgaagaggaggaggggagtggacgatcaacttgacacaccaatcgtgcacccgggaacccgcgctaaaaaagatgctgatgtgactctgatcgaccaagagaccgaacaggttagtccaaccgtgcaagcacagttggatgaactaaaaaatatgttccaaggcctggccggtcagaggaacaacaatctcgagttggactgagcacgtggaacccctttctcccacgagattaatatcttggaggtaacccacaagtttaagatgccaacctcgatgatgtatactgggaaggaagatcccttatcccaccttaagtatttcgagatgcaaatggacctgcaaggagtacgaggcgatgtatgttgcagagtttttgccaccctctcagaagccgccc

SEQ ID NO: 145882 - DNA, 579 bp, Cannabis sativa
attttaacacacatgctaacgtgcccgcaaaatgggacatccaccatacaatacaatattcaccttttagagtgacaaaagcattcaactatgctagcaaaacgttctccgattcgatttaacatagcgcacaaccggtcgaacaatctatttcgacaatggaccttataatttgggcattttgcaaatcaaaattttaaagattataccaaaatttatactctttaacttgagcaaaactcaacttaaagagtagggacaaactgtagaggccaaaattaggctcaggctaaatatcacatgtgatgtttccaaagaatgctcaaataagattgggttggactatttgactagttatgatggtacagtcacaaaatcaagcccaacacgcccaaaacaaaatagtcaagtcagacattaatattacccatgacccgtcattgagctcacaatgatcccacccgtatacgagatcgagtcttatcactcatctaacaatctttgaagtggtcaattaattgaccatgtaaataacgatgtaataccctagagttatgaaatggattagcaaaatcctaa

SEQ ID NO: 145883 - DNA, 813 bp, Cannabis sativa
ttgaacttgggcagttcgacataatataccatcctcaaacatccatcaagggccaagccttggccgatttcttgataaaaggtataactccaaaagaaattccacctgtgcaggggatggtgcatccaacgagcagggttcgggtgcagtggtaatattaatatcgtcagaaggctttaagtttcactatgctctgaggtttcaatttgacgcatcaaataatgaggctcagtataaaaccttgatcgatggcttaaagatagtaaggcgttgaaagtcaaaaacctcatctgccatagtgatttgcagttgattgtgaaccaggtcctcgggaaataaaaggccaaaggcttaaaaatggcgaagtattaagggaaagtttggaagaacattgaaagattcgattacttcaaaaacgaatagattccaagagaaaaaaactccaacgctgatgctttagcaaaactgggctagcagaatgacttggatgaattgaacttagttccggtggagatactaagcgagtcgagcatatgtaaaacgaaagacgtcgagatggtagaaaatgctcctacatggatgactcctattattagttacttactcgatgggaaacttccaaatgacaaaaatgaggcacaaaaactattgtatttagtgcctcactacacaataattgtaggcacactatatagaagagggtactcgatgcccctacttcgctgtgttctccctgccaaagcgaatgaaatcattagagagattcatgaaggcttttctggggatcatgcgggttggcaaagtctgtctaaa

SEQ ID NO: 145884 - DNA, 521 bp, Cannabis sativa
ttaatgaactcttcatttcttttttcaaaaaaattgagtaggggtgggttggatttggcccaaaagaaaaagtagcgggtggagagctgccaggtaggattgaacattttctttgagtttgactcgaatccgatcaacccgctcagacccgactcggccaacctgattgtagaaccaaaatcaaatatgaggggtgtcgaaaactatattaaaattctaaaacttatttttttttatatcaagaacgttataagtaaatttatactaattttttcaagaatttattttttagttagactataaaaaaaatttatctttcatcttgtggcaaagtctagtcttcagtattttcatagctaagaaaaattgctctataataactgtagaaattataaatgtaagaataagagttattactttatatacaagtagaaaaatttatcttttttttttttctaatttttaccaatcacgatagtaagttaaaaatagttgccaaaactataaaattaaaaaaaaaa

SEQ ID NO: 145885 - DNA, 658 bp, Cannabis sativa
  modified_base (539)..(544): a, c, t, g, unknown or other
acatttttatatacagatagagagaaagagaggtaaaagaattagggattttgaaatcaataaacatacctggtattaacatctaaatcaatccagagatgttcatgtcgaagctgaagatttacaacaccacaccattcaaatccattccaaatgcatatatactcttcatagaacaaaaataataatactaagtgtagataaaggttgtggttgaataacccaaactcatcatcaccaacgtaatgtgaggacgaggtgtagttacagagaaatagattgagagtaagaagaggaagagaataaagtttatgggagctgacttggttgaattagtcaacaaaatggtgacattattaatatagaagaagaaggaagaataataccagaagttaacaaaatggtaatattagtaatatctgtttttaaaaaagaacaatttgtcatcaactatcacaccaataagccatatttataataggaagataatgttaattataatctttaagggtaaattgtgttagaaattattttaccannnnnntagatatactcacaagtatgttgattaacaccctaaatatgaatttctaaaacgattatgaaataaacacatataaagtattagaaaccgtgcattgggtgcagcggaataata

SEQ ID NO: 145886 - DNA, 798 bp, Cannabis sativa
  modified_base (70)..(80): a, c, t, g, unknown or other
taataactaataatagttttttctttaatttttaattatataactttcaaataacatagaaaaaaactannnnnnnnnnnagtatacgtgcctcgcacgtagttttttgctagtatataataaagtttttaaagtacatatttaatgtttttatttatttttaggctattttataaggtgattttttaatatgtaatgagaatgattaattttttattgtgttttgtttttttattataagttttttattatagattttatttttatataatcaaaaccagttttctgataaaaaaacaagttttttcatgaagaaactaatttcttgatgaaaaatcagtttcttgattaaggatttttggtattgattttgatcgcatgagaaaccaaacaatttgaatcgcaggagaaaaaaaatcttgtgtggctagagagagtagtttgctttttgtcttttttcgagcatctctgttttactgtaatggggttgcttctttttttattgtcttttgtcttgttttttattgtaagtttgtcatattatctttttatagggtcaaaattagatttataggttttttttattataaattttacttttatataatcaaaatcagttttctgatgaaaaaattagtttcttattggagaaactagtttcttgataaagaatccaatttattgatgaaaaaaattagaggttgtttagctttacagtttaaaaaccgttttctattttttaaaactgaaaacagtttttaaaaactaataggggtcgtttggcaaaattttttaaaa

SEQ ID NO: 145887 - DNA, 631 bp, Cannabis sativa
  modified_base (548)..(551): a, c, t, g, unknown or other
aaatccatcgtgatatcttcccacttccactcaggtagggttaaaggctgtaacatccttgtcggtctctgatgtttagccttgatctactgacaagttaggcatctcgatacgaattctaccacattcttcttcattcccctccaccagaagtaaggtttaagatcttgatacatgttggtggtgccgagatgcagggaatatggagtggtatgagcctcttcaagaatttcatttctaagtttcaccctatttggaacacaaaccctggtcttgaacaacagcattccactgtctgacactgtaaagtctctggcttgaccagctaatacctcttctctgatcttcactaactccggatcagttaactgagaaactttaattcgttccaacagatcagattgtagcgtcaagttataaagtttgcctgcaacaaactcgatgttagatcttaccatgtctttgttgggttttgtgccctaaataaaatacattataatcttattagttatcaatctgagatatttgaagtgatttatgttaacatnnnnttttcatgtttatggtttaatatagatatttgatatatacaaaaaatcagttgagtccagaacatatatttattcacaat

SEQ ID NO: 145888 - DNA, 871 bp, Cannabis sativa
  modified_base (148)..(154): a, c, t, g, unknown or other
  modified_base (466)..(472): a, c, t, g, unknown or other
  modified_base (672)..(677): a, c, t, g, unknown or other
taaacaaaagaatatttcaatttttgaaataggagtcattttaacaaaatttaacttcaaaccaatattcatattcacgtgttagtagtacgaattcatggtgagtagtggggaaaaatatttcaagatgggtccgggccacatttcnnnnnnnggtaccactatcagaaatgtaaaattttcactatttcaattagaatgattataactgcttgaaaactactttttctcttaatataactaacagaaaagtgatgcacaatggtcttggctttgtgcttgtgaaatttcatgatttttcgagatgtgtagagttagattttaagagaaaactaacgagtgcaagagtaagaaaaaacttttaaaagaaggatatattcaattttttaattagggggatattttaaccaaatttaacgcgaatccaatcttcatatcataacttagtagtacgaattcattgtgnnnnnnngcaaaaaatattccgagatgggtcagggcgacatttcacaaaggggtaccactatcataaaatgtgagattttcactattttgattaaaatgattgttagtgcattaaaattaatttatctctcaacgtgtcccatagaaaagtgatgcagaacggtcttgtcttcatccttgtcgaatttcatgatttttcgagatgtnnnnnntgagattttaacagaacactaacgagtgtaagagtaacaaaaaaacttgttaagatttttaagaaaaatttttaaaattttaaattagggagccattttaacaaaatttatcgcggatccaatctttatattcacgtcttagtagtaagaattcattgtgactagtggagaaaaatatttcgagatggggcctg

SEQ ID NO: 145889 - DNA, 511 bp, Cannabis sativa
agtttattttatgaagagattattatttatttatatattattaattgatgaaatttatttttaaatattataatattaatttactgtgtaattactaactgtcttgccaaacatgatattaggaattcacatgtaattaccagtacttgacatccaaacacaacatgtattttaaaatacaatgtaattattatacagtgtaattactacggaaatttcattaataatacataataaaactctcaatattaaaatttatatcttctactaatttgtataaaataatgccattattttcctaaattacccaaaatacctttttgtttaattttccctcccttactgtctctctcttcctcttctctctctccaccacaccaagaacccaactagtgtgatagaactaccgatagaccatgattcccccaaacggctacaaatccactcaaaggcctaaatctctctcatccccttcctcaatctcgcatccgtttctctctctctctctctc

SEQ ID NO: 145890 - DNA, 619 bp, Cannabis sativa
taacaactaaaaaataacgtaatttataaaatttaataaacatgcaactaaaacaattctaattaaaactcaaatacaattgataaatgtaagacttaacctaaggatctaattttttttaaaacttaataaccttagaataagaatcgtataataactatattaaaactaaaaaaaattaattagaaacagaaaaaaaaaatgagagacatagatcatttaaggttgagcaattcttctaattaaatacatcagaaaaaaatataaacataataaaacaagtatttgaaactagataaagacaacaaaaactaatacattaatctttaaagttgtaacctcatcattattatctcaccttttttcctgaaaagcttcttcaatgggtgacttggtgaaataacaacaataaaaaaaaaattaaaagatgaaacaactataaaacaacttataaacaacgttaaatcaacgtaaccattaaaatatttagatacaatttctaattcataaaaaagattaaatatagatcaacaaaagtaatatctaaacaataccacgaaaatgctaacttaaagttgaaataaaatcacatttgaatatgccctattcctttaagcta

SEQ ID NO: 145891 - DNA, 547 bp, Cannabis sativa
  modified_base (118)..(118): a, c, t, g, unknown or other
aaagactgttttccacttctaagaatagatcagctcgtggatgcaacagccggacatgagatcctaagttttatggacgcctattggggttataatcaaatcaaaatgcatccaccanaccaagaacatacaagtttctgaatagatatgggtttgtactgttataaagtcatgccatttggtctaaagaacgctggagctacctaccaaagattggtaaacaaaatgtttaaagatcagatcggacgaaatatggaggtatacgtggatgacatgctcatcaaatccaagaaggttgtgggcacatagacgaaactggtcggatagccgcactcagtagatttgttctaaaatcaacagacaagtgtgttcctttcttcaacatcctgcgaggaaataagaaatttgaatggacagaggaatatgagaaggccttttaagagctaaaaagacaacttgcaaaacctcttattctctcaaaacctctagacagagaagaactaggaatatacctagctgttacagaacatgctgtgagtgtcgtgct

SEQ ID NO: 145892 - DNA, 659 bp, Cannabis sativa
ctgatatttcatctcgaaatggccagttttggattgtcttctccaaacacggtacaccggcaaaaatggtgtccaaactgtaatttcgcgttttggactacttcgaaccgttctctacgtcaaatctactccttagggtctcctaaactcaaatatgagcttccaagaactcacaacatgaagaaaccttgtcaaatctgaaatcgttcaagaacaacaaacttgaacgtgaataatggtggattttaaaacctactatcttagcgtgtttggtcacgaccattagcttccttagatcgtgcaaaagctatttaaagtgatcaaacaaacccagaaactctctaagtatttcaaaatcaaaatatctctttctctctctaagtttcacatgaaactctatcgatctctctctctgcgcacaacctcctcccttcaacttctttatgcgttttaaaccctaaatatatctcataagcatcctatatgtactcctaaactctaatctcaaccctagatcaacaacctaaaattttaaaaaaataataaaatacatatataatacttaccatattccataataataataataataataataataataataaactaaataatatgctataatatatttacgcatattattattattattatta

SEQ ID NO: 145893 - DNA, 925 bp, Cannabis sativa
gcaagtgataactgtttctttgtggatatcgtggataccatagtggagaagaaaattttgatggaagattcattagaagtgagtttgacactacacccctcgatcaattccactgtttcataatcctccattttctcttcttggacaggatttctttcatgaattttacatagctcggcatttgttccaaggcttctgcaaaggggatgttgatgtgcaactttttaaatacttccaaaaatttcgaaaacttcttgtctaggttggtcttttgaagcctctacggataaggaatctttacgtggtggtctatgctgactggtggagaaacttcctttgatgcgagactctcagtagtcttcttttctgctggtatcggtgccggttaatcctaaacctcttcttccactggttgtctcccatcaggcccttcatacttcttcccacttctcaaggtgattgctttacagttttcttttgggttcacctccattgtgctaagcaagtttccttgagggcgggtagttatttgtgtcgccaattgccccatctgattctccaaggctttaattctgtcataaactgtagcaacagatctatttgtagactaaatcctccactagaaccttgttgctgtgattgttgttgattctgttggggcttatttctctgctgatagaacccctgttgttgttgattaaaagacttcacttgtacattgtgtcgtcgaccccctcattgattgtacccatagttattattttcagaataattcccgatggctttcgcttaatccatcggcaaactattcacatttatagggcattcatcataggtatgaggacccccacagagctcacaagcaacttgagcctgtttcatctgagcagtcatcaacttcgtcagggcctccacttgggctgtc

SEQ ID NO: 145894 - DNA, 555 bp, Cannabis sativa
agtcccaagttcaagttggggtctgagtctagttcatctgggtctgggtttcgaggcctgagtccaggtcacccactatgtttgggtccatgttcggttttgggtcctattcccagttcaaatttcgattctgtgtccgaattcgggttcgggtctaagtctgggtcggggtttgggtccttgtctgagtctagggtttgctttgggtcgaagtccggatcacggcttgggtctgggtttgggtccaggttcgagtccaagtctttggtacgggtctagattttgtctaggtctcagtcagaatcaaggtcccaagttttgatcccggtgtaggtatgggtccgagtctgggtttgggatcggttccgaagttcaagttcgacttgatcccgaacttgaacctgaacacgaacttggactcggaccaggacctaggacctgaacttagatgggggacccaaccctggactaggaccagaacttggtctcagaacttggatgaggatcgaggacccgacccaagacccaaacctggacataggacccacatcgaga

SEQ ID NO: 145895 - DNA, 816 bp, Cannabis sativa
taaaataatttccaacagatacaagcttcctggaggagaaggaagaggagacttgggccttttgcgagttatccaaggcagaggaggaagaggctgatgccgaggaagaaaaagaaaatccaacaaagtcacccaccatgtagacttggtttttatttgtctccctcttttttttaaatggcctttcggtcgacacaatgatttgccccttgtggaattttttattaagacaaatttgcgaagttggatggccaactttactttatgttttatctttaaatgcctcgtacttttatgtttgaactttgacatatgcttgtttgcttgcattttattcacaatttaaacaatcatattttgatcatacacaaagtatttttaagggtttccattgctcatatttctctctgacgctaagtagttaataacctactttatgcacgagcatcttatctgcccttccctcgatttacgagaagtcattgattttgccttgcaatgatcttattttaagaaaactcaaatatatttttaatgaccttgtcattttgtatatatctttattgcttacatgggtagttaaatcttctacccgcatattagatttaagtattttttaagacactttgatgtctcgtttaatactttcctttagcgtgagccgttagtattcagctttatgcgctagttataacattttatttttctttcccgcaagataggttttaaataaaaaattacagttgtttgatctctttctcgtcagaaaggtttgatcaaggtgttataacgattcgacccctctctcgacaaaaa

SEQ ID NO: 145896 - DNA, 744 bp, Cannabis sativa
  modified_base (76)..(77): a, c, t, g, unknown or other
aataaacaaggtaagaaatcggttttgaatgcacaagaatcttaccataaaagaaaaattattttgtcaactaacnngccaaaaaaggactttacaactttgaatccaaatttgactgcctcgtgcaggtgttgccccccaggtgtgacaagggcaatccctgcaccaaacagttgatctatagattattcgtccacgtgcaatttctaggtaggtctatcttcgttattgttcagcagggattcttgtactggctttgggttgtcccttaaggtgctttttctttgcccatgcgctcaactacaaagtcagcaagggcctatcctttgactgttgtttaatgttgaaagattatttcgcactaaccgaactctaccgcccatttaagtaaccgttcaaaagtgtcaggtttttgtgatacttggcgtagtggttggtcggtgtatacctgaatagggtgagcctggaaataaggccttaagttccttgttgctaagattaagtagtaaataagcttttctatcaatggttattgtccttcagctttaacgagtcttttgctgatatagtagactggatgctggacattgttctcttctctaatcagcacggcactcacaacatattctatagcagctaggtatattcctaactcttcttcgtccatgggttttgagagtagaggaggcttcgcaagttgtctttttagttcttaaaaggcgttctcgcattcctctgtccatt

SEQ ID NO: 145897 - DNA, 962 bp, Cannabis sativa
taacaacaaggcaaagcctcaaggcagttcctcccaaggattagatccaagtgttaattcacttgtgattgaaccttgtaattcggttgtgttctcttcttttctgctctggtttatgtttattgctttctggtttatttgatctggttttggtgttcttgaatggtgattgaatcaccacaaatggtatcagagcacaggttgcatttgaggattcaagaactgtgaagatcaagcttgaagaacaacaatggcgactgcaagattcgaaattgacaaattcactggggtgaatgattttggtctatggctcatcaaaatgaaggcactccttgtgcagcagggcattgtcaatgctattcttgaacctgcttccaaagatgtagaagatgtaaagaaagtctcttaagaaatcgagatgaaggcacacagtgcaatcttgctcgatttgggtgatgaggtgcttcgagaagttgcagaagaagaatccgctctttgtttatggaataaactaggtacaatctatatgaaaaagtctttagccaacaaagtgtacttgaagaaaaggctttacaccatgaagatggaggaaactaaagaactaagaaggcatcttgatgacttcaacaaattgatcttggatttgaacaacattggagtcaagattgatgaggaagatcaagccattcttctactcagctccctgcctaagaattatgaacattttgtggacactatactttatggtaaggatactcttaccatgtcagaggttaaagctgcccttaactcaaaagaaatacaaaagaaggttgatgacagaactgaaactggtggggaaggactatttgctcgaggaagaccagaaagaagagatttcaagaaatcaaagaatggacacaagtccaattccaagaacagaaatgcagtgggaaagaaatgctattattgcaagaaagaag

SEQ ID NO: 145898 - DNA, 809 bp, Cannabis sativa
ttatgtttgtgaaggcttcctcgcactcggctgtccatttgaactttttgttgcctcgcaatactttgaagaatggtaggtacttaacagtggattttgagatgaatatgttaagagctgccattcttcctgttaaggcctgcacctcctttagctttgttggtgacgccatttctatcaaagctttaattttctctagatttgcctcaatacccctcgcattgactatgaatcctaaaatcatcttaaggagactccaaaggaacactttttttgggctgagtttcatattgtactttttcagtatttcaaagcactctgtgaggtcttttgtgtggtccccactttttatcaacttccccaacatgtcatcgacgtagacctccatgttcctccctatctgcttttcaaacatctcatttactagtcgctgatatgttttaccagcattcttcaaaccaaaaggcatgactttataacaataaagtcccatgttggttaggaagcttatatgctcttgattagggacatgcatcttaatctggttatatccaggatatgcatctatgaacgtcgtaagcttctgtcctgcagttgcatccactaactggtcgatccttggtaggagaaagcaatcatcattgggacacgccttgtttaagtccgaaaagtcggtacaagttctccaagttcaatttggttttgggacaaggacaggattggatatccacgaggggtagaacgccttgcgtataaagtttttagtcaacaacttatccacttcctctttaagtgccccttatctttca

SEQ ID NO: 145899 - DNA, 634 bp, Cannabis sativa
  modified_base (160)..(160): a, c, t, g, unknown or other
ccaaacatgaactctttctcaaacccagagcccggacccagacctcgacccaaactagaccctggatctggaccacgacgtcggtcttggactcgacctcggctcccatcctggcctcggagcctagccctggacctgacttaaataaaatcaacaaatnaaaataaaaataaaatttacataacacatttttattttttgttttgaaaattgaaaaacaaagtaaatgtagaacatatttttatttttcaaaaaaaaaaattggtttttatttttatcattaaaaaattttaaaaacaaaagtgttaccaactgttatttcattagaataatttaattataatatcaaaagaaggttcaaaaattaagttgcacacgtgcaacaaaatttttaaactttgttttggatttcataaataatcaaaaaaatttaaaaaacaaatgagatactataactttaatataatgtctcatatgaatgaaaaataaattattaccttttgaaatgcaaaaacataaatattcgtagggaaaaaaagggaaaaaaacaggaaaattccaaaaagggtaaaatattacaatattactgtgggtcggcccaatcaacatttatacagcccacattgaaaatatt

SEQ ID NO: 145900 - DNA, 812 bp, Cannabis sativa
caaatcccgatgtatgaaccaaatgaagaacatacctcgttcattacagatcgaggtctgtattgttataaagtaatgcttgataaatgcaggtgcgatgtatcagagattggtaaatatgatgctcgcaaatttgcttggggatatgctcgtaaaatctcaacaggcaaaagaccatgtcaaccatttacaagcaatgtttgaggtactgagacgatataaaatgtggctaaatccactaaagtgcgtcttcggagtcgattcagggaaattcctcggattcatggttaatcagcgaggaatagaggcaaatcttgccaagatcaaagcattagtcgaaatgcgatcaccgactaagccaaaagaagtccaaagtctcacaggtaacgtccccgttttaaccattttatatcgcgatcctctgataaatgcaaggagttttttcagattctaaaaggcaataaaaagttccaatggactgagaaacgcgaagagctttttcaagcattaaaaacgcatttggggcagcccccaatcctatcaaaacccatgtccggtgaagtcttatccatttacctggcggtgtcagaatatgcgattagttcggtattgatccgcgaagatcaaggacgacagtacccggtgtactatgtcagtaaacacctgttagacgctcagacctgctatcctcaaatggaaaaatttgcgttcgccctggtaatattgtcgagaaagctgcgaccttattttcaggcccatagcattgaagttttaacaaactaccctttgaggcaagtcttagcaaaaccaga

SEQ ID NO: 145901 - DNA, 784 bp, Cannabis sativa
  modified_base (566)..(570): a, c, t, g, unknown or other
atcgataattttttttcttttgataaagtgctgtataagttagcacctgtagatttgggtttattcagagtcaatggtcttgatctccactttcccatttaaacaaaaaggaattgtatggcttcccgttcccccaacacattgcaaaacaaattgatttgaaaacaaaacataataaaaataaataaataaataaataaataataatgataagaaaaaagtttttactcttagctgccttttaacactaatgcggttcaattaaagggactcatatgattaaagacgcagagattctgtactataaaagtaaggaggttgtttaatgaattacaataaatgagccatctcttgttcaaaaattaaaaataatcaaataataaaagaaaaacagagagagaaaaatcagtccaatggaaagtgaatgaaagcaacaaacaagaagaagccaacgaggacgtggccaaagatagtcatacgagtcattggagcagagtcatcgattcgatcagtccccatcgttctgctcctaaacccatatacatatttctctctctctctctctnnnnntctctctctcactcactcactcactctcagtctccactcacttatgaatgaataccaataataaaccccttttctttgttttaatttttcaatctatatttccctttccttttctttctccattttaaaacaaacaaaacaaaacaatatatttctaatttctaataataataataataacagcaaaatcaaatgccatcaaacacattgaata

SEQ ID NO: 145902 - DNA, 570 bp, Cannabis sativa
tttagcaacctctgttagcttagtggtgattttgacaatgttgttgtgtatagggcctttccattttgatatactctccctttttttgtaaaaacgacacataagccaatacctgaaaagtaacaaatcaattttgaaaataagtgcaacatgggggttttgaattaaatcagccaacaaatacagtgaaactcatattaataacaccagaattgaaacaaatacagtgaaactcatgtaaacttcctagcagacatatccaagccaaatttaattaggattaaaataagaaattacctaatggactccaatagagaaataattggtttgtcccttgcatcaagaattgcattgttgaagctttcacagatattgtttagcagcatatcacatttcaccccctctttgaaatgtgatttggtccattctgatggttgctttgctgccagccagttgtatgcattcacattcaccttcttaatctcttccattctcctatcaaaatctgcttcaatggtggatcttgctgcattccacagcagttgcttcagcagtagtccagggaactca

SEQ ID NO: 145903 - DNA, 849 bp, Cannabis sativa
ccatgagccgttaggcttgggcacgagtacaggatttgctaaccaatttgggtagaacgactcccttatgaagctgcatgccaagaggcggtcgaatgcttccttcagcgcttggtaccgcgcagggtccattttgcagcgcttctgtcggacacctcgcacttcagggttaatgttcaatcgatgacaaatgacctgcagagatattccgaccatatttgaatgtttccaggcgaaaacatccaagttttgtttgagaaatgtgacgagtttttctcgctgttcaaaagttagtttagaaccaattttcaaaactttattattatctattggatcaataggtacctcaatggtgtcttccgcgacttgggtggttgcagcatagtcgaggatcctaggatcaaaatctggctcatctttatgcggcacttcttctattctgaggacctcctgacgaggaggtggtgcctctagcagatagatgacattgactgacttcttttctgtgagtttgaccgctgtgttgtagcattctcgcaagtcagactggactcctcgcaaagaacctactgtagtgggagtagggaacttcattgtgagatgatagatggacgtcacgatcttcatctcttttacaataggccgaccaattacagcattgtatgccgagtattggtcgattactgcgaagtcagtcatcgacttagctactacgggagcgattcccaaagtaattgggagtttgatcatcccttttaatgtgatggcatcgccagtaaaaccgtatatactcgatgtgacaggtcgcagatccttctcatgcaaccccatttgtttgaaggcttggaa

SEQ ID NO: 145904 - DNA, 509 bp, Cannabis sativa
  modified_base (456)..(462): a, c, t, g, unknown or other
ctatgttcggttctaggtctgggttcgggtcctagtcattgtcctagtcttgttctagggttttggttcggcaattcttgttcaggttttaattttgtgttccaaatctacgtctgggttcgggtttggttcttcatttgagttctggtcctagtctgagtcccaaatctagacactgactactggtctgtatcaggccgcgttacccgaatcccgagtcaagatccagatcactgtcacgggtctcggtcttgttctggttcggttcccatgtcccatttcagagtttgggtccaagatcgagactgggtaaggttctaggtcccgaccctggttctgtttccctagtttggttccatgtttgggtctgagtttaggttcgggattgggtccttagtccaggtttgggttgggatccaggttctgctactaatttgggtctaggtctgatttggnnnnnnngtcctggtccggttacggttcttgatctaggtcaaattttagttatg

SEQ ID NO: 145905 - DNA, 559 bp, Cannabis sativa
ctaccggagcttagatcactagattttggattgaaaatcgaagaaaatagatataggagggagagggtttcgtcaaagggagaagagggcttcactctcttacgtttactgttataaacttataatataatatatataataaacttatctgataggtttatatataaaaaaatttaatattataataatataatattaatattaataatataataatattaataaaaactttattattcataattatcctatcatttcttagccactaagaaatatatatttctagagcgctaagtcaaatcccacgtactcctaattaccccaatacttatattatcaatttattataatattcccatcaattctatcaattaaacctattatgatatttttggcccccgatcgagtctccaaggtcgcctgttatcccaaaattggtactttgacgtggcatcacaagaatggtgacacgtggactctacttagagcatctggtcgggtcaacatgccgagcaggatgcctccctggcatgttcataatggaatactcaacgagccg

SEQ ID NO: 145906 - DNA, 753 bp, Cannabis sativa
  modified_base (612)..(622): a, c, t, g, unknown or other
taatcttttttaaagattttctagaatatctctatgtatagcttgtaaatactattcctatataaagagcaagatacacatactctgggccgagccagaataaaattgtaggggggccaatattaaatgttgtatacaacaattgtaaattttttgtaatttttttttttaagtggtgcctcaattgaaaaaatatcatatttatatatattaatattttataagttattcttaaaaaaaatatagaaccaacaaaaaataaaatataagtggtgatgtaaggtgttcaagactcaaattaatactatcagtatttatttgtaatttcttaaaagaatatatatagatacatgcatttttaatagatattactcttgaacgggtaaattttagtttttaagcttaatttttctatctaattagttcaatattttatttttacattatatgagttggagctgtttcattggcagaaaaaatttaaaaataaaatcggcaaaaaaaagataaaaaaaaaactaaatttgacttaaatattttgtatataaacatattttttgaatagtgtaaaaaaaaaatatattttgagggaattaccccatatactatttnnnnnnnnnnnttttttaaaaaaaatttacggtttgaatttctaaagtagttaatcgcggtagtttctatgtgagttgctatacgagttttagttgtgatttaggttgattcgctagctgcaataggaatttctatgtagaa

SEQ ID NO: 145907 - DNA, 732 bp, Cannabis sativa
tattttttcctggtttaggttggggctgaggttcgaggttggggttcgggttttgggaatggaattgggactgagttttggggtcgggtacaaggtttaggtccatatctatattggtttgggtctggggcaaggttcgaggtagggcgtggggtttgaggccatggtcgaggtcgaggttcggggctggtgttcgagtctgagtctagggctagggtccaagtctaggtctgagttcgagaaagtggcccgtccaggtttggggccgaagtttgaagttgtggccgaggtcgaggtttcgactggtgttcgggtgagagtccaaggctagtgtctaagttcaggtccatatatttggggtcaaggcaaggtatgaagtctgaatttggggttcagggtttaggatttgggtgtgggtccaggggccgacgtctggagtccgtgccaaattcggagatgggttctcaagatatggtaaattgaatatttttttttaagaaaaaatgtaaaaatagtttattaaaaaaacattaacttaacactattttgaaaactataaaattattttcttttcatttttgtaaatacaaattaagaaaaaaataaaaaatactttaaactttgtaaccaagagttagtcatttggcatgatgtctatcactacataattatcatttttttttttttatattaagtgtacacaacatagtattctaatacaggaataatatt

SEQ ID NO: 145908 - DNA, 1007 bp, Cannabis sativa
  modified_base (813)..(821): a, c, t, g, unknown or other
tttttggttaatcgacaaaaaaaagaggtagttttaaatttatcccaataaattatacataaaggtaattactgattcagcgacatgttcgaggtgtagtagtgcttgggaatcgataggacatgcgttgttcacatgcagttttgccaaatcggtatggaaaaagactcactttacaattgactatcgacatgctcattgtatgtttaatggggattatatcatacatttggcaaacacaatggaaaaagatgaagttgaacttttaatatgtgtgttgtggtggtatatggaatgatagaaataaggtactacatggtgggttcaaaagacacctctcttctctggttgcatatgctgtcaattttttgaataattaccgctcaactaaggttcccaactgcaagaatcaggccttaaacactaaggcatcaggaactgtagtgcgtaattatacacaccagggggtctttcacttcagcaaacaacacaccagcaacaccgcaagctgttgacaccttcactgctggtgtaattcatgaaaaccagcaaaatattgcaacttcgtgtcaggtggcacaacagcaacagtatccatcccctggaagcaatcggaaaccaacaattgagatttcatggatgccacctgtaggtaatctccttaagatgaatattgatgctgcagtaaattttaaagacaagaaattaggaattggtgcagttgtccgaaacaatcaaggagaagttattgctgcgttttctaagccttctcaaggctgttttagaagtgatgaaatggaagcaaaggcgctnnnnnnnnntcttatttaggctactcaacatcaattgccaatagcgcttgtggaaacagatgcccaaagagtctcctttgctttaaattcttttcatagggacctgtcttatttttctgatctcattgatgatgttcgctgtcttttatcctctttccctggagttactgttgctcatgttcgtaggcaagctaa

SEQ ID NO: 145909 - DNA, 632 bp, Cannabis sativa
  modified_base (62)..(70): a, c, t, g, unknown or other
cttagtttaatgaaatattctagacagtgatttctaacaactaatttatattttctaatatnnnnnnnnntagaaaaatatatttaagttgaaattttatttattaattaatttttagacgaagttaaattaggatatttttcttagaacttaaaaatagaattaattaagttgattttacttaagatacttaattatttatttctatttcaagaaattttattaattagaaaatacatttaagttgaaaattaattatttttaaataattttagatccaacttaaattagaatattttcttagatattaaattataattaataattaagttgattttatttttgatacttaattatttctattttaacgaatttaattaaatagaaaattatatttaagttagaaatttttcaatttaagatcaacttaaactagaataattttcagaatatattttacttttttttatgaatcatttcccacgttaatttcaaaatgcatttattttaaatgtaaatatttcaaaaattttctattttgaaattagattatgttaacaattaattttaattaattttagataaacttaaatcaagttatttttcattaatgatttattaaaataagtaga

SEQ ID NO: 145910 - DNA, 903 bp, Cannabis sativa
  modified_base (861)..(869): a, c, t, g, unknown or other
atctcgactattcctgacattcccaatgtcttactatactgccccgctatactaaaaatactaaggtgtgattctaataaccaaacgccgcgtttcaatattgcggggcacaaaacatgataaaatataaaattccatataattcataactaatatacaagtttcataattaatctctaattatctgctattttccaaattaaagttaagcggtccttacacaaaccctcgagaacccttctccctctcacgattgccccactcggcctcaatattctcccgcgctctctctcttgctctttatctcgcctaggcggagattcatcgccgttgatagcagcaagcaaagatccatcatcgctcaagtgtaagtttttttgccctcgatttgagatttgattttattgtgatattgagtttaggttttgtttgtggtttttagtttttgattttgtttgtgataaacgatttagggtgatagtgattttaattttgggtaggggtttaggtttttctaattttgggtggtggctgtagtgatttttggtttatttttatttctggttttggacagaaggataataagaagaagctgatgaagaaaaaaggagaaggaatggtggtctagatgcttcgagagaagaagagaaaaagaaaagaataaagaaaaaaagaaaaaaagaattttgcttttaattttgttttgtaatttatttattttttataattattttttaaaattagtattacgtggaccactaaaaatttgccacgtgtacaagtgtgtacacgtcagggccgaccctgaatttgagtgggctatagaaaaaaaattgttttgggcccttatttagaaaaaannnnnnnnnttttcaaaatcagtaaaaaaaatggtataatttt

SEQ ID NO: 145911 - DNA, 647 bp, Cannabis sativa
tttgattttttgtttttttttttttttttttcaaatattgggagagaaataatataatgtatcaaattagatgtagaggaaatgaaaagaaataaaaaaattgagaagttgaaaaatacttttttttttatatactttaattaaatttataaatatatatttttttttataaatactgtacccaaattatcctcccacactcacataattaagatataatttcaaacataatagatttatattttttggagatagatgtgtaggtttgtaagaaagttggggcaaaatttttattagagaaaattagagactacagtgaaatgataagggtaaaactagtagaataattgaaaaaagagataaacataatagattttaaaaaatgagataaaaatcaaagacattaatttaaaagaggtatatgtaattgagttatttgcggcataacttccttaagtggtcaagtatttgcaactaacctccaattctaaaattttggtggtaaaacctcctaaattgatattctgttagcaattagccctttccgttcatttttaactgttcagtgccatgttgtactatcctacgtggacaatgtgtacacatggaataattgggaaatttgaattattatgcatgttttaata

SEQ ID NO: 145912 - DNA, 554 bp, Cannabis sativa
aatcaagtatgacagaagcctcatgctttacatgcaatcaaaaactaatgttttgtaacattgtttgttgcttttatagttgttgtaaagttgtaattacgttgtttgatttcattacttttttaaacatgttgttttcatgttgtttatatgttgaactttagtagttaaaatttgtagaatttcaaattttatatactcttgttttcatgttttaatatagatgttaaatacatgttaacaattatatcaaagaattactaaagtttatgtatcaagtattagtttaattgtaatagttaatgtttgtttatattttttgccttcaatatatatttatatatatatatatatatattgaaaaaatacaatagttatgtaatagttaaaatttaagaaatttttgaattttaacaactaaaattcaatgtaaaaataacacgaaagtaacatatttttaaaataaataaaagcatacaacgtgtttacaactctacaacaactactaaataactttttttatttgatattaattttcaactgcctgtaaaata

SEQ ID NO: 145913 - DNA, 618 bp, Cannabis sativa
  modified_base (206)..(207): a, c, t, g, unknown or other
aaaataattccagaataaaattccaattattttacgtaaaaattctcaaacaacaatcaattatgaataaacgtggatcaacatgaatcacatctaaatcacacatatatcgttttaaatccgtatttcttgaaaataaatcaattaccatggctctgagaccagttgttggaatatcttttactaagatctagatttactaacanntatgtttttaacatcctaaatataaatttctaaaacgatgaaaataaaaacaaaaaggtatgagaaaccttaaattggttagatcataattaaatgactccttccgctcaaatctctaacctttgtatcatatttgtcccagagtttcaccaagatctgagcaagaaactccttcagttgtttggattcttcacagtctcacacactacgattgaggactaactttttatgggtgggcatgcactcaatcaccaaaggctgtatttgttttgtgaagaatgttaaggatttcgaattagaataagagaaaagaagaagaagaagtctcaaactcactagttgtcaaacaagaagaaaactaggccaagagtctttataagcattagttggataatgagactttcttttctt

SEQ ID NO: 145914 - DNA, 633 bp, Cannabis sativa
tgttcaggttagatttcgaggacaaaatccttttaaggggggaatagttgtaaaaaccacttagtttaaatttggaattagcagataattagggtttaattatgaaaattatttctggatatttaaaaattatttatgttgatttatttgaattccgaatgcatttttatgtcatatagtgaaattttataattttacattttcggtggccgacaacatggaacgcggtgtatggctcagtagaatcacaatccaatattttagtttagcggggcggtattgttagacattgagaatgtcgtgattagtcaggaatttagagttttcccaaaataccctttagtgctttttaatcctttttgtgtgggaggggcaaaatttgccccataagcttttgtcctttagtggagttagtatattgtaattatttgatttattttaaatcatgttggctgaagtaagtgtttaatatgttaatttatcattcattttgcaaattggaaaaaattaagaacagaagcaaaattccatttcctctcaactctctctctctcttttcggccctccttgagcagcaaggaagtggattttcctttgtgattcaagtgattccatcaagtttagagtaattct

SEQ ID NO: 145915 - DNA, 890 bp, Cannabis sativa
gcccaaattttcgttcccagtccctaactctggagcccccggtgcaagcaccttcggagcctgtaagtctcctttgaatattcacttcgttccttctgtccaagattatgcttacttaaggctagtggaatttgttaaaagattatttagttttcggatgccccattcctggtggggcgataatgctgaaagtttttatttctccaatttaagtcttatttgggtcggtcctggatgggctttggtccttctgtaccaattcttttggatcattcctcctacataacctcgagttggttccttccctgaaatagctttttaggggatgacgacaccaactttttaatttatgattttacaagggcagcattagatcactagggtaggactagtcttgttgcatatacttgcacttgtaattttttgtcattctgatttcttggttattttgaacagcataactcatggaggaccttttagatgcccttgcccaaacttacaaccttgagtcagacatgtctgagcaacttagggtaagtgtgactccagggggacttgttgtcgaagccctcaggaactaggaggtggtcttaattgatgaagaggaagaagaggtggttcctcttcttgaccggaagcataaaggcgtcattactgagccagagcctttgaagaagctgaagaaggttaacacccctagccctagtgttgacttggggatttcttttgaggtcgacgagtatcttgcgcctccaagcattattttgactcctgcacatcctgacgaagaaagggtccagctccgcattgccaagcataattacattgtgagggaattatccaggggagatgctgaagcgaaggccctaaagaagtggctgagggaggcc

SEQ ID NO: 145916 - DNA, 503 bp, Cannabis sativa
acacttaatttttttttcatatttattttcaagccttatggtattttgacaagttttgctcaaagttcgttgtatttgtgatagtttaattttactatttgtgtaaagaaaaaataatacatgaagtgtatatatgtaagaccctaagaggtagataagaggccatcgtcaccaacccatgaagctacatttcagttgtcttagggtaccacaccccgacctccatgagatggtctcagggtagtgcaccccgacttccacttggtggtctcaggggtggtgcacccccacatccatctctaagaaaatggcaatctccgactacccttaaacaatcccatcttagggtaaaaagtgggtctcagagtataggtctctgagggggatcttttggactacgggggcctatcttggggtggtacaccccgaccttggcttaacattaaaagaaaaacttactccgagacaaccccatcttgggatgaaatggcctatatcttggg

SEQ ID NO: 145917 - DNA, 573 bp, Cannabis sativa
tcttattttatttattattattattttttgaaaattagaccttttactagccttaaaaaatattaggaaaatttaccctaatactcttataaataattactgatatataattttcaaaaaaaaaataaataaataattactaatatatgatgcatagtttaatatacccactttttcatattaaataatttaaataaccacatttaaaatttcattaaaaaaaaaatcacatttaaactttaattactattttattggacctatttatttagtaaaatctgtatttattttccatttttataatttaatttttttttttgtacatttttttttcttcaacagaattaataacatctaaatctatatcttttaagatgcttatatattaagtggtagctacttttcgaatttcaatttacaatccctaatggtagatattttttttttttaatttgtatgctcgtaatacataaattatacctcttggtaacccacatataaatatagtataaattaatcaatttaaagtaaaactattactttttggtatccaactaaaataaaaataatacc

SEQ ID NO: 145918 - DNA, 503 bp, Cannabis sativa
ctaatcgcatattctgacaccgctaggtaaatggataagacctcaccggtcatgggttttgataggatttggggctgccccaaatgtgcttttaatgcttgaaaagcctactcgcatttctcggtccattggaacttcttattgccttttaaactctgaaaaaactccttgcatttatcagaggatcatgatataaagcggtttagagcggcgactttacctatgaggctttggacttcttttggcttagtcggtgatggcatttccaccaatgctttgatcttcgtggggtttgcctctattccttgttgattaaccatgaatccgaggaatttccctgaaccgactccaaagatgcattttagacagtttagccgcatattatatcgtcacaatatatcaaacattgcttgttaatgggtgacatggtcttttgcatgttgagattttacgagcatatcatcaacatatacttccatggtgtccccaataagatctgcgaa

SEQ ID NO: 145919 - DNA, 571 bp, Cannabis sativa
ctatcctcaattatgatcggcatagacctaatccaccttttagagataaataattctccgccaggcagtaggattccaaaccccttatcataactatcaaaagatctacccaatctataaaaaaatttggctgccacataagaatgagtggcccctgaatcaaacaatatagagaaataagagttgttcaccaagagatgatctgtaacaactgaagggctagcttctgcatcagcctgagtaagagtaaacacccttgatagagcaggctttgctgctatcttctgttcttctatcttgagttgtggacaatccttcttgtagtgtcgagggaaaccacactggaagcatgctcaccctttacactcacccagacgatgcttctaatagctgggacatttcaggtaagggtctcaggtttcagaaccaccctgatgattgccacgatctgagttcccttaaaccctcttattctgatttgagccaccatgtgcagatggtgcccttctcttcagatcagcgatcgagttactactacccctaccataaccagaggtaggaggagtagtgg

SEQ ID NO: 145920 - DNA, 550 bp, Cannabis sativa
ctcggatctattgattcatcacctgaactggccactggctatgagaaaacccagtattagggactcagactcgaagggcctaggataaacaacatccgttcacttcctaaccaggttgatgaagatggtgcctaagacccaaccaggtacataccaatcgttgagttagaaaattgccatcttaggtgctgattggaggaagcaaaccaacgtaatgcctaattagagcatgaaatagccacagtcagggcagcgcaggtgaatagttcccaaaattaacttgaccttggaagcagagattcacgaggcaaatctcgcaactcacaaactagggggcaggaggcaacccaaagatattcccagaaatctcaagagaggcaacttaaggaaactgaggaaagtctagggacgcagcctaggacatgtggaacattatacggagattgccaaccctctctccaagttcataagaaaggagctcgtgcaaacccctatagggggaacgaggtgaatcaaaccttaagacgaagagcagaacgagaagaggcga

SEQ ID NO: 145921 - DNA, 1199 bp, Cannabis sativa
actaaatggatagaagtcaagccattggcaacatcatccaagaaagtgcaagacttcgtggtgaataatataatttgtcggttcagattaccgtaccagatagtctcagacaattgtaaacaatttgatagtcaatccttcactgatttttatacaaaccatgggatcataaaaattttctccgcagtggcacatccccaagcaaatggtcaagtcaaagcagtcaacaagacacttaaagacactttaaagaaacagcttgaagatgctaaaggaatggctggaagaactcccagatgtattatggtcttaccgcacagctgagaaaatagcgactggacagactccattttccatggcatatggttatgaagctatgctgcccgtggaattagaacctccgtcccacagaagattgacaaatgatcaagaagttaaccacacacctccgtcccctagtcgctcgagttattgggcagatcgagctgatcatgggtattgtcctgcccctttacatattgttgaaagtgtccttgtgctatgagaccttctatctcatccttcaaatgacgacactcttctgtggtatgtccaatatcaccatgatattcacactgttttgttgggtccctttcacgtctcgaatgtctcataggttttggctcactaaaatgacttcctattcatgtgcgaggtagatatttttctgattttcattgagctcggtagattcggcataaaggggtaaatatttgttgtgtttcttttgtttcttatccttgggtagccttttggaatcgtctttcctctttgatcctgaggctttcgattcgacttcttcaacagaatcataccccaattgccttttggattccttgacttgatgccttctgaacttattctccaactcgtccattcgcaaatggagtaaatccctttgttttggactaagtcgttgacgaagattaggttttctcaagttcaaatattctcgtaagttacaccggtcgtgactactgtcggaccttgctcttcctatatgctacattatgccttttgattatcgctggaacgagtgttctctcctcctcgcatggatcaattatgagataccgtacgcctcgcggtacccctcgcctcttctcgttctgctcttcctcttaaggtttgattcaccttgttccccctataggggtttg

SEQ ID NO: 145922 - DNA, 796 bp, Cannabis sativa
  modified_base (171)..(178): a, c, t, g, unknown or other
cggttgccggcggaagacaaggatattatctagttgacctctgatgcaaatctggtgcagtacgggctctacccagaggacttttcttctaagtccgtgacggggaagaaggggaaatatgttgctgctgggcctgaatgagctcataaggagaatgagctgattcaactnnnnnnnnaagctaagttgaagggaggtgctctggtaaagcagtatgctcacgagtctatgaatcctaaagatgaagctgaggctgaggttgaggctgagcaggtggctcctttgaagaggaagaagaaactcccagccacgcccaggctcgtgaaacatggcattcgcataagggagcccatttcacttgttcggccatcccatccatatgctggaaatgggaaggtcgttatggctgagataaactcgatgtgaggtgatgatggacttctgactttcttggcggacagtcactctatgctttacttctttttcagcttcctgactttcatactttgtattttttgttggtttttgctaaccacgttatttttgctctgtgcagacatgtctcggtagataatgaacgccttaaggaagaggatgagcggaggctctagtgcctcccctccggccaagaagtccaaggcgggagacggctctttagagaagaggccttctggagaggtgcaagcaccaacatctgggtcaccaacatctgggtccaaactagtcaggaggattcctgaatgggtgcaagcaccaactccacccatgcccgtgctgcctgaggtcaagaagggca

SEQ ID NO: 145923 - DNA, 1222 bp, Cannabis sativa
gaaattcttgagaaggaattgacgttaaactcaattccaactatcacttttgatagtgtttaggtttccattactttcattgatcaataagtgaatccagaaccttgataagacaatatcaaacaatttctcattcaagaagtgataaatgtttcagataatcaaactcaacaacctcaaagatcagtgtcattaaaaaatgcatcagagaaaggacataaagaaataatggaatgatagacgatgatccaatcaacttttatcatgccataaaggttccaactctcaagattggattgatatcataaataaagagtacaaattgatgtgagacaacaaagttttggtgtttttcctattgctataaggtgtaaaactaattgattataaataaatatttataatcaagagggatgcaaattgcaatgtggagagatgcatattaggtcttgtatgtaaagaattacctgtaaagcatagatttattttaaatagactttcttttggtttaattgaaagactgtttcaagacaagcatgacaccaattgcttattatggtcttgagttatatcaaatggattattaaagtgtctttaatcaatagtaatattaatgacacaagttatgtggtgcaaccaaaaatttttgtatccaaagatctaaagaatatagtttataaattaggaaaatctatgtataaactcaagtaagcttctcgtcaatgattacacaattataacaaaagagatatatcaataaagtattctaaacttttgatgattatgtctcatttggttttaagatagaagcttttgatgattgtgtatatatcataggttcagtgggagtaagaatatgatcttggtattatattggtaaaaaattacttgccactgatgatatacccattttgtattaggaattcaagatatgttgagattgttcttgagatattcttgaattataacaaaagagatatatcaataaagtattctaaacttttggcatgaacgatactataccaggttaaaggcttgtagctaaagaaaataagttgtctaagtcattgccctgaaagcaaccttaaaatttaagaaatatagaagattcttcatttatatttagaatctaatatatgctgaagcatgtatgtatttttacttaacatacatattaagaatgttggatagatatttgtgtaactgtaacaccctaactatc

SEQ ID NO: 145924 - DNA, 503 bp, Cannabis sativa
attagatttttctagatacttaattatttgaattttcattgaaaatatatttaagttagtaatttttcaaattgattttggatcaaattaaattagagtgttttgaaattaataattaagtagatttttctaggaaatagttattcagatattttttaaaaatatttttaagttgacaaattatcacagtatagtcaccatcgagtattttggctcaaaccgggttcgagatccaaaatttattaacttttttgttagggttacaatttgcaatatatgtgaagagttatacgagtaagacataaataggttagactcagtaactaaaatcgagataaatcctattaagaccttatgtataaaagagacgtgtgagtgtaacacgtaggtctatgttatatatacattagatgcaatggcatcattgtatatgagataatgtgatatatagtgtggtggcacaattatatactgttgacttcgcttttagccaacgacaatga

SEQ ID NO: 145925 - DNA, 620 bp, Cannabis sativa
tgccaaccatgaacttttgttttctagcatcttcaatagtgtactttgcaatcatagagtttcatatctccttggcttccttgtaagagcagtatacatcaaacaaatcattagaaagaatactcaaaattgtgtgtctacataccttattggcatgagtccaagcattagcattgatgtttgttttctcttcagaaagcacccaagcaacaacatgtatatcacagagtgataagactctttcttgccatcttttgaaaaactaaccatcaaacatttctattttagagatgtcaggcaatggcttggagaatggaacagcagcagcagatgaagaaagaacagaaagattgattgctccaataccagaagatatatctccattaatcgccgcgatgacagagagagtactaccaacgggaagagaacctaaggtattatcaatagcagcaacagtttgggatttataaatcctcaagattgttagaaaaatatcaattgcaataataaaatgataacacctcatccgtgcaaacaagacattctccttaaggatttactaagtaatctcctaggattcaacaggtcttctgattacaatgagagaaccggaaaaacag

SEQ ID NO: 145926 - DNA, 699 bp, Cannabis sativa
cataaaatatgatgtttggtgactcaatttttagccaacaacacgaagtcacaaatacaataataatgattttataattaataaaagaacaaagaatataatataacaagaataagatttatagaggttctatactaattataatggtagtagtctaattgtcttgacctataaattccttagttcatacctagaataatatgaacaaggtttaaaagagctttccaagtttagaacaggagcatgagtggagctggacatgagctctgactccatccaggctgaatttacaagaaggatctggaactttgaagccaaacctctccctcaattgaaaagtcaaacaagtctaagataagaaaggacactctcaggaggcatgcaagaacataatatgaaagggagcttgtaatcactcaagatcatggaatttgacccacgtggcattcagttgacgtggtcccgagaaattaggtggttgtcccctatgccagaccaccaaaaggttcatgggaaaaagaaaactacctttttatccaacatccactactattacattctctctctaaaccgaccgcacacgcgtacctgtcactgtcagcagcgcgtttgtatacgaacaacagttaccaacatattgggcctcaccaaaattttgggcacttctagaacaatcggtcgcccgattctgcctagttt

SEQ ID NO: 145927 - DNA, 680 bp, Cannabis sativa
taatagtatgatttaagaaaagctatataggaagcatgttagtagcctgatagttgaataggcgcatgattttaatttccaaaataagcggtaattagtaagttttacctgatcacgatctgacgagactagctcttggttacgcaggctgttctatagtatggacgtcaggcgaaacatcatgagtcagggtaactcgatcggatctagtggtggtcagggagtttagattcttccaaatgttcgtggccgaggtagaggccctacaggcaaggcatgcggtcgaggtgatgttaacccgccagaggctgcccaagctgcccaagaatgggaaaataggtttgtagaaatgcaagccagaattaatgagcaagatgaagaaatcagacgcttgagacaataggtgcgatccctgtaccagaaatgcaagtagctcatgtccctactgtgcaggcatgaccagttgttgcaatgaaccgtatggaaccattgtatgaaaggtttcacaagcaggcacctctaggaggtcctaatgtgatgaaagtcgagtagtggttgactgttattacaaaaatattgaatttcatgggacatagggttgtacatcggtcggtttgggtggtttatcctatatactttctgacccaatctaaagttcgggttgctaaaatttaagtgca

SEQ ID NO: 145928 - DNA, 611 bp, Cannabis sativa
aattggatatttaaaataacatccaatccaatcagatcacaattggatatccaatgtttggcggtcggttgtcattggattggatgatttgtgcacacccctaagttaatccaaaagttatagctagttcacgtaattatcttatgagtattgttattgagaattaatagtatccaacagaatcgtctaagcaagttgacagccttacgtgaaaaattaaatttgagcattttattaaaaaaaacaaaaccaattatcaattaatactttataaattcaactactaattatgctgcgcttcgtgtaaattaaattattatataaatattaattgaacaataaaatattatcaaacaatttaaaacttatttttatgtatattttttttaaaaaaaatgataaatatatatagaaaactctaaagaattaaaaatataattttttatataaataaaaaatcacacaaattattttaaatgtacattatatatagtgaagaaaattaaaactaaataattcttacacaaaatagagatctaaaacagaaagaatgcaataaatctatatagaaaattcatcatataattttaaaacaactatcatcaccgtat

SEQ ID NO: 145929 - DNA, 519 bp, Cannabis sativa
ttatttatctcaccctgttggatgggataaataattccagacagatgagattagctgaattagttatccagacttccaacatgcctaaatactggactggacaaattagcctgtctaatctagtccagtcctgcataccaaacaggtcctaaaagtataattattcttattgcaccacaccatgtaagtgaccgcaacgactaccgttgatttgatatcagcaaccaccctatttcttctccccttcaattcgatcacccaatcctcaacattagtaggtcaatcaaactaatctaattacttggtgatctcaaggataacattcttagtgaatggacaagcaaagaagaggtgaccatgagacaagatcactttcgcaaataggacataagagagaatcaagatgaatgaatctcgccaaaagatctttaattgtattaagttttttaaacttttttcttccaattgatattcttaaaaaaatatctatcaaataaaaataaattatattaaatatta

SEQ ID NO: 145930 - DNA, 702 bp, Cannabis sativa
aaatcgactatttatatatccacaaaataagtccacctggcactaactaatacttaactgaaactcacgtaacagaacgctagtgtagatataatagactaaaaacccatatacgactagacattgaacagaacaaaaactgtcacaaaataatgacactaacattctcccccttgacaggttatgttcaatgactaacaaacaaaactaaagaccacaaaaaaaaaacagaattaataatccaaacataaatgtctttaggaatataaacaaagctactacaaaaaaaaaaaaaaacgaaatacaaatatctcccccttcattgaatatgatctgtgggttcctgtgctgtgccagactccccctgggaaggtggcccagtcgacaccaagggtgttgcagagtcaattggaggatccagatcaggttgtgctgaactggtgacaggatcaaatgctgaaggtccccctgcatatgtgcattacttccagacgtgtcagatgatgcaccaaacgaatcacgatgaaactcaggcaaagatatgtcaggcagagaatccctaggaaaatggtgcaaaagagttgacttcatagagcgaaccatctgatacatggaggcctcaaaggcaagctgacgcttttgatccttcttataacgtttggcaaaagattgaaactcagaaaacatttgtacctgccagct

SEQ ID NO: 145931 - DNA, 1084 bp, Cannabis sativa
  modified_base (28)..(50): a, c, t, g, unknown or other
aaaagaggtatgtttcaattaaatatannnnnnnnnnnnnnnnnnnnnnnttgattaataaaagtggtattttcaacttaccccaatatgtagtgttgtattcttaggtgatctttacgaaaatatccaaaaaaaaaaattcaattttacatttttaatgtcacacccttttttttttttttttttttttacatttttaccgtaccaagttttcaaaaatattatgttaaaatttcaaaattacaaaaataatgtatttcagtaaaataaaaaaaataacttaaaaacatctctaaaataatttaacaaacaacacgaaaacaattataaaacaacaaaaaataactgcaaagcaacgaaaaataataaaataatgacataattgcaatatgcaaaacaatatcaatgtacttagttttgacaacttaatttatctttttgtacccctacattactttttttcatagaatatgttgttataatttcatattatcaacttttttcctcttttcctttttaagttagtggcagttaaaatgataatttattttttaaaagttaaataagtaattacattaaaaataaaaataataaaatcttgtgatttcaaaatggggtatataatataataggtaatatataattaatattgttgacccaaaaaattgatcaactgacagcgaggtcgtatgactctgatgtttgccacattttacacaattagaatgagaaagtaaaccacacataattattataaaggttcggctccattagatagcggataatgacctactctccttttagttgtattgatccaagggttaatactatccaaatcactatatgtaggttctgatataacacccttaaggatgcaaagtagaaatcgaggttggcaagtctcaagtgatgagaaagttgataaaactctatttcaatgtaatctctatcatttaaatatcaataaagagacagaagtacttttatcacttattaaatgtgtcatttggttcatgttattatttatatgtttatttgatttataaattcatcctaaacccttatcacattaatattcttgttt

SEQ ID NO: 145932 - DNA, 690 bp, Cannabis sativa
attacctttactaatccaaattactaaagcggtcattacaattttcttccattgtaataatatctctaaaaatcaaaagtttatttcttttcaatggaaaatgagatgaatcaagattttgagaatacaaggataagagattttgtgtgaaaactattcatgggtgagcatggtggtgtatattatgtgttttactattttaaataatagtaatatatgtattaacatatttttttttgttgagataggaaagttttatatgttaatatataaagaattatatctatgatatatatgtatatgtgtcatatatatgtgatcatgaatttatatcatattgttatgtatagtgatatagaatatgatatttaaatttataacatgtttatatgtatatatttgagatatataatatataacatatgaatatgagttatgtgtattgtatatatgatgagatataatataatatacatatatgttgtgagattaaatatgtagaaataattattttctattctatgtatttatatgtaacatgcatatatagtatatattatatagcattcatgcatattaaagtgtaaataaatgttatatatgtgtgaggtatgtaacatatataattgtgtaattaatatatgggtatgctcttaatgggtattacccatgtatgggtattttattctt

SEQ ID NO: 145933 - DNA, 665 bp, Cannabis sativa
gtcctcctgagatcatggctactcttccgttgggtcttggcggcaggccaggaatttgttgcgcttctccgggggggagcaactggggccaatgctccagctacaccccctggtgctccttggggcaaaggtcctgctgcctgaaccggattgaagtgaggcaaccagttcgtgattcattcgtaaagatgtcgcaatcggatcaagttttcgatctcgtccttgaggtttttgcattcattggtgctatgcccaatgtcgttgtgatactcgcatcttttattgggatccctccgggagctatccctgtacagaggaggtggtctccggtagtgcgtgttttgcctagtagcgaaatacacacgctcttgggagtccgttcgctccgtgtattgagtatactagggagtgtacccccttttctgtcgcttatcctccatccggttgctgccttatgaggacctcttgctccgagagccttgagagggacctcgtaagcttgcagtcggatcggagtgagacgggacttgtccacttatcccagaagggctcctaaaatgagaagatgcaagggccaaggactgaccttgactatatcatggggtagcggaaaattgtatgtcgcttaatggtggagcggctgctggtaaggttcctgggagctg

SEQ ID NO: 145934 - DNA, 644 bp, Cannabis sativa
tattcccaacatgtacttcctttctccaaatttgtcccaatgaattggggaacaacatttcctaccatacaacatctcataaggagtcatcccttttgcattctggtagttgttattgtaggggaattcaatcaaaggcaagtacttactccattaaccctcattgttctctctgattgcccatcagtctgagggtgaaatgttatactaaacttcagctttgtgcccatagctctatgaagatttgcccagaattttaatgtaaactttgggtccctgtctgaaacaatggatttggaagctctatagagacgaactatctccttcacatacagctctgcatactgatccgctgtaaaagtagcctttacgagcataaaatgatctgactttgtggaatggtcaactatgacccatactgagtaatttattctcgtggttttaagcaacctaatcatgaattccattgcaatactctcccacttccacccaggttgggctaatggttgcaataacggtaccagcctttggtgtttcgctttgatttcatgacatattacacatttagccacgtaatccaccaaagctttcttctaccacacaactgatcgtagggtttcaaatcctaatatatctttgtggct

SEQ ID NO: 145935 - DNA, 611 bp, Cannabis sativa
cccgtgttcttcttcttcttcttcatttagatttctggaccccatcaagtcgcacacccgtgttcttcttccttcttcttcttcttcaaacctagatctgcacaggaaccacggggtcattgttcttctccctcatcggcgtcggcctccgaacactcctcatcgacgccttcttcctcctcaccatcggagcagccctatttcaccacagtgcatcctccttttttcttctcttctcgacaacctgcgaatcagaggcttgagcatgaaaatacaaggtggtttgggtgtttatttttgggtttgagtttttatttatgcttatagatttgtggttttggcttgagaatggagttaatctacctaatttaggggtttcaaaatcaaagttttagcttaatctgattgtttaatttgtatttgtttgtaatatttagtttagatttgggatcctaatttgaaattttgttcttgtcaaattctgggtttgcttaggttcagtgtatgtgttaaataaattttgtatagtttatgaatattttgttgaagtattggtttgtttaggtttaataattcaaaaaaataaataatttttgatcttgttaaaaatc

SEQ ID NO: 145936 - DNA, 530 bp, Cannabis sativa
catatctctaagcactaagggaactctctagctaggaaataactttgggaattatcaaaccttagggttttctagcaatttactatagaaaacttctcatctcaatatgagcaccttagaccactttatataagtatttaggatatcaccatttgaaattcaaactcaaaccctatgaatgttatggactcaaatgtaactcatgcacacaccataactcgtatagcattaagaatttctaattaagatgtgtaacacttttttacactcttaatattggtgataatggtggaggttactcatagtaacaagtaactctgttacaaaatgatgaaacctaatatataatgtcatatgttacatattagtttgttacacatgttacctattaaacttaagagtagatctttacaagtattaagatagctaaccatcaatgagtgaaacactaaggaagtttaggtcccatccctaaaaaattcatgctttaattttttacggagattaagcgatttgttataacctctcac

SEQ ID NO: 145937 - DNA, 597 bp, Cannabis sativa
  modified_base (292)..(294): a, c, t, g, unknown or other
aacataatagtttcacaaataattattttgtacgcccttaagaatttatatctcatagaaattaattctcactcaaaattcattcattaaataaaatctttccttgtacagtattgtatagaggtgactcggggaccatggacctatatttcgaagctccaataaatctaagattattatcaatctcatcaatagaataatttttttattaattttattattaatccactataaatatggaattgcattctttgacaatatataattatatttacagaatacttacttgtannncattaatataatcaatataaacagttcgtcctccaattattagttcataattagagttggtcaaaataccactttaccattccaattatctctttattccttatccaatgtaataaaacttatccaatgtgtaagtatacattatcgtcgattatcatgtcagtctaaatctagtgaattgataaatcatgagaataaaacttttgagcatataagcataattatattccactgtgctaacgacactataatcatgaacaaatatatatttacatatgttcaggacttaatagaatttataca

SEQ ID NO: 145938 - DNA, 1371 bp, Cannabis sativa
  modified_base (1331)..(1342): a, c, t, g, unknown or other
atcaagattaaaggaatggcaattgacattaactaggcaacactttaaccaacattcatcatcttccccaattgggaatttagttcataaaaataaaataaacatttatgattaaatctgaaacagaaatagacataaagaaattaaagagttgaagaaacccagatcttcaagatagcttcctctcctccttcattcacttttcggggtcgatttctgatgcctttgataatctaagtcgagtcccttgtataggaattagggttgtgcctctaattggaaaaatatctaaatttggtcaaaaatcccgtgtttcgtacctggtagcgaccaccttaatcgctggtcgcgaccataggcaaaggtggaaaaacaagctttctgccaacctcccctagtcgcgaccatagtcgcgaccagagaaaatggttgcgactaggctttgtcatggttgcgactgctgatcgtctttggcagcttcaacagatttttcaccaaattgtcccgtcttttcgccaattgactgaatttgaactacaatgcaccgggaacctgaaacaaggaaaataaagcgtaaaattgctccaaaaatgctacaacaacttagaaaacgcttattaatgtgacccggaacttaggctaaaaatagcctaacgagaggaaagcacaaataagctctaatagaagaatttagggtaatttgcgcttaaaatctcttaatcttaaagtttggcacgataaatctctaaattgaaataattagggttgaattccccaatttattgattcgttttgttctatactttttctgtcttttttagtctattcagtgccaaaataaactgtcatggtatacacaagtatacacgtggtaaaattttattggttcataacatattaataatttagatattaaaaaaataatttaaaaaataaaaaaaataattatttttttttctttttcttcttctttcttcatcttacttgacatatagaatatatacccgaatgataaagaagtgccttctcaaacctgtatcttatacccaaatactctccaaaacacaatacattctccctctctgtcttcttcagagccaaaatatgcagaaactcgtgcaaaatcgcaactacccacttatttgattcatcatccttggaagaaagatgagttgcattttcatagggataaacataaggcaacttctaccaatcaccttcccatttcttcgtgttcttatccatttaaaaacctctagataaatgcatagggaatgtgttaacccaaaatatgttagctcactataatatcatttataggtggctaagtnnnnnnnnnnnnaaatacattgaatggtgtaacggtaaatt

SEQ ID NO: 145939 - DNA, 784 bp, Cannabis sativa
  modified_base (451)..(459): a, c, t, g, unknown or other
ttttcttagatattaaactagaattaataattagttgattttattcaagataattaattatttctttctattttaatacatttaattaaatagaaaatgatatttaagttgtatttttttttattttagatcaacttaaattagaataatttttaaagtatattttatttttttaataatcattttttcatgtaattttagaaatacatttatttttaaatgtagatattttaaaattttaaaaaattagattaaagttgaaaattaattttttaaattaattttagatcaacttaaatcgagtaatttttcattaatgactcatatataataagtagactaaaatatatttaatattttaattagaaaattgataattagtttatgaaatatatagatagttattttctaagtagacttttgatattttttctatatatatttaattaannnnnnnnntaatatttaagttgatttgttcaaaatacttaaatattggacatttttcaagaaatttaattaaatagaaaaattttatttgtgttaaacattaattaattaattttagatcaacataaattaaaaaatttcaagatttattttattttattttaattaatttgaaaatatatttaattaaatacattggattttgaatttaattatatagatatatatatatatagttatagaaaattagatttgtgttaaaaattaattttaattaattttggaccaactcaagttaagtaattttcataatatttattaaaaattaatacta

SEQ ID NO: 145940 - DNA, 714 bp, Cannabis sativa
ctgttattgaccctacagtaagtctttttatgtctttccacaattctcttagaggttcaatacctcctaggattgcagcaagcctaccttcttcaataaatcttttcacttttgttgtttcagtcataaatctactgatgtaagctctcaagggttcctatagtatttgtattactttgactaggtcttctaagtaaaatgagagttgtagagaagaagagaattgtgcatgaaattctgacatgaaagaattctacggactaaacatccttggagctaacctgaagtaccactgctgggcaacctctacaaagtagttgggaagattctacaccgtacatcacctctcactgcttgtaagtctatttgcattttaaaatattaatataagataaaggatcttctttgcccgtatacatttttcatgttggtattttgaacgtgggcggtaggtcgatagtgttgatttctggtgaaatggtgatcctctagtccgatcaagttttaaatctgtgagttttgggccagttaggccttgaacgtggctcttaagttgatctatttgtgcttgcactaatggatcaacttgacctacatgttgaccaacatgtgacacattaggatctcttagaactgggacgggtacagagtaatttttattatctagttatacagtaggagggatatcatgtttgtctaatccccttctgtgat

SEQ ID NO: 145941 - DNA, 515 bp, Cannabis sativa
taacttaagtattattactataaaaaaaaaattaaaaaaatgtatttatttgcaactcgaaattagactacattacttatgccgcaaattactcctacaaaaataataaaaatcaaacaggcacccatcaagtacattcggatgggaaattaatcccattcacacccccattccttgtttagacgacaaataccctttctaatagagttgggtatccacccagcccatcccaatacttttataaagtgtaatattattattagtacaattcaatactagctcccactcatattaatttaataaaaattataaaaactgctaactaattataaaacaccatatcataaaggtgctatgtatcttaggcggcgtttggttgggatgaataaaaatataagaatagaaatgagaatgagaataagaataggaacgcaatagaataaaatttaaaatgtatataaaaattgataaaaaaatcattaaattttttatcttgttacattgaaatggtcttt

SEQ ID NO: 145942 - DNA, 744 bp, Cannabis sativa
aaaaaaactaatataattaaatatcaatatatatatattatgtacaaataacaattattaaaatatggtttatatataaattttttattttaattttttttgttataatatttaaaatatatatttttttatttaataaatatattttttcaaaatataagttttttttaaaaaaaaatctaatataattaaagatgaattatatattatgtacaaataaaaattattaaaatacagtatataaataaatttttgagatataaataaaatttccattatcactacttttttcttaggtttggactgtatataattagttgggcggttggagtggggtatgccacgtttagctttgtctctaaaacacaatagacaagtagcatgataaaagcaagttcacaaacatcacaatgattatttgtattcttctttggaattattttagatttttgttttatctacttgttttattttctatactaaactattgaaaaagttaacagaatcaacaataaataaactagtagttctccattgggggatgatcttgtggtatatgttttagggtagagcttttttaattatttttattatgatcgcatacgtttgtacgtagttatataaaattatctgtaaatttttaaaaaattttaagtaatttacaaagttaaaagtaagatttaagtattttgttgcacactcgactattttttatacacgtagtaagtaattgtttaaacttta

SEQ ID NO: 145943 - DNA, 1601 bp, Cannabis sativa
  modified_base (29)..(39): a, c, t, g, unknown or other
  modified_base (523)..(538): a, c, t, g, unknown or other
  modified_base (699)..(699): a, c, t, g, unknown or other
agggtgttaatgaaatatacttgttagtnnnnnnnnnnnctggtaaaatatatccaacatttgtcccctgtgccgccttggctgaggacacctcacgttctaacttagcattcctacgctgcgcctcttccagacggtgtctcaggcgacgacttttcgtttcataagttctttctctcacagattggacaccaccacgattgagctcttcatccctcgttccgggtttctgaccattcccacactgagtttgccttgaccatgttgtctgcatactaggaccaacgtcgggttgagttctctcggaacgtgtggtccgcgcactggggccaccctcaggttgagccctcctagaacgggtggtccttctggactgttgattggtagatcttctggagctcatgggatcttttctagaacgatggttggcttcctcatgtggggtgtttaacattttctggattttcagccatgaaggaggttgtttttcttcaaaagaatgagggttttttctgagcttttnnnnnnnnnnnnnnnntgaaagcaccaaattgttaacgcatattttcgttcaccaaatttgagcctcacaatattgatttcacacagaaaaaattaaatctatcaaaataaagaatatgaacacagggttgttacgtggttttgcagttaaaattttgcatagtccacgagtcaatnttattcagatttctgagtatttctcaaggcctctttcatatgagttttttcgtcccttttttgaacttgtctgccactatttataattacatagtggacagttaattacaaagttgaccgaaataattttacagcaatcatccctaaacttgtgggatttgattacatattatgtagtgtaaatgcggtttatgatttgaaaactgtatagctgtgatttttacgcttctactgggtcaacactatcgtgtattaaacatgtctttaactgttgaatctggagatgtctcgatataaacttaattatagtgatctcaatagcgagttggggccattcttccttccgaggtcgacaatgtatgtcttgtgtcgatcgcgactatttataaagaagtcttctgactcgcttacttgttcttcgagccgatctgacttttacacttagtttgttcattgcaagctaaggacttttatagttggtaagtgtcactttctccagtgtctcgctatttatatttagcaacatatggtttctcactaatacactatgtcagtttgtacattgattcctcgcctaagatcttacagtcagcgggttacaaatatactctgataataacgtaattaatgattattccataaaaagatattacaccgattctcattcccttaatcttgacacgtgtcctccagccgaatttcgaatataacagatgtaatcattgaaacttcttctatatatatatttagtggcagacccaagatttaaattgaggagggacgtactttattttttttgtaagttaggggggctaacttttttttttctttttttttttttgataatgaaatagctacttcattgaattataagtattcagagtacaaaagagattcaagat

SEQ ID NO: 145944 - DNA, 605 bp, Cannabis sativa
ttttgggctttctgggtttggaacacagtagtcgcggccccattcactgggcgtcgcagtccgcctccttcaaagttctgggtcttcaacccaggtgtcgcgaccccgtgtagggagtaccgcgtcctgccatttgtttccgggcagttttgaatataatattcgaatgttcgtaactttctgatccgactctgatttgggtgttccgagtaccgttggaaagcttgtaccgaggtctttatgtgtatcttgatttgaattccaattttattatgtatgtgaacgtggatttagggattaaccctatttttgaatcccagaaattgtgactaggattactggcacttggtcaggagcacccggggatttagaatctccacgcttgcgggacatcaggtaagacagtagttatcatgtagagttaagcacagtggcacttatgttgaatattataattgtgattaattaaaaattgggattaggattattaccctaaagtgagcagttataaggtttagggttattacactagtgatgattgatgtttaaatgctttatatgttaagattaagaattatgcgttcaaggcataatttgattggaca

SEQ ID NO: 145945 - DNA, 992 bp, Cannabis sativa
gttcgttacaatttcataaactttagaaacgaaattaaaaaaaaaaaagaaagaaaaagggcaacattgtatcgttgagcatggtggttttttaatatttaatatcaattcaaatattaatggaatttatttttttattattttattatttataaataatatagaataggtatagtactattaccgtagatattaaataaaatatttattaataaagatagtaatttatagcctttaatttaatctaatgacttaaattaatgtttaaaaactacatcataattaatatatttatttatttataattaattttaaatattattaatatagatttaattaataaaatttcaaacccaactctaaatcataattttttactttttattttatgtctattaaaaatttaattttaattatatatatattttttaattttaaatttacataaaaaatattttaattaaatttatttttacaacaataattatatttataaaaaactctaacatgttcaacttataataattaatataagtactcttaaaacaattaaaatatcatgagttcaatcttttagaagcaatattttctttttctttatttatatttaatttaagcattcaattaatttaataatttcaaaattttatcatattatatgaattaatttacttttcaagattttaatgtttaatgtatttaaaaattttaaatataaaattaattatatattttaattgttttatttatataattatgcatgaagtagtaaataatacatattcatatttatttttcaacttagtaagataatgttcaatgtatttaaattttttaaatattgaattaattatttattttaattacaatatctatataaatgatgcatgaacttgttagtagtacacatatataattagaaggagtaaatgtatattattacattgaaaagtacatatgtatatatttatattttatacacaacaaaatat

SEQ ID NO: 145946 - DNA, 799 bp, Cannabis sativa
  modified_base (393)..(397): a, c, t, g, unknown or other
cgattattgtgggtgggaatgtaatagtccaattcgcccaggtagccatcctggtcgagatcccgcaagcgtgcctcggttaccttggatgcagggctcacacacctgacacccaaagtaccttgccttctatgaggaaccgcagcagtaagttcctcactggcataatccatgccctcaaccaggacgtcaccatcagcattaattggatccctggcctcattgtaatacccatagttttgaggtgcaacctcctcttcttcctccgccttggagggactgctaggacgaacatcgtcctgctcctcaatctcctagacctcagcgtcaacttcatgatcctcctcctcgtggacagatggatcttgttcggcgctgggtaaggtggcgtgnnnnnccacttgagggtcagatgcgttgagtctacgcattgtcttttttgtgcgagccatcatcctatggctggacagaagacttaagctagaatgcctatcactcgaagaagttgggctagaacgaagacgagggtgatcctcgtgcaagagttgaaatagagcatgggcaatttggtgttcgcttccccaaaactcacatgggttcttctacaaaagacaacacgcaagatgagtgtttggtcgagatatcgaacattaaaataggaaaatataccgaccagaactactcaacagattaaagaataagaatatccaacgaaaagtcaaaactcaggaagtttgaaatcttcgcgagttagggaagaaaatttcatgaagcttagaataagcaaaatgaaagacag

SEQ ID NO: 145947 - DNA, 596 bp, Cannabis sativa
cgtgaaactttggtcgcctccatcttgaatctgctgatgtatgcccggagtggctcacctagtcgttgcttaacttcgaccaagtctcccaaatgcaatggaagttggcatgaggaggagaattccacatggaatttcgaagagaaggttttcaatgagctaaactttcgaggagccaacttgaaataccattgctgagcggcttccgacagagtggcggggaagattctgcagcatacatccccttgtactccttgcaaatccatttgcatttcaaagtacttgagatgggaaagaggatcttctctccccgtatacatcttccacgtcagcattttgaacttgtggggcagcggcaggagattgatctctggtgagaaaggagttccgcgtgctcggtctaactcaagatgatattacgttgtgtagccatgccgtgaaacatatttttcagttcgtcaagcaaggcctgtattgttgagctgacctgcttggcgttctggtctacttggattacgtcagcatctttttgagtggagatttgagtacgggctccaggttgcacgatcgtcgtaatattctgttcgtccattccc

SEQ ID NO: 145948 - DNA, 658 bp, Cannabis sativa
ttaccaaccactcccataaaattgagaatacgctcgatcactgtgagccactgctcagccttcattacatcaggttctcccagaaaaactggaggtgcctactttcaaaatctttcgtacaacggctccatacggttgccaacaataggttattctgctggcaccgctggaactgcaacagcctgagcaacttgaggaggcacggcaggaggaccctgctgcctcaatctctgaatctcttcatcttgttgacggatccgatcttgcatttctgcaaatctttgctcccattcctgaggagcttgtggtggatttacagggcgaccaccctgagctccgccacgcccacggccgcgaccacgaggattttggggatttctctgaccgcctccggtctcaacaatgccaccctgacttcttgtatttcgtggggcgtccattttataggacttagcctgggaatccataagcaaggcaggttagatagcgatcaaaacttaaagtcgctcttaaggacttaaaggcaacacactttaagattgtacatgtctgatgaagattgtacatgtcttagcaagcttcggtaaacaaacctggcggctctgataccaaaattgtaacgccctaatgctaaacgctacaattatttttcaattgc

SEQ ID NO: 145949 - DNA, 620 bp, Cannabis sativa
  modified_base (37)..(55): a, c, t, g, unknown or other
tgagccttcccttttctattccttggccgaacctctnnnnnnnnnnnnnnnnnnntctctctctctctctcttttctctaattttcaagtcatattagattagaggaaagattgatttcttaaaaaaaaaatcgactagaattaacaaaattcactaaacaaaatttaaaatagttccaattaaaattacatacaatacaaagcggctcctagaatcatctcaaaacattacatcaacaacccatccaaattcatcaagacaaacttaaatgaaaaaaaagagagagaaaattacccaatggaccgcaccactctctctttctctctaaaacttgaaataaacaaaagatttaaggcaaactaattttttcaagtcattattcatccttaacaaaactattatttttaaataaaaaatgcttgcaccagatctgaaagcgtcatcacccacttcatcatcttcatcttcgtcttcgtcttcgtcacccacagatcttcgttgaagcttgcttgatcgcagatcttcattaataccataaatagagaaatcgagagggaggaatcgaggagaggagaccgtcgtcaaacttgctctcagtcgcagatcttcattaatgccg

SEQ ID NO: 145950 - DNA, 525 bp, Cannabis sativa
  modified_base (177)..(181): a, c, t, g, unknown or other
gataagatatcataaacttacttttatatctttctaagtcactatcactggttgatcttaggtctatgtatcttaatcctgatatgattaggttcatcttcattgtattatttgtctttttcaagttgttcatggaagctaaccaatggttatgacggatatttacatcttgggaannnnntagttcaattgagtgggagtgctaatcataaatatgaaatctataacttctataagtatttagaagtgaaatgatgattttctttgtgcttggcttaatagagataaatgattgaggcctcaatttagtgattataatagtatactgtaataccatttataggtagctaagcatttgacggataaaatgcattgaagggtagaacaataaatttttccattttcgatgtacatcatctatagaggacctttgactattaggattgtaacaatagataatcataacatatctatatcttggtacatatagagcgttctatttaattgagagtgtaattcaattca

SEQ ID NO: 145951 - DNA, 788 bp, Cannabis sativa
  modified_base (107)..(108): a, c, t, g, unknown or other
  modified_base (332)..(333): a, c, t, g, unknown or other
tcaactagtatggggaccacgggtctatataaccgagcttccaataagtctgtaaggccctgactctcaggaaagccacgtgtgtgcttttacaatcttattatcannaatctactagcttaggaaaagtgtggtttaaataaagtttgataatttaaaatatacatataatttttttttaaaaaaatgctattaaagtatggcgatcccttgtttataaaatttccttataacaaatttcaaaactattattaccaaaataaagttacattttcaaacacaaagaaaagaaatcgatcctgcttcctggaagccaagacaccacggctganntgtacattactgggagacctctgactcatggccacacacagctcctaatcttcttacctgcaccatgaagcactcgtgagtcacaatgactcagcaagaaaagctactaattagacattatggaaagtgcagacagatttcataataatataatatacataccgataggtcttacatatgttaatctacatatacaaaaatagcataacgcttatgtaagcacacttaatacataataaagaatattcatagctattcataatcaactatctcagtggttcataaagtactctaatcatacatcattataaacactcactttcagtacttcataaatcaatctaactcatatattacggtaaccacataatctcagtgcttcataaagcactcaaacacataatcttagtgcttcatatagcactcaattcttacatccctacaacatgtatttt

SEQ ID NO: 145952 - DNA, 567 bp, Cannabis sativa
  modified_base (32)..(60): a, c, t, g, unknown or other
  modified_base (524)..(525): a, c, t, g, unknown or other
tttagaaagttcttatttaggatgttaataannnnnnnnnnnnnnnnnnnnnnnnnnnnngtaaaataatatccaacaaaaactactttaaggtgattcgtaatcaccttagaaataattttgtatagcacattacacaaagatataggttgcagatcactcatagaaacaggctactttttctttggaataaggacaatatttgtatcatttagagcatcaagtaaaatagcagtatcaaaaaaaaagtctaacctgcataaccacatcatccttcacaacattccaatatttctgaaaaaacccaggcgtcatatcatcaggtcccgaagatttgtccagatgcatatgaaacagagcacgccacacttcctcctcggtgaccggaccaaggagttgctgattatgagcccaagtaaccgcattaggagtagcatcaatgaccagagagaactgtaaagctgatgtcgtaaatagattcttgaaataacccaacataaaatgcagaaaagataaaactgcannattgcaaaaagtgaggctcaaatctactatgtagggccggcc

SEQ ID NO: 145953 - DNA, 604 bp, Cannabis sativa
ttttagctttgtcatttgacaaaatttacttttaaattacctaagagatatgacttatttaaaaatctctataaattattgaaattgttgcttttgaattttgacatatattaaattatgcatataaattttttggccattaaaaattattttgaagtattgagattatttggattcaataacttccatccaactctactaatggacgcctaatgtggatgatagttcaggaagcttaattttgtaagtgtcaaaattcaagaaacacaattttgtacatataaaaaatctagagatcacgctttgatatacggacaatcgacacattattaaaactaaatggaattggacataagtccttgaacaatcatagtagtttgggaagaatttttaacggcctataaagttcaaaacacgattttatacatgttaaaattcgagggacaaaagtactaataataatgtaagggagttctatttgtacctaacaaaatgataagtacaactcaatattaaaaagaaaaaacaagcttaaaataatttttaaaaagtcactctcaatatttttaattttttttcacgttattttattttattttatttt

SEQ ID NO: 145954 - DNA, 1571 bp, Cannabis sativa
  modified_base (696)..(701): a, c, t, g, unknown or other
acttgatttttatatgtgttgtatcacattagacatattctaaatttttatgatttacaaattgtttgaaaagttgaaaacttaatctgcatattttctggactgttttggggtataagtgccaaatatatttttgtgtacaaatatttatgcaagttatgatttttagtttattcaaaattcagtcgttgtgctgccgaattttctagaaaataaaaaagaatatgttcttttcttattcttattatttgcatgttttgtttatactgatgagagccatgttgatcatgttcggttaatattgttgtttcatgacctagtctctatgtcatcataggtagatcaggtgtgcactcacctgtaggtgaaagacctagaatctgtacaaggagtgaattaaatctgagcctcggtattatgatggttatcaggtgcgactactttgtttaggatgtaatttttctatgattggcattgagagctaggggtctagtggacggtgtgatatgcatttgacacttgattttgtgattctttgtggtctctctattttgtttctatattttgataatggtgatgagatattttattttaaaagctaaccatgcaggaatttgtattaaagcaatgggtcctttgatattagttattttcctactgggctttataagctcatcccctattttctcccattcnnnnnnctcagtttgatgctagtggatgaaaatggtaccgttgaggaagaaaattattatttgtttagtcttattctacttattaaactgctaatgaaactgctttttttttgtatttaagttggaattgatggtctggataatttaaattagctatgtaccagttagaaataaggaacggatggatgctagatattattttggtattttattaatttattaaatctatctatatggtgattatataactgtggaaatattattgttcttttatattaatgagtgatcttgattttattactaatatttttttaatgatataagagttaattcattattttaagataagtattttgtgatataaattaaatgatcatttaataattttatctccatataagggtccaaatgtgacatttgactacctaaattataaatattacattttattccactattgcaatccactatcctctctcttcttcttactcttacctctcacaatacttcaaccttcatatttcttcatcattgttcgtgatcgcatccccagtacttgcttctccatcgttctgatcctccaacaaactatcacggtaaatatctctctttgtttttctttttttctttttcgtagtctgaattcattccattttatatagccgtatttcaatattatgtgaattgtgatagtattttagttggtgtatatactgtttgatataatgtctatgtgattcgtaaaagaattggttatattaagggccagtgatcacgattatgaagcaacttttttgtagtttaatacctcttgatcatattcattgttcaagttaccttaagagttttctattttaattttctttgtctatcgtt

SEQ ID NO: 145955 - DNA, 817 bp, Cannabis sativa
  modified_base (73)..(75): a, c, t, g, unknown or other
tgttgggtctttagtgttggccaagactctgcgtagtactaaatctcctaccttgaagcttctttccttaacnnnggaattaaagtatctggctactttctgttggtatcctgctaaccgtatttgtgaggcctccctacgactctccaataggtccaacgattcacccatcagttggtgattactgacttggttgtatgtcgatcttcggtgggagggtgggtctagctcaaccggtatcatcgtatcatacccataagcaagggcaaagggggtatcaccagtcgctattctttccgtcatcctatacgaccacaaaacttcaggtaattgttctgtccagtttccttttccctctttgactcttttctttaaggtgtccttcaaggtcttattcaccgcctctacttgcccgtttgattgagggtgcgagactgtcgagaagctctttcctatgccatgtttaatgcagaaatttgtgaacatgacactgtcaaattgggtaccgttgtcagataccaatttatggggtaatctaaacctacatataatgttcttgaccacaaagtcaagcaccttcttggatgttatagttgctagtggttcaacttctgtccactttgtgaaatagttgaccgctactaccgcatagtgcactctgcctttgcccttaggcaactgaccaatcaagtctataccccatatagcgaaagaccatagactctgcatttgtgttagctcgttgggtggagcccttggtatttttgcaaacttttgacatttttcacaccttcgaacatactccatggagtcttct

SEQ ID NO: 145956 - DNA, 590 bp, Cannabis sativa
  modified_base (389)..(389): a, c, t, g, unknown or other
gtaacaaccatagatatgacagtctcaaagctcacacacaacgagactgcaaatgacttcaaaagcatatgcactcaacctcaacccacctaatcctacatgcttgaccacgtactacaaccaaggtgttgaattctacacaagaactatgtaccacagggttgctgaggagcttgatttggagaataattattttgtcataagtcaggaggaggaaggggagtggcacatattcaccattggaaggttttaccatccagaagtccaataccgagttcattactgtgaaggccgacgagcactacacggtagttgcatgctctatgaaagttaggggtacccttgtagacatttatgggctacaatgaaaagattaaacatgagaagantacctaatactcttctcatgaagcaatggagcaaatccgcgaagacaaatctccacctacattttaacccgccaacacaaccacaacaacacatttatgagattgctaggtttggatctatcagttccctaacttataacttcactttctatgcatcaaaatcagaggatttttataaccgtgcaaaggaagagattgaac

SEQ ID NO: 145957 - DNA, 842 bp, Cannabis sativa
agtacgactctatatgggtcatagaagataggtttacaaagtcagcgcacttcttacctgttcggataaacttctccattgatcagtatgttgagttatatcttagagaaattgtttgtcttcatggtgtcctaaattccattgttttgaatagagattccaaatttacatcaagattttgagagagtctacatcgagctatgggtattgagttaatgtttagcacatcatttcatcctcaaatggatggacaatccgagaggactatttagatcttagaagacaagcttcgggcatgtatgcttgactttggaggatcttgggtaaagtaccttcccctgatcgagttctcgtacaacagcagctatcaggcaatgatcaggatggatccttatgaacttttatatggaagaaaatgtagatcacctatttaatgggatgaagtgggtgaaaaaaggttcttgggtcccgaggctgtttagagaataagtgaggcagttgataaaatcagagtgcaaacgatcgcggctaagagcagatagaaaagttatgctgatccaaagtgacgggacattaattttcagattggggacatggtatttctccgagtgttgcctatgaaaggcatcaagcgctttggtaagaaaggaaagcttagcccgaagttcattagaccttttgaaatccttgagaggatagggcaagtagcgtacaggttggctatgccccagcgctggcaactgtacatgaggtgttatatgtttttatgctttgaaagtatgtcttaaattcgtcccatattctgagttatgaagcattgaaactatagtcagatttatcat

SEQ ID NO: 145958 - DNA, 911 bp, Cannabis sativa
aagagtgtttgctcttactcaggcttacgcaaaagccagtccctcagttgttacaggtcagctctcggtcaacaactctttcttctctgtattgtttgactctggggccactaattcctatatggcagtcataatttttgataaattgggtagaccgtttgatagttacgataaggggtttacaattctactacctggtgaagaattagttatctccaaaaggagggttaggtctatgccgataagaattgaggatagagagttgagtgctgatttagtggaattaggtttaccaagttttgatatcatacttggaatggatttcttgtccaaatactcaactagtattgattgtaagcggaaaatggtgatcttccaactcgagggcgatgaaccatttgtatttgtgggatcagtttagagatctcaaattccagtgatcttagtattgaaagctagagaattattacaagatggacgtcgagggtttttggcagtggtattggatccacacggtctcagggctagtttggtacagctgtgctgtggtgaaaagcagctgtaactgtgccgtagggaaaatcaactgttatagaattgtagaaaaaagctgagctgagtgttttgtaaattataaattttaaagtgctacgagttgttaagattttataataataattataataataataataatattttaatctattttattaaaatcacaaatatatatataaaaaaatatgttatataaatttttttttctatatatttttaatttttttttctataatagaaatttatacacatttgataaattataatttttaatattattgaattatatttttatcaattgtaaaagaattgtagtttataaaaaatttaagttgatattgtttgttaataat

SEQ ID NO: 145959 - DNA, 578 bp, Cannabis sativa
  modified_base (48)..(49): a, c, t, g, unknown or other
tgattagcaacgagctgcacagcacgtttaaaaatcacgtaatacgcnnaagttagttagggtgttacatgtgtgcttttcaattttactatcattaatctattagtttaggaaaaaaagtgtggtttaattaaaatctttaataaaatttaaaataaaaacttttattcagagtactatcgtaatatggggatcccctgctaataaaatttctataaaacatatttcaaaaccgttattactaaaataaagttacattcccaaatataaaagaaaagaagtcaatcctactttccggaagccaagacaccacggctgatatgtacactgctgggagacctcaggcttatggatgaacacatctaccattcttcttatctgcaccaggaagtaccagtgagtcacaatgactcagcaagaaaagttattagatttaaagcattgtaaacgtagatattcacatctcaatataagaaacatgtatatatatacatatatgtgactcacacatatccatcttgcgtaaccatatagcattaacatttatacgttcccacatactacgcattatgagaaaa

SEQ ID NO: 145960 - DNA, 634 bp, Cannabis sativa
ttttccaagctgtttaaaattctcattgtaatcaattcctattatcattcttatttcattacattactattaccattaccattacattacatcaaaccaaacaccagaatagtgtagaattttgctccttaaattttttctagttacattatgtttggttggagtacattaacatcacaatagtgtatatcaaaaaattacttcaaaaaatgaacagaatataattgaaaaagataaatatttactatttttataaagttaattaagattttttttcttaaattttaaaatatactaaatcaagcttcttaaattttttagaccgttaaaattcactcaaactattgaaattgttggatttaaaaacttttgtccaattttatttaattttaccaatacactgattttccatgtaataaatcgtgcccccgaactttaatatctactaaatcatacctccaaaatttaatgtgtaccaaatcatgcctcccaaacttttatccatgctagactttcgttagtgaaattaaatataaatccttaaatctaacaatctcaataattcaaaagaaaagatttaacggtctcataagtttaaaaaaaaaaaaaattggtacatatcaaaatttaaggg

SEQ ID NO: 145961 - DNA, 864 bp, Cannabis sativa
ggaagaagatgacgaggttgaggaagaagaagaagaagatctgtccaagtctcccagcatagaaaatggccctttggccgagacaatagtttgccccaagcagtacgttccttttttttttttgcaaagacagatttgcaatgttggatgaccaactttgctttttaatgcctcgcacttttaatatgcgggtgtttgcttgcattttattcacaatataaaatatctcatgcataaagtttattaggggtttccattgattgtcctttcctccgacgttaagtagttaatttcctactttacattcgagtagcttatctgctcgttccttaatctacgagccatcatcgattccatctcgcgatcatcagaaatgatcttattttaagcaaattcaaatatatttttaatgaacttgtcatcttgtacatattttcattgcttacatgagtagttaaattttctacccacgtgttgggtttaagtatttttttaagacatttggatgctcgtttaatactttcccttagcgtgagccgatagtattcagctttatgcgctaatcataagttttgattttcctttctcatcagataggttgtaaatcaaaaattacagttgtttgatccctttctcgtcagaaaggtttgatcaaggcgttataacgattcgacccctcttctgtcaaaaaggtttggtcagggagttataacagttcgacccctcttccgtcaaaaagtgttcgtcgaggcccttttttaaaaagttttcaaaaaaaatttattttttttgaaacgatgggtttgcattgtactatgtatttccagatcaattccggtgaatcacacatatatgcccctcaag

SEQ ID NO: 145962 - DNA, 1631 bp, Cannabis sativa
aacttaacaatgatagataaatgctctcaaacaaaactttattaaaatgaggatggaggatgatgatgatgatgattatgcctcttgccaatgtctttgactaatttactaaagtgttaataaagtgataaaattataatgcaagtgtttctcccaatagctaatgcatagctcttcccaaaacaaactcaatttttcttagaacaagctcgacctcaatcctaaagcctaacattttgtctccataagttgactcaatgcttccctctccactaatgtagacaaatactcaaccaaggattaataggaatttatcaagcttgtattgttaggctaaggtgaaggtaagataaaagatattatttttggttgaaaataccttaaacatctcaatctttttatgacccaagtaataagagcacataatctcactttcccaaaagaatatccccacaaacatttaataccactcttgccactttcaaaataagaaagagaaagagaaactttttttaaaaatttatttcactacaccccaaacttaatttcaaataatatttatacaatttcaaataatatatttagtcaagctatgcacatgagattgggagaaacaattagatcataattttttttcactccaagaacaatcatgaatataattagccaattacacaacaaaagacaataaagaaatgaatggatgatttctttttaaaaatgtggttaatcattgagcacaatgtcaagatcacactaagcaaatggaattttctcactcctacaaaaatatgacaaaatcaacaaaatgactcaaaaataaaaactgagataggtgattcaattaatatcataactaagcaatcaacaccccacacttggagaggtgcagtacctactcaacacacaaaaaaaagcacaaagagtaataacaccaacatgaacaatagttacaaccaccaacacaatacataaaaatcaatataaaggaaaataattaaatgaaagtaaattggagagtagagttgagaaatgcttggtcaatattgggttgaatcaggcttgagatacttcttcaaaatagcctcatcagattcaaattacaaccaacgaaatgcttgttggatcctgatgtagcaactaccataacaaatactcacaaaaattgcacttcccaagcaccaaaacgtatctataatagtcaccaaggctaacaactaaccagctctcccaatgcacagagcactcgacaaatatatcattttaatccaaaaatacaaactagtatagtgccaaatcaacccccaaagtacgagaattatggcatgtagagatgagggcgaacttttggaaaggttagatcgggccatgaaggatgctgcacatagtggaatggagcttgaatggtgttcgactgagagatggtgaacgaagatgggtgttcaggcgaggtggtgagcttgggcagctatagagggttttgagatggggaagaagatgggtgaaaaaaaaaatatgaaggaaaatagtgttaggaattctaggcatttcaatttttttttttcatttaatttattttggggaaaaactaattaagcatttgcctttttctttttcaaaaattactacag

SEQ ID NO: 145963 - DNA, 512 bp, Cannabis sativa
catgtttttcctcaccttgtgaagtggaaagcttgaagttcctacttcaacaaggatattgctggaaacatcagagataggcctggaagaacatccaaaattaagaatttgatttgaggggtcatgtggtagaaagacaagaaaatccaactagtcataaaactacaaacacatacatgtttttcatttcaaacatatcaaaaattttgcaagggcttttcctcctacaaactttcatatcattatgcacaaaaaacgtaagcattcaaaataaatctatctatctcgaaggtttgagtagattaagtatatggacatcatgaaccattttagacacatatttagataactatcaattatatatataaatagatatttaaagagtagtgagtccgtacatttgcattgtattaggacaccattcatgttgcaagcacttgggagggaaagggcaagagttcgattaatgggaagttgaaaagggacactgacagtgttgggttttatgccct

SEQ ID NO: 145964 - DNA, 2219 bp, Cannabis sativa
tggacagaaaatccatcccaagtataatgtgaaactccattaattccagttctataaggccaacactcaactccctatcctcgatcctaactggtatagacttaatacgcctattggagataaccaactcttcgttaggcattagggttccaaaccctctttcaagaaaatcacctagcctacccaagagatcgattacccgtgtagccccatatgagtgtgtagcttctgaatcaaataacacagtataaaagaagtcgtttacagcgagctaacctgtcactacagaacgactggctgcagcatcagcttgagcattagcatacaccggagtaggtacaaatgtcgcttcctgctcttgttcttctttctccgcctgagggcaatctttcttaaaatgcccaatcatgccacattgaaagcatacttttaggttgcattctccgggatggtgtttcatgcaacgtgggcactcaggataagaataaccctggcatccaccttttccttgaaatcttcggagccgcttgttccgtcttaaacccaccactgctgacataggtttcttcttctgctcaaccacagagcccctaccacttccaccataatcaggaataaggcaagtggcatcctgaccttctgtcataacctcttgaggtcttggaataaactcttcaaggctttcagcccaataagtattctttgtatttgaatcttcctgaaagtctaaaggttcattcatccacatctttccatgcaatggttccacatggttactagccatcctacgcttcgctggtagtaccaaataaaaaatgattggcatatgaggtaaagatactataggagacctttgttgtttcaacctctgaatctcttcttcatgtcgttgaatcatagcttccatttctgcaaacctttcctctaaatccaacggagcctgtgacagataaccatcactcccatcagaagccctccaagggctttcacctttgttacggggacaacttgcactccattctctccaaccgttactagccctgaccacattactctgactctccatattgcaacaggtgtccattctataggactaacctgtcaattagtaagtcagtctggtcaggcaacgacccaattacaaactcactaccgcacttatggattttaaggcaatgaattaaattaaacaaccataatctaatatgctccctaacatggtttaataatcacagataatactaaacaagtacgagcttactgaaccgtgaactgagctttctctgatgaagattgtacatgtcttggcaagctttggtagacaaacctagcgactttgataccaaaattgtaacgacctaatgctaaggcacactacagtgatttttcaactacagtgctgactttgctaaccaaagtattttcttaaaatcgtgtcaaattaaaactttaatattaaatattaaactttataaactttacataattgtttacaaataccgaggtcgcgtttcgaaactttttgccaaatatacaaaataactattcaggtcgcacggcgactacaaaataacaaccccatatgtcccgagacagaatgctctaggtcgcgctaccacgacatgtacaacttcatcctagctgaggctcactcctgttcaggttttgccttttctttacctacacataaaaacagaactgtgagtcgacagactctgtaagaaaagcatataacatatcatataataccgacctgtatctaggtgcccatacacctatttacaaggcttaacagatgagtaagaacgtcctaactggttgtgctattgactatgatatcacccactaccggcactatggtcgtactgcaggaccgacactatgttcgtgccactatgatagcatcaatagcatccaaaagtataatttgccatgatatcattcttaactagtacgatgcctgtactgctaaactgacacaatgtttgtgtcgctatgatagcaccaattcatactttctggggtgaatatcactcttatccagtacgatgcatgtactgctgaactgacacaatgattatgtcgctatgatattaccctaacatatacaatcatacacaaaccatgtatatatatcatacatatatacattcatataaatatcacatattatacatagttctttccttctttctagattcaagtgaattggccgacct

SEQ ID NO: 145965 - DNA, 640 bp, Cannabis sativa
actttcaaattaacatataggattactagcaattataagatgctcaactaacataattcatgcatcaaaatcccaaaaataactccaagaattcagattgagaaaacataacaaaatcatgcttaaactcatcaagatttcaagttcaaggacatgaactcaacccaacacaaacctattaaaatccagcagcataacaccactttaaacataaaattccaacctagaaataccatacaatctctgcccaagctcaacaacaaagcatacaacaatacaaactcaaattcaacaaaattagcaccaatcaacttaacatgcaacccatcatcatcaccaagttcatgcttttcaaacataatatttcagcaactaaaacaagattaagatcatagaaaactaccttaattctcaacaaaacaagaacaatgattttcctccaaactcaagcttcaatcaaaccaaaaaccaagcttttctacatgaaactttgaaacttcaagaggttagagagagagagtgagtgatcgggtgagagagagacaaatccagaaaattcatcctttatccctcaaaatcaatttaattcaatgtaaatcaaatattgtcaaatgatcattttgcccctagggcttaaata

SEQ ID NO: 145966 - DNA, 542 bp, Cannabis sativa
atcaactaagtgatattgacttaaaaagatataactgtaagtttgtgatatcttttccattatcaatatcgattcaatctgatgtatactcaatacatactttgctaataccctggaaaggacatttcacttatacaagtgtaagtaaactttatcgataattatcacgtcagtgtaaattcagtgcactgataaatcatgggactaaagactttgaaacatataatcacaatcactttcctattgtgatgacatcactgtaattgtaaataactatatgttctggatttaacaaaatttatatattaaaatcataatcatgaaaactacatgtaaacttaaatgacttccaatcttctattgatagcaaataagaatatattgaaatgagttttatttagggcataaaattctaacaatttttggattgttccactgttgtttcgtatacttaacaatgttaatttcaaattacacaggttaaagcaatcactaaatatttatttgaggtaactagaatgaaagaatcatggacagtaata

SEQ ID NO: 145967 - DNA, 1298 bp, Cannabis sativa
  modified_base (976)..(979): a, c, t, g, unknown or other
  modified_base (1158)..(1163): a, c, t, g, unknown or other
tcacatcaatcataacataggtaagtgacacgctaaatcactttctggagacttaaacttgaaactaaaagtttccctatcgacggataacacgtcaatatcctaaatataataaaaagggaaaaactagggttcccaaaattgccccaaccagtagaccagttcccaaccggaattccagttctgcggggtttcctagggaccaaccggaattctggttcgtacaggtccctctgaaccggaatttcggttcagtgcaggaatccaacaaaaattcataactcactccaaacaaccccaatttaaaccaaaccttccagacctattttatacaacctaaagaacatattcaaggcaataaaacactattataagctcagaaacaattttcaccatgtgagagcaaagcttgagctcataagctcaaactttgaacaaccctcaacacaagccaccaataagctcaaaacaacttaaataaacataatccaactccagaaaacaaactcaaacaccaacagcaaacacagagctcaaacccctaatttcatgaaaaattcataactcaaagcttaagaaaactaaagagagaggtgcatggaaccttaccttggattagatcactaacacttgacctacactctgattacagcaagaaaatcacacccaaagctgttggtccttagggctttcgaacaagagaaagagagaagaaggttttctctcaaattccaccttttttctattttcttaattttccaaaaagggtcaacattacacttagactattgtaacatattgtggccagctgccactctaaaattcagccaccaaaacctagggtaaatgactaaaaatacccttccccacatgactaatcacaaaatggactaagggtaaagtggtcatttcaactcacgactattctcgacattcccaatgtccaattatattgccccgctatactaaaaatacnnnnatgtgattctaatagccaaacaccacgttctaatattttcgggcactaaatatgcaaaattataaaatttctatatgtgacataaaaatacattcagaattcaaataaatcaccataaattaataatttagaattaataaataatttccataatgaaaccctaattatctgctaatttnnnnnntaaagctaagcggtctttacaataagtgtctcacacttttccaggatatagctcctccagctaacaggaaaatgtagcctgatgtagaccttctgctatcttggcatccagcgaaatcagaatcagaatacccta

SEQ ID NO: 145968 - DNA, 639 bp, Cannabis sativa
  modified_base (28)..(31): a, c, t, g, unknown or other
ttaattaatcacgatttccataaacctnnnngattagcaacgagctgtacagtacgtttaaaaaatacgttaacatgcctatactagttagggtgttacaaaaaggatagcttaacttatgtcatctccaattaagtcccagttatcttggaaaaaacaattggtaaagccatcaagttcttgagccttgattcctgggattgcaaaaatagctttcttgacttcatcttttgaatactccttcattaaaaaatctgcttctgccttggaaacaagaggtcccagattccctgcattgaccttcctcctgttttcctttttagaacaaagtaaatggtggtaaaatgaaaggaaagcctcagaaattttcactagtttatcagttcttactccttcctgatcttcaataaacaatacgctatttaatttcctcctctctttgatactagcatgaaaaatagccatattttcatctttatctttaatccaactaatcttggatttctagtacaaaaagaatttaggccctttaaaagctgcccatatttgatccgagctgcaacttctttagcagtaagttcatgatttacaggctctgattgcagcttcttctggacatctaacagttcctttcttgct

SEQ ID NO: 145969 - DNA, 1095 bp, Cannabis sativa
tgtgagaggggagtcggagaaggttgggtcgtggggtaggtggctgggtgctagggttttttcagttaagaagaagaagaaaagaagaaggaaaaatgttaaaaacgaaatgagagtttaggtagttttgccccccaaaaaatcaatttttgtagttaagtgtaaaagaatttaaagttcgggtggtttagccgctaatattctaaaaataaaatatttttaaaattattttttttttataattttttaatttttaaaatatttataattattttttaaaataaatattacgcgggccactaaaaaattttcacgtgtacaagtgtgtacacgtgggtagtccactgtgacacttaactgtgatttttggacggatgggtatagagcaaaacggaatggggttttaggtagttttgcctccaaaaaaccgatttttgtagttaagtgttaaaaaatttaaagttcaggtgatttagctgtcaatattcctaaaatattttatttgaattttacattatataaaaaaaaaacatataatattatagtaaaaaaggaatgtacattatatttataaaacataaaattaaaaattatacttacattattacaaaaattgcataaagcgtgggtatatttcctagtgtatatttatggcaaaacaacataaataataaaagggtacatggcggcaaaacccccaaattttttattttggtttcacttaaccactaaaacttaagtttgggcggtaaaactctcaatactcgcgttctattaacaatttaacatttctgtccattttaagtgttaagtgccatgtcggactgtccacgtgtgcatctacgtggatacaatgtacacatggcacaattttattggtccacgtaaaaaattatttaaaaaattaaaaaaattaatttaaattaaaaaaaattgtaaataaaaaaataatttttcttttgtttttctttttctttttctttcttgtctgttcatcttctcgatctgccctccctctcgctctatctctctctctctctctctcgatctcctctctctgtctctcttagtcccgatctagggttttcaaaaccc

SEQ ID NO: 145970 - DNA, 1572 bp, Cannabis sativa
gatatgatgatggaaatgttgctcttgtattttctttcctttctctcttttctttttcaccaaaagaaaataattacacaaaggctccctaataagatttgtctatatagaaaatgtatctcttaaagcaacatcccatctcaccctagtaccatgtccaaaataatgataaccatttcttagtgttatcccaatttttccactctgacgtggcatcacacgatggtgacacgtggaatcgactctgggtacctgctcgcaagacataggccgaacagggcctctcacacacttgctcaaacgaagccgtgagcgatccgcacataacgccaacacttagcgaattcagcttttgcatcgtgagtcatcaaggaaatccctttaactttgggatcagattacagagatatggcaagctttccaaatcccacgattggtgcattctgtatttattatgcaatccttctacttatagcaattgtaactagaagggaaatacttcctctccaagcttgtagccctataaatagtgatatattctcactaaacaaagggtcgagagattttttatctaagaattcatattcagagatactgttgtaagagctctaagaaaaggaaccattttccttgttcttaccgaactactcgggactgaacctctataaaattcttgtgtccttattttctttactatatttcattcgtattaaaccacttatcgcttacaaaattagactcactgtcgttggctaaaagcggggtcaacattttggtgctttcatttagagttgaactcaaggatcgctctttatttcaaatttaatcacaaatacgatagtggtacagactcgtaggggcgcggttgatccaacaaatccacaggtggcggatcctgcactgcagaacccaggaaacacaagggttccgccagcattaaatcatagataccctacaactttcggtgacggagtgacgactcttgtcgatgaaattgcgcttggtgtgcaagagactgggaataccacttcaacagccgaccagggcattaataacacagtcgttccgcctgctaccgattttcaaacaaccattggagatgacactgaaatccaaaacctccatgctgctcttgggctcatgcagggtcataccaaaaccctacatcatgatcaagaagaactctaggctgcggtaaatctcgcgtttgaagagcagaggtgcatgtttactgaatggagagataaggagatggaaacgttaagggctcagcaagcggtcattgatgatcgcagtcggcaggccacagtgctgattcgaaaagcctatcaggctgccagacagcagcctgcgaatgtcattcctttaggcgaaacagacaaagatccagcaatgaatacctctctgactataaacagtcagccatgaaatccccggtcacaggttccacctttgggccaagtggtaggcgggcagaccctgtctagtaattcatcaggagaagacatacatgatggctccaaccagataaattttgccattccacccgtcaaccaagcgaattaatcgttg

SEQ ID NO: 145971 - DNA, 608 bp, Cannabis sativa
  modified_base (39)..(58): a, c, t, g, unknown or other
  modified_base (116)..(128): a, c, t, g, unknown or other
  modified_base (180)..(185): a, c, t, g, unknown or other
tgttatttctgatctttattagtaagtaaatctgattannnnnnnnnnnnnnnnnnnnagggcacaaaacccaacacaaatgcgttctagattggtatccgtctatctaaggaacnnnnnnnnnnnnntcctcaagagatagaggacatgagaagggttccttatgcttaagcagttggnnnnnnaatgtatgcaatgttatgcactaatcctgatatgtactatgcagtaagaattgtgagcacgtatcagacaaatccaggagaggaacattggaatgcagttaagcatattctgaagtatttgaaaagtacaaggcaattcatgttagtagacaagggtggtgctttgaatcccgtaggctataccaattcagattttcaggcttgtcttgatgacagaaaatctacatctgggatggtgtttactcttggggatggagcagtggtttggagaagtgctaaacaaaccgcaacgtcagactctactatggaggctaaatacatagctacggcggaggctgctaaggaacttgtctagcttagaaagttcttcataggacttggtgatgttcctggaatggaaaaaccattggttttactttgtga

SEQ ID NO: 145972 - DNA, 708 bp, Cannabis sativa
  modified_base (356)..(369): a, c, t, g, unknown or other
  modified_base (655)..(671): a, c, t, g, unknown or other
atgcaaatgccatagatatatatatattatagttatggtcttttgatgacttaggtgtagttacaacaaagagttcttagaatagtccaagtgtgttctggtcatagaatacaaaacaactcatattctatacataaacatacagtttggatccattgacaaaaaataaatattaacaacttgtgaaagttgtattgtaatgttcaatgtactttggaaactgaaataaaatttctatttggaatcaaaaatttaaagtcaaagacttaaatttacaccaaatattttggagtaattattctagcttagaccaccactactaatctaactctaagtttaggttgccttaagtaagnnnnnnnnnnnnnnagatttctaagattgaggatttttgtatcatttcgagatagaatgtcttaaataaattcatttgcgccattcaatttcatagaagaaaataggatgacatcataagcaaatgatttataattcttttgtccaatgacatactatcgaagcaatttcttaatgaaaaagctaagagaaaaaattaaaggataatttccattaaaataagaatccaacgatgtcccatttagaagagagtcaaattttattcttattttataaatttcttcattgtttcatattgtannnnnnnnnnnnnnnnntcatctttggatgtacaactagatgtcgcatttacaa

SEQ ID NO: 145973 - DNA, 700 bp, Cannabis sativa
  modified_base (233)..(238): a, c, t, g, unknown or other
  modified_base (408)..(418): a, c, t, g, unknown or other
tatcattggatgaatggtttatagatcatctgcttatgatgtcattctgttttctcttatgaaattgaatggcgcagattactatatttctaatattctatcctgaaatgatataaatcatcgatcttagaatctcctacttgtatatgcttacttaaggcaacatagacttagagttatattagtagtggtggtccaagctaaaataatcactcattgtatatttggtatannnnnnagtctttgactttaaattttatattccaaataaaaattttaaattttagtttcctagaatacattggacaatacagtataactttcacaagttattaatatccactttctgtcaatggatccaaactgtatgtttatgtatggaatgtgagttttgtattctgtgaccannnnnnnnnnngactattctaagaactctttattgaaactaaactttttttcataaaaagaccacaaccacattttaatatatctatgacatttggatcttgttcatagtagttttcacaagatcattctctataaagagtaaatatgccgatatccacatgaaagtaagatcatctatattcaaatatggatgtacattcattggtagatatgagttatcgttaaattcttaagacgatcactatagattttaccttatgcaaagaaatttgaaatgtttgagaaatttcat

SEQ ID NO: 145974 - DNA, 1388 bp, Cannabis sativa
cctccagacatttgaggttaatctgtgttggaggcattggcattgcgaacaactcatcttcagtaggtagacgaacatcaggtccccacctttgagacatccacaaaattgttcttattaattttttaagttgacgctcaactcttggatccataggcatatcttgagtgggagtaggttgtgtgcgccgcgacgaagattgtccccttatttttctccccactcctggatttataccacgcctttcaccaagtacttcagtgagtattctcacttcaatctccttaacaggtccaacatcaggagtactggctcatttttcataagctgaaacgagctcaccctatattaaggatataagttagaaaatgtgcaaattaataacttaattaaagaaatcttttaacttactctttcaaaatgcctctcagccataaattttgatccctgtcttgtagggtacttcttctttttttttttttctattttctgcattaattttagaacgagtaataaactctggactggtgaagaaattacaaagaggaagccaatcctctggattaagatcactaggcgggtgggcaacaacgtcatcaaaatcagcaagacttttgtagtattttttaaaatttacatgtcttaacaactcccgtttcttatatctatttgccatttcagcccatgcaatgttgtaattatctcagaatgttcattgttgtcgatatcgtaataatactggaaattaaaaataagttagaaacataataattatgagtaaaaaaactcaaaaattcaatataattttcttacccgaactctgttgaagactgcatcatgatacatatttgggactttctcccaactaccataatgtcctgggacgtggattctaatctctctcccaatcaaacgagaaaaagagccactctcaactccaacaattttaccagcacggacgtcacacaaaagaggtagcggcaatgaagattttttcctctggtcctctaatttattcaggacattacaaccacgtttcctctttgctgaaacatcagaaatctcattttcatcttcagaagcgtctaaagtaaactcaccgccaccacagtcagaggggatcctagtaggatcttgtgggtcctcacccccaccatcacctccatggtatctagcaacatctgctgatattatactaaaaaatacactattttattaacgagtaaaccataaatataataaaaattatacttaaacaatacaccatctattggtaaaatatgttcaaaatacaatttaatttcaaattaactaaatacaatagtcactatcatcatcactaatcaaatttgagtctatttgtaggggtggagacacatcatttgaat

SEQ ID NO: 145975 - DNA, 678 bp, Cannabis sativa
tattttcattttttaattttgtttttggaacgacttttcacataaaaatcaacataaatatcgatttttatgttttatattttaaaaaacgtgtagtatgtagagcttcaaattagatatgagcccatttaaaaataaaaaaaaaatatcaatattagcggtttatttatttatttcttaagacttattagctctatagcaaacttacagatatatatttattgtaatgatgtttttttaattttgttttcaaaattaatgttgaagatttttacattgtttaaaattttcagaaacctaacagacttgacttttttaatttaaatatttcctagtgctattaggacaaggatttttttttactatgtaatatatatatattttgaaaagatatatattttatttgaatgatttttatttttatttttaaattttaactctactcctactaggagaatgattggttttagttaactatatatagaacaaatgagtagtgcatttgtaaacattatttcatttccattttcaagtatttgttgtaaagaagagaattagtgagaagatcgagagaagatgatgatcatcgtgatgataacgccaaaaatgatactctgctgcctctcaccaataccatgcccacaattcttaccacaaatagtaataataataataata

SEQ ID NO: 145976 - DNA, 702 bp, Cannabis sativa
  modified_base (646)..(669): a, c, t, g, unknown or other
ttttttttttttttttggaaaactaaacgcattcatatataaaatcaaaattatacctctcgatcattacgatcattacaggtaatgttcttaagtacagaggacacatccaacataccatagtaattgtggggataggcccacttagtcacattatgggcagcaaaattacattatcttacaacttttgaaaataggcaaccgacaaaaacaagataagagtcttctatagtggctagtataattatcaatttcccatcaaggacaaatatcattgagagaattgattaccacactagagttgctctccaaaatagaagaaacatcgcactacttctttcctgctacctctagagctaagaaacatgatgttgttgttcgaaatattttaccaggatctagatataacaagtatgttgattaacaccctaaatatgaatatctctaaaacaataaaattaaacatataagatttttagaaaaccttacattggttgcagtagaatataatgacttcttctcctcaaatctctaacccttgttcctttctgtcgcaaagtattatcaagatctgagcttggatctctttctctccttcgggttggttatcactctcttactaactatgattgagtacttgacttgnnnnnnnnnnnnnnnnnnnnnnnncactaaggattcgaatatgaagaacaatgaagg

SEQ ID NO: 145977 - DNA, 771 bp, Cannabis sativa
aaactagagcaatttagccaatgttgacttgagtttcttcagcatgatctcactcgaattctctctctctgtttctgtctctctctttctcttcttttctcttgcctttcactgattacaaacaggagtttaatatatagctgttagtggctgacatgtccagcacttaacagcttgagacaagttagttatttaactaactaaccaacttcccaaatacgaatgaatacaactaaaattaacagattttccaactgatttggatatcaaagctggtttaatttagagtggattatttaccacagaatcatatgtagccttaccaatgaataactaattattattatggctacaatacttttcttctttcttctaaattctctatctcaactggtcaacaaaataataccaccaaaatagtctttactcttcaatctgtacttcaaccaataactcatattggctatcaaatgcagctgcaggttattttgacatattctttgataacacttaaaccaaacataataaatgtatttagaatataacagaccaacttttcttttgacttgaattttctttacaaatataatatacctataaattaatgagctacgttcttgccaatcacatacataattagcctaaaccagtttctctacaaatcaaacaattgttcattatggctgcaaatccaataacagctttcttccttcttctaatcactcaaatattattattatccatctcaactgctcaacaaaataataccac

SEQ ID NO: 145978 - DNA, 579 bp, Cannabis sativa
tgctcatggagattttttgaatgccgagttaggttctaatccaagtttcatatggaggagtttggtggaggctcaaggtgtactgaaggccggacttagaatgcaagttggggatggtctttctattcgctttgcactagacccgtggctgcctagggaggagtttcccactcctacgtctgatctctctatgttcaatgatcatagagttcatagtctatttaagattgggtgccgagaatgggatgaagagattgttcaggatgtgtttaatgaagatgatgcagctgttattttgggcattcctcttgctgctggagaggctcgtgactcttggtactggtttaaagaaagggatggagtttactcggtcaagtctgcatatcagttgctcatgaatcaagtgactaatgcagtggtgagtgatactgattcgatgttttggaagaacctttggagcttaaaagttccgccgactgtcaaagatgttctttggagagctgtttcgaattgtttgcctacaaggaagagactctttgatagaaaggttcctttggattatagttgtcccttttgttt

SEQ ID NO: 145979 - DNA, 523 bp, Cannabis sativa
  modified_base (474)..(482): a, c, t, g, unknown or other
atcatatatcacataaatacgctagatgctcacctactgcctaaaatggaaagcggtaaataaataatcatatcagcagtaaaatgtttactctcaacacttactgctccacaagctgagcttgtctctgacgatgattgtacatgttcggtcggtctacaggaagtttaaaaactttggtgctctgataccaaactgtaaagccctaacaattaggcacgctacgctaaccaataaataaaccctattcccctaatccaagattactagatagataagcacgggaaaatttaaacttttatctaaaacagaataaaaattaaacttgtaataactttaaactttacaatcaaaagtgatatattttgggattccaaaactattttacaaattattacaagttcttttcactagccgatgtaagcggcaaaatcagagttacaaaagtgcatcactggtagaccccaacccgcnnnnnnnnntgtggcccgaacatgtacaagcaccgccaagctctcacact

SEQ ID NO: 145980 - DNA, 695 bp, Cannabis sativa
ggaaaccctgccaaaaccggctagccggttttagaggctctgcaaaccgactagccggtttgcattagatttcccaaagtcttatattctttgctcaattctccaccaaatgcaatgaaacctcccaaagtacctaataagggtatacacaataaattacagccaataaaccaaagaaaaactcattgaatcaaaacatgccattgaagaacaaactcaaagctcaaagttgcataaaacctattccaaccatcaaaacctgctacaaagagctaatactaactcaattgacccctataattcgaaccctaagcaataagcataactaaacctaacaaccactattattcaaaatcacaagttcaaactaagtaaaaaacttaaaaacataaaactaattgtctagggttacctttggttgctcctccttgaatccctagctaaaactcagagaattaagggagaaaaaggttgatccttgccctgatttgcctcagctgaaggaaagagagagagagtgtttaagagaaatgctatttccttctaattttctttttgattttctttaattggaaaaaggattctaattaatcctttgttgcccaaataattgctaggtgttatcctcaaaatcagccacctatcccaccatttaaaattactaaaataccccttaaacataaaactagggtatt

SEQ ID NO: 145981 - DNA, 721 bp, Cannabis sativa
catccaatggagcttgaacacacagtttttaaacattattatttgaaaatggtagcttacataacactatttgatgaacatgaatattcttgggaggagtgaataattttcttgaacaaatttgtatgacaccataacaccaaaaacattagcaataaaataatgactgtaattcttataaggttgagattttcttctaggacaaagacaaagacaagacattatgaaccctaagttaactcaaatatcaaggatcatgaagaacagaaacattaagcagtacaaacccctaaggatttccttagagagataaactagaccgagtcaagagttttagtaaaaatatctgctatttgctttcttgttgcaacatattctaagacaagtgctatacatgtttcaaaaaatcttgttaaacactctcgcacaaagtacgtagacatccgtcatcactttattagagagcttgtgaaaaataaagcacttgtcttagaatatgttacaactagcaagcaaatagtaaatatttttaagtgtatgaaagagatacaaaacctagctgctataaggtgtatttataatgaatacatcttatttacaacttacgcacggtctaaacaagaccccagtccattggaaacttccctaacataattcttcaatcagcccaggaatttccatttctgtacctacaaaatcgtgggcagtaagtacaactttc

SEQ ID NO: 145982 - DNA, 698 bp, Cannabis sativa
tttatacaggtgttcaatttttttttaatgtgtactgtttgtatgtatctataaatttagttgtttacctcatattttcttgcttgaataaagttgtctctgagtatttttttctgtcattgttgaaactttggtgaatgttccgtgtgcttcgttgttgtttgtccaaacccatttttgtaccaaacttcaaagactctccatcattgtagtgatgggcagtgttcttgaggcaagttttgctgaatttatcaactcagatatgttggatgtcatcattgtgtaccttctggtcgggcagtggcatctactccaatatttgtatcctattctctgaagataaggtctgattctattgtctattttatcaattctaacatgtatccttcaaatgatttcatgttgtatgtcttggcggctttgacaaagtttattctaagatcttccccgtgtactctaaaattgaccttaatgttgttaagcaagtggaatatgcatgctccatggaatatgtttgggtagatagaagctactgctttctttatgcttttgtgccggtctgagatgattgtcatgcatgcgagtcaaagttatcgtgctggaatatgttttaccaggatctagatttacttccatgtatgttatttaacatcctaaatatgaatttctaaaacaatacatataaagtttaggaaacc

SEQ ID NO: 145983 - DNA, 1037 bp, Cannabis sativa
aattattcattattcataattcataattatgtaattagggttctgctaatccacttctcaattctagggtattacaatcatactctgcgacagaaaggatcaagaattagaaatccaaacgaaatgagtcatttaattccgctacaaccaatgtaaggttttctataaacttttatgtttttattttattattttagggaattcatatttaagatgtttaattatagtgttataatcaaatatgcatgttagtaaatctagatcgtggtaaaataacattcaacaactggtctcagagtcagagctatagtaatgatttattttcatgaaatatggatttaaaatgatgtttggttgatttggatgtgttcatgttagtttatgtgattatttgatgattgatgtgatattacaaaattttttatgaaaaataattttatttttcgttttgaaattattttatttggaaagttggtaaaacattcaacaaattttctttttacagaacttaatttggattaaaattgacaaagttattatattttgaagttttggaaaaaccgggctagggtttaccctttatgcgcgcgtggatggagtgtctcactcgagcgagacacagttttagacaatgcttgtccaagatttctcggatgtgggcctgtcttaacggcctcctgcgccctaatgaggctgcaatgcagcctttcactcggccaaggccccctgttacgctcgcggtgcatactcccctgatttttccaattttcaattttttcaacttaaaaattattttttaattaactttagatcaatttaatcaagtagttttcattaatgattaattaaaataagtagactaaaatatattatattttaattaaaaaatcaacagttagtttatgaaattttaaataagaaattatatttaagtttatttcattcaagatacttaaatattaaatattttttttatgaaatttaattaaatagaaaaattatatttatgttcaaaattaatttattaattttagacc

SEQ ID NO: 145984 - DNA, 578 bp, Cannabis sativa
tgagctgttgcactcacatgcctatctatgtctacatggcatagacttatgtgttgcgctcacacatttatttaaatctacgtggcgtagacttacgtgttactctcacacgtctaattactttaaggtcttagaattgggtcatctcggttatggttaccgagtccaacccgattatgccttaagcgcattatccatgaatctcattgcatataacatggcatggcattttcacacatatatcactagggtaataaccctagactattagactgttcctattagggtaataaccctaatcatggttattaaacaatcattcatatcactttcaatataagcgccactgcgcatactctacgtgttaatcactgtcttacctattgtcccgcaatagcagagattctgaatccccgagtgctcctgatcaggtgccggtaatcctagtcacacaaattcgagattttcacgcatagggtttaccccagatttcaaacttataaaataatctcaaggaatttataattcatataatcatacagagctcggaaccgactttccaacgatataaagaactc

SEQ ID NO: 145985 - DNA, 1462 bp, Cannabis sativa
gaaactttttcaaaatttaaagagtttaaagaaatagtagaaggagaagtcgggaagaaaattcgatgcctctgaacagacaatggtagtgaatatacctcagatgaattttttgagtatcttcgagaatgtcgcctacgccatcaattcacatgtgtaaatacgccacaacagaatggagtaggtgagaggaagaattgccatcttgcagaaacatgtagaagcatgctacatgcgaagaatgaccaaggagattttgggctaaaggtatgaagacatccgctcatgtaatcaataggcttccctaagctaagttagggttcgtttcaccctttgaaaaactatagggttataaacctgcagtaagtcactttagagcatttggccgtgtgtgctacgtattcgtgccaagccacctacatagaaaatttgacaagaaagagacacgatgtatttttgtgggatatgacggccaacggaaatggtggagatattgcgaccctacaactggaaagtgttaatacatcaaggaatgtggtctttgatgaggcatcatcatggtggtcatcgcaaaaggaagcattactagattctaaagaaatggaagacaaatttcagaagaaaatgggggagaaaattggagatcaacaagagcgcgaaaagccaaattcaaaatatgttaatgctatcgtagctgaagaagaaaagtttagagaactagagtcatatgaagaggcatacaaaactccaagtggctaggagctatgaaagaagaaataaatgcgctagcgaagaatcagacttgggagttggtgtcaaagtcgaaggaagtgaaacccatttcatgcaaatgggtctacatggtaaaaactcatcctgatggtttaattgagagatacaaggttcagtttgttgctaaaattacaataatgggagttttgttagcacttgcagctagtaaagactggaggctatggcagatggatgtaaagaatgcctttctacatggagaactggatagagagatatacatggtgcaaccaagaggattcaaggatagagcacatcctgactatgttcgcaaattgaaaaaggcgctctatgaattaaagcaagatccacgagcatggtatggaaagattgttgagtttttagtagaaagcggatattacacggcacatgcatattcaagcttattcgtcaaagtaaagaagcaaagatcgcgattgttctggtatatgtcgatgatctcattatcgttgaagatgatgacgcagaaatttgtcaaacaaaagagaacctatcagtacactttcaaatgaaggagctcggagaattgaaacatttccctagattagaagttgaccgaactaaggaaggcttatttttctgtcagcaaaagtatactaaaaatttgctgcaaagatttggaatgcttgagtgtaagcccatctcaacacct

SEQ ID NO: 145986 - DNA, 767 bp, Cannabis sativa
aatccagcctatactcgatactctagtcgtactgatgtggtagcaggtagttcatactatctgatagcgtagcatatatctattggcatctttgtgcatctctatgtacacctcactgatgccctgatatgctaatttgatggctatagatttgcctaacatatatatttgttcgtatctcggtgcaactttatgtacatctcactgataccctaatatgttattctgatggcaactaatgtgtacgctaaacatgtatacataaatgcaaccattatactaatcttacctcattttcgaattcaggtgtgtcggccaacctgaggggaacagctgctcgacgatttacaggccctcaagtcacattattctcaaaaatgataagtgacacactaaatcacttttcggggacttaaacttgaaactaaaagttttcctattgatgaataacatggaaataccataaatattgtagaaatggaaaaaaaaaattagggttccttaaaatgccccaaccggtagaccgtttccccaaccgaaattcatgttctgtggggtttcctagtgacaaactggaattccgattccttcaggccacattgaaccggtcgaccggttcagtgcaggaaacactcaaaatcttctacacacctcaaattgattccaaaccacacaataacttctagatcacgtacatacatcataataaacataatctaggcaataaaacaacccaacataaccagaatcaaaatccaccattaaag

SEQ ID NO: 145987 - DNA, 753 bp, Cannabis sativa
tctctatatggtcttaagcaagcttctagacaatggaacttgaagtttgatgaatacatgaacaagattggctacatcaagagcaaatatgaccctgtgtatattttgctaacaaaatctatttactattgtatgttgatgacatactggttgttgggaaggaaaggtcaggtctgagattgacaagttaaagcagctgttgtgtaaagaatttgaaatgaaggatctggggacatcaaaaaggatcctaggtattgacagtatcagaaaaaagcctcacaagatcatattatctcaaagcaactatctcaagaaggttcttgataagtttggaatgttcaactccaaagctgtatcaacaccattagctcaacattttaatctatctgctactcaagctccaacaactgatgctgaaagaaaacacatgagcaatataccctatgctagttgtgtaggaagtctaatgtactcaatggtgtatactagaccagatattgcccatgccatgagtgttacaagcagatatttggctaatcctggagaaaaacattggtctgcactcaagtggacaatgagatacattaaaggaaccctgaacacagggttggtatttgatagcagagatcaaatacatggtgatgtaactggctatgttgattctaattatgtaggaaatattgatactagaaggtgttggaaatattttaccaggatctaaatttactaccatgtatgtttcattaacatcct

SEQ ID NO: 145988 - DNA, 713 bp, Cannabis sativa
tttctaacccaatctaaagttcggattgctaaaatttaagtgcaacccgcccaatttaaaaaaaaaaatgtaaactgaccaacagtttgagcggtttggtgggattaaccccaccatgatctttcactttacctgatacgttaacatacaacattaaacatatacaagtcataacaaccataatatatatatatatatcgattcacttaattcatattgtttttaaaatcttacactctcagtattattgtattatatacgcatttataataataaattgtaaattatattctaatacacaatgaatttaaatttatgtaaataaacacatacaactactatatgaaataatcttaacccattaacaacacaaaaataacataattattctcgagtcatcattatttcaaaaaaaatcaaatactattttattttagatattacaaatttacagtgctataattaaagattaaaaacattttgctatatgagagttatgataaacaagatcagtttgaactttatttccaaataaaatcttatcctatatacgtttgaattatttgatataatcattcaattgttattttgaatataaaattgacaagttatttataaattccaaatagggatttttacactagatgtcaaatttggtatcttttttacatttttatttatgtttggtcttttaaacttttttataaaatttg

SEQ ID NO: 145989 - DNA, 573 bp, Cannabis sativa
acttgcgtgagatactacttgatacgtacacttgcgtaataaacagaaaattcgtaacagaaatttgaaaaagaaaattttaataccctagaaacaaggttcaaactatcggttgtatgcgtgactcttttatttggagggatgcattacttcttaatttattgtgtaaatttaaatgtaaataccataattattattatgttattgtaatatgatattttgatttattgagttttatcgattctacagtattattatttttaaactaattagtagttttatttaaattattatttaaattttacaattgtggtgattttaataaattagtataatattaaaaaattgatataataataagaaatattatttttattatttttagtattgtggttggagtaaaaatagtttttgacaccaaatttagcgatattgtgataccaaatttggcgtgtaggttgaagatgctctaagcccataatattctaaagttaaaccctcaaaataaatagggattacttcacaaatacacaaaaattataaaaatgcagtttcacagaatttttaatattt

SEQ ID NO: 145990 - DNA, 513 bp, Cannabis sativa
tagggcataaaacctaacatagacttcatgggtccgtttccttcatcttttagcaatctgtacattttattggctgtggattatgtgtcaaaatgggtttaggctgcagcaacaccacaaaatgacggtaaaacagttcttcgcttccttcaaaagaacatattcactaggtttggtactctccgagcaatcataagcgatgaagggagtcacttttgcaacaaacagtttaaagcactcctttcaagatatggtgtccatcacagaactgctctaccgtatcatccccaaagtaatggccaagctgaaatttctaaccggtaaataaagatgattctggagaaaacagtgcagagatcaagaaaagactggtcaagaacgttagatgttgcattgtgggcatatagaacagccttcaagacaccgatcgggatgtcaccatatcggttggtgtttggaaaagcttgtcatctaccggtggaattagagcacaaggcctattgggctatgaag

SEQ ID NO: 145991 - DNA, 765 bp, Cannabis sativa
  modified_base (717)..(718): a, c, t, g, unknown or other
actcatttaatgtaccctgagatccatctaatgtaccacggaatacattccgtgaaagtacattacgagacaaaatcatatccctatatatatgtatagaacaagattacccttctacaatatttttgacactttaagaaattataatgagaaatttgacaattcatgcataaaaattgttcatggtcttttagtatgccacattaaaatgtataggaatttaatactctaaaattaattacatccagcccaaaataccctcctgatcataccttctctcggccctctctccctctctcatgaactctcaccaaatccaactgatatccaggaccacagaattagaccgaaccagaccatgaccaccgcaccacctcccacgaaacccactccgaagaagaaatgtaggataaaattgaggaggatatcgtgaaaccataaagagaaatcgtgaaacccaaagccccaaaatctaagagctcaaccactcgaaatccctacccatcgttggagttctcaacttgcttgttttctgctttttttttctggtttatgaagatgtcgcgaaacatcgctaaatgtgtcaattaattcacaatatcactaaacacatcgctaaatatcacgaaattatactcaagttttcacgataattagcgatgtttagcgatgtgctgtatatttttagtctcatatcacaaatacatcgctaaatannaatacgcaaaacatcgccaaatatcgcgaatcatcgctgaacttcat

SEQ ID NO: 145992 - DNA, 504 bp, Cannabis sativa
  modified_base (207)..(210): a, c, t, g, unknown or other
taaatttatattgaatcatgttgttttctattattaatgttatagtataattttgaatcttcattgttggtcgaacttagcttgttgtttttaatgggacaaattttaaaggattatcatctgttagacaaacaaaatagtgttagatctcaacagataaatatttgtagatgcgacatctaattgtacatccaaagatgacaactnnnnctagtgtttacaatatgaaacaatcaagaaattttataaattaagaataacttcaactcttgcctaaacgggacatcgttggattcttattttattcgaaatgatcttttctcctcttagctttttcattatgaatttgcttagatagtatatcattagatagatggtttataaatcatatgcctatgatgtcattctttttttctcttacgaaattgaatggcgcaaatgactacattccagaaattttatcccaaaatgatataaattctcgattttagaaatctcctactt

SEQ ID NO: 145993 - DNA, 1620 bp, Cannabis sativa
aacacttagcatataatgtacaaactaagtataacaatcgggttggctcgagacctaataagcgaggtgcctatctcgctataggaaggctcattctagtaacttccctcagtttacttcagacatcttctcagcgagacttactatcttgaggagtcagaagctgacattcgaatgagcctcaaaaaactatctattaataagaaccgcgagtgtcataaatgaaacgttaagctttcaaacaaagaagcaacaatgcgtacattttcgaacttggaaggataagaaaaaagggtccagctcgctatcatggtcactggaactaagatcctgttgagacatcccagagtgcaacaattaaagatgtgtttaaacacacaatcattttgacccagtaaaagcgtgaaaatcacagctatatgattgttaaataataatcgcatttacactacgtgatatgtcaactttgtaattaactgccacctatgtgattataaatagtggcaagtaagataaaaaagtggacaaaaaatcatacaaaaaaaggccttcaaaaactatcagaaatctaataagattgactcgtggactatgcagaattttaactgccaaaccacgtaaaaaatcatttgtgttcatacctcttactttactgcttttattttttctgtgtgaaattatcactgtgaggctcaaattttggttaacaaaaatctgcgttaacattttggtactttcattgagagcctttgtgaaaaagctcagaaaaaaccctcctttcttttgaagaaaaacaacctccttcatggatgaaaacccagaaaatgttaatacaccacatgaggaaactcatcatcgtcctgggaaagagcccatgggctccaaaaggtctaccaacccacagtccagacggaccacctattctaggaggactcaacttgagggtggccccagtactcggaccacacgttcccggtggacccaacctgacgttggtcctagtacgtgaacaacgcgctcgaggagaactcaacgtgggaatggccagaaccctggaatgagggatgaagagcccaatcgtggaggtacccagtctatgggagaagatacttatgaaatagaaaactgtcgtcctacgtgccatttgaaagaggtagagcggcagaacgctaaattagagcgtgatgcagccgcggctagggcggcacaggggactaacgctcaaaatcaagttgaacctagagtgagaagaccacgaggcaggcctcgtgggtcgcgaaccaggagacaggaaaatgcctgggaagaacaacccatggaaaatgagatacccctttaaaatcagaatgatcagccataaccctctcacaaaaatgagattaggaggaaaccagaaactaatggacgggaaattcctcatgaaaatgaggaggatcttggaactcaacctggagaacgtaggtcacctgcgagaaatcaccagcattcttcccgaacccatagagcgagggctcatacatactcaatgggggaaatacgacaaaccacactcaagggaaaagaacagagcgtgaagaagcaagtgtgacctcgaggcggtcaaggacccacagtcgatca

SEQ ID NO: 145994 - DNA, 825 bp, Cannabis sativa
gttgttcttcatatgacaagtccggttgcagctctagattttcataactcagtacatgagcagggtctgaaacgtacttccttagcatagagaaatggagtacgttgagaactgctgaaagagcaggaggcaaagctaaccgatatgccacttgtccaaccttctcgagaatctcgaacggtcttgtaaatttagggcataacttgcctctttctccaaaacgcttgatccccttcattggagacactcgaaggaacacaagatcccctacttaaaactctacattttcgcgttttggatctacataactctttttcttgctctgagaagtaagcattctagctttaatcttctcaattgctttattagttcgctgtacggaatctggagatctaaaattgctttattagtaagcattctagctttaatcttctcccttgtctcatcctagtgaattggagatctaaaatttctgccatataacaattcataaggagttatccctattgtactctgaaaattattattttacgagaactctatcaacggtaagtacttactctaggagccctcgaaatccataacacaggctcgtaacatatctttcagtatttgaattttcctttcggactatccatcagtctcaggatggaaagctgtactgaatttcagtttggtacccatagctcgttgcaaactttgccagaattcagaggtaaacttttgatctctatccgaaactatagactttggtacaccatgcaatcttactatctcgttaaagtacaaatctgtatactgatccactgaaaaggttgtcttaac

SEQ ID NO: 145995 - DNA, 691 bp, Cannabis sativa
tgctgacccggtacaagacgttcaactggttgccaatctttcgcgtcacaccctatatacagtgacaaattcagaatttttaattagccaaatacattattgtaaaagagagagagagagcatactaatttacatataattttttttataaacaaataaatcacaggaaaattagtgttattattagagatggtcgtaaggtgacacttaatccgtgaagtaaatatttatttacattatgtaattcttaaaataaagattaatttgtaatataaatacctaagttacaaataaaaacttaaatttaatttttgacagtaataatatctaagttataattccggaacttctgcatgtacctaactgttaagtgttaaataaattgacacgtgacaatcctaattggtctaggtcattaaatttatgtttttttttttaaaaaaaaaatagtttaaatataccaataaaaaagtaacacgggaataagacttgacatttaacgatcatgtacttacgaaattctagaaatataacttagatatttatttgtaattagaaattaaatttaagtattcatgcaaaaaattacactaaaataaacgagagctttagtgcatgtttgacatcataattaaaaaaatattttttgtttttaaaaacagaaaattattttttgaaaacaatttagctt
